(19) United States
(12) Patent Application Publication
(10) Pub. No.: US 2018/0305689 A1
(43) Pub. Date: Oct. 25, 2018

(54) SARNA COMPOSITIONS AND METHODS OF USE

(71) Applicant: MiNA THERAPEUTICS LIMITED, LONDON (GB)

(72) Inventors: Pål Sætrom, Trondheim (NO); Endre Bakken Stovner, Trondheim (NO)

(21) Appl. No.: 15/568,046

(22) PCT Filed: Apr. 21, 2016
(86) PCT No.: PCT/GB2016/051116

§ 371 Date: Oct. 20, 2017

Related U.S. Application Data
(60) Provisional application No. 62/150,892, filed on Apr. 22, 2015.
(60) Provisional application No. 62/150,893, filed on Apr. 22, 2015.
(60) Provisional application No. 62/150,897, filed on Apr. 22, 2015.
(60) Provisional application No. 62/150,895, filed on Apr. 22, 2015.
(60) Provisional application No. 62/150,904, filed on Apr. 22, 2015.
(60) Provisional application No. 62/150,908, filed on Apr. 22, 2015.
(60) Provisional application No. 62/150,900, filed on Apr. 22, 2015.

(51) Int. Cl. C12N 15/113

(52) U.S. Cl. CPC C12N 15/113; C12N 2310/34; C12N 2310/14; C12N 2310/11

(57) ABSTRACT

The invention relates to oligonucleotides, e.g., saRNAs useful in upregulating the expression of a target gene and therapeutic compositions comprising such oligonucleotides. Methods of using the oligonucleotides and the therapeutic compositions are also provided.

### CROSS-REFERENCE TO RELATED APPLICATIONS

[0001] This application is a 35 U.S.C. § 371 U.S. National Stage Entry of International Application No. PCT/GB2016/051116 filed Apr. 21, 2016, entitled SARNA COMPOSITIONS AND METHODS OF USE, which claims the benefit of priority of U.S. Provisional Application No. 62/150,892 filed Apr. 22, 2015, entitled SARNA COMPOSITIONS AND METHODS OF USE, U.S. Application No. 62/150,893 filed Apr. 22, 2015, entitled SARNA COMPOSITIONS AND METHODS OF USE, U.S. Application No. 62/150,897 filed Apr. 22, 2015, entitled SARNA COMPOSITIONS AND METHODS OF USE, U.S. Application No. 62/150,895 filed Apr. 22, 2015, entitled SARNA COMPOSITIONS AND METHODS OF USE, U.S. Application No. 62/150,904 filed Apr. 22, 2015, entitled SARNA COMPOSITIONS AND METHODS OF USE, U.S. Application No. 62/150,908 filed Apr. 22, 2015, entitled SARNA COMPOSITIONS AND METHODS OF USE and U.S. Application No. 62/150,900 filed Apr. 22, 2015, entitled SARNA COMPOSITIONS AND METHODS OF USE the contents of which are each incorporated herein by reference in their entirety.

### REFERENCE TO SEQUENCE LISTING

[0002] The instant application contains a “lengthy” Sequence Listing which has been submitted via DVD-R in lieu of a printed paper copy, and is hereby incorporated by reference in its entirety. This contains a sequence listing text file as part of the originally filed subject matter as follows: File name: 20581300US371_SL.txt; File size: 974,266,368 bytes; Date created: Oct. 19, 2017. These DVD-Rs are labeled “CRF,” “Copy 1, ” and “Copy 2, ” respectively, and each contain only one identical file, as identified immediately above. The machine-readable format of each DVD-R is IBM-PC and the operating system of each disc is MS-Windows.

### REFERENCE TO LENGTHY TABLE

[0003] The specification includes a Lengthy Table 1 and a Lengthy Table 2. Lengthy Table 1 has been submitted via EFS-Web in electronic format as follows: File name: Table1_1300US371_coding.txt, Date created: Oct. 19, 2017; File size: 2,916,312 bytes and is incorporated herein by reference in its entirety. Lengthy Table 2 has been submitted via EFS-Web in electronic format as follows: File name: Table2_1300US371_noncoding.txt, Date created: Oct. 19, 2017; File size: 802,071 bytes and is incorporated herein by reference in its entirety. Please refer to the end of the specification for access instructions.

### FIELD OF THE INVENTION

[0004] The invention relates to oligonucleotides, specifically saRNA, compositions for modulating target gene expression and to the methods of using the compositions in diagnostic and therapeutic applications.

LENGTHY TABLES
The patent application contains a lengthy table section. A copy of the table is available in electronic form from the USPTO web site (http://seqdata.uspto.gov/?pageRequest=docDetail&DocID=US20180305689A1). An electronic copy of the table will also be available from the USPTO upon request and payment of the fee set forth in 37 CFR 1.19(b)(3).

### BACKGROUND OF THE INVENTION

[0005] Recently it has been discovered that short RNAs can regulate transcription by destructing transcripts that are sense or antisense to a given mRNA and which are presumed to be non-coding transcripts. Destruction of the non-coding transcripts which are sense, or identical to, the given mRNA results in transcriptional repression of that mRNA, whereas destruction of the non-coding transcripts which are antisense to the given mRNA results in transcriptional activation and/or increased expression of the mRNA or the level of protein encoded by the mRNA. By targeting such non-coding transcripts, short RNAs can therefore be used to up-regulate specific genes at either the nucleic acid or protein. Small duplex RNAs have also been discovered to increase gene expression by targeting ncRNAs that overlap gene promoters (Janowski et al., Nature Chemical Biology, vol. 3:166-173 (2007), the contents of which are incorporated herein by reference in their entirety).

[0006] Any short RNA which leads to up-regulation of the expression of a target gene by any mechanism is termed a short activating RNA or small activating RNA (saRNA). Known methods of up-regulating a target gene by use of saRNAs can involve the detection of an RNA transcript which is antisense to the target gene of interest and designing short RNA molecules which down-regulate the identified transcript. For instance, U.S. Pat. No. 8,288,354 to Wahlestedt, the contents of which are incorporated herein by reference in their entirety, discloses a method of modulating expression of a target gene comprising targeting a nucleic acid molecule to a naturally-occurring anti-sense transcript (NAT) of a sense strand of the targeted gene in a target cell, wherein the nucleic acid molecule targeting the NAT is complementary to the NAT. The NAT may be a coding RNA transcript or a non-coding RNA transcript lacking any extensive open reading frame. In another example, WO 2012/065143 to Krieg et al., the contents of which are incorporated herein by reference in their entirety, teaches a method of activating expression of a target gene comprising blocking the binding of a long non-coding RNA (Inc-RNA) to Polycomb repressive complex 2 (PRC2) protein by a single-stranded oligonucleotide, thereby preventing the Inc-RNA from suppressing the target gene.

[0007] There remains, however, a need for compositions and methods for the targeted modulation of genes via activation with saRNA which do not require the a priori identification of a NAT or rely on interactions at the polycomb complex for prophylactic diagnostic and/or therapeutic purposes.

### BRIEF DESCRIPTION OF THE DRAWINGS

[0008] The foregoing and other objects, features and advantages will be apparent from the following description of particular embodiments of the invention, as illustrated in the accompanying drawings in which like reference characters refer to the same parts throughout the different views. The drawings are not necessarily to scale, emphasis instead being placed upon illustrating the principles of various embodiments of the invention.

[0009] FIG. 1 is a schematic illustrating the relationships among the nucleic acid moieties involved in the function of an saRNA of the invention.

### SUMMARY OF THE INVENTION

[0010] The present invention provides compositions, methods and kits for the design, preparation, manufacture, formulation and/or use of short (or small) activating RNA (saRNA) that modulates target gene expression and/or function for therapeutic purposes, including diagnosing and prognosis.

[0011] It is understood by those of skill in the art that the term saRNA may refer to a single saRNA or saRNA in the plural (saRNAs).

[0012] One aspect of the invention provides an saRNA that targets an anti sense RNA transcript of a target gene. The antisense RNA transcript of the target gene is referred to thereafter as the target antisense RNA transcript. The target antisense RNA transcript is transcribed from the coding strand of the target gene.

[0013] Another aspect of the invention provides a pharmaceutical composition comprising an saRNA that targets an antisense RNA transcript of a target gene and at least one pharmaceutically acceptable excipient, wherein the expression of the target gene is up-regulated.

[0014] Another aspect of the invention provides a method of modulating the expression of a target gene comprising administering an saRNA that targets an antisense RNA transcript of the target gene.

[0015] Another aspect of the invention provides treating or preventing a disease comprising administering an saRNA that targets an antisense RNA transcript of a target gene, wherein the target gene is associated with the disease.

[0016] The details of various embodiments of the invention are set forth in the description below. Other features, objects, and advantages of the invention will be apparent from the description and the drawings, and from the claims.

### DETAILED DESCRIPTION

[0017] The present invention provides compositions, methods and kits for modulating target gene expression and/or function for therapeutic purposes. These compositions, methods and kits comprise at least one saRNA that upregulates the expression of a target gene.

I. Design and Synthesis of saRNA

[0018] One aspect of the present invention provides a method to design and synthesize saRNA.

[0019] The terms “small activating RNA”, “short activating RNA”, or “saRNA” in the context of the present invention means a single-stranded or double-stranded RNA that upregulates or has a positive effect on the expression of a specific gene. The saRNA may be single-stranded of 14 to 30 nucleotides. The saRNA may also be double-stranded, each strand comprising 14 to 30 nucleotides. The gene is called the target gene of the saRNA. As used herein, the target gene is a double-stranded DNA comprising a coding strand and a template strand. For example, an saRNA that upregulates the expression of the A3GALT2 gene is called an “A3GALT2-saRNA” and the A3GALT2 gene is the target gene of the A3GALT2-saRNA. A target gene may be any gene of interest. In some embodiments, a target gene has a promoter region on the template strand.

[0020] By “upregulation” or “activation” of a gene is meant an increase in the level of expression of a gene, or levels of the polypeptide(s) encoded by a gene or the activity thereof, or levels of the RNA transcript(s) transcribed from the template strand of a gene above that observed in the absence of the saRNA of the present invention. The saRNA of the present invention may have a direct upregulating effect on the expression of the target gene.

[0021] The saRNAs of the present invention may have an indirect upregulating effect on the RNA transcript(s) transcribed from the template strand of the target gene and/or the polypeptide(s) encoded by the target gene or mRNA. The RNA transcript transcribed from the target gene is referred to thereafter as the target transcript. The target transcript may be an mRNA of the target gene. The target transcript may exist in the mitochondria. The saRNAs of the present invention may have a downstream effect on a biological process or activity. In such embodiments, an saRNA targeting a first transcript may have an effect (either upregulating or downregulating) on a second, non-target transcript.

[0022] In one embodiment, the saRNA of the present invention may show efficacy in proliferating cells. As used herein with respect to cells, “proliferating” means cells which are growing and/or reproducing rapidly.

### Target Antisense RNA Transcript of a Target Gene

[0023] In one embodiment, the saRNAs of the present invention is designed to be complementary to a target antisense RNA transcript of a target gene, and it may exert its effect on the target gene expression and/or function by down-regulating the target antisense RNA transcript. The target antisense RNA transcript is transcribed from the coding strand of the target gene and may exist in the nucleus of a cell.

[0024] The term “complementary to” in the context means being able to hybridize with the target antisense RNA transcript under stringent conditions.

[0025] The term “antisense” when used to describe a target antisense RNA transcript in the context of the present invention means that the sequence is complementary to a sequence on the coding strand of a gene.

[0026] It is to be understood that thymidine of the DNA is replaced by uridine in RNA and that this difference does not alter the understanding of the terms “antisense” or “complementarity”.

[0027] The target antisense RNA transcript may be transcribed from a locus on the coding strand between up to 100, 80, 60, 40, 20 or 10 kb upstream of a location corresponding to the target gene's transcription start site (TSS) and up to 100, 80, 60, 40, 20 or 10 kb downstream of a location corresponding to the target gene's transcription stop site.

[0028] In one embodiment, the target antisense RNA transcript is transcribed from a locus on the coding strand located within +/−1 kb of the target gene's transcription start site.

[0029] In another embodiment, the target antisense RNA transcript is transcribed from a locus on the coding strand located within +/−500 nt, +/−250 nt, +/−100 nt, +/−10 nt, +/−5 nt or +/−1 nt of the target gene's transcription start site.

[0030] In another embodiment, the target antisense RNA transcript is transcribed from a locus on the coding strand located +/−2000 nucleotides of the target gene's transcription start site.

[0031] In another embodiment, the locus on the coding strand is no more than 1000 nucleotides upstream or downstream from a location corresponding to the target gene's transcription start site.

[0032] In another embodiment, the locus on the coding strand is no more than 500 nucleotides upstream or downstream from a location corresponding to the target gene's transcription start site.

[0033] The term “transcription start site” (TSS) as used herein means a nucleotide on the template strand of a gene corresponding to or marking the location of the start of transcription. The TSS may be located within the promoter region on the template strand of the gene.

[0034] The term “transcription stop site” as used herein means a region, which can be one or more nucleotides, on the template strand of a gene, which has at least one feature such as, but not limited to, a region which encodes at least one stop codon of the target transcript, a region encoding a sequence preceding the 3′UTR of the target transcript, a region where the RNA polymerase releases the gene, a region encoding a splice site or an area before a splice site and a region on the template strand where transcription of the target transcript terminates.

[0035] The phrase “is transcribed from a particular locus” in the context of the target antisense RNA transcript of the invention means the transcription of the target antisense RNA transcript starts at the particular locus.

[0036] The target antisense RNA transcript is complementary to the coding strand of the genomic sequence of the target gene, and any reference herein to “genomic sequence” is shorthand for “coding strand of the genomic sequence”.

[0037] The “coding strand” of a gene has the same base sequence as the mRNA produced, except T is replayed by U in the mRNA. The “template strand” of a gene is therefore complementary and antiparallel to the mRNA produced.

[0038] Thus, the target antisense RNA transcript may comprise a sequence which is complementary to a genomic sequence located between 100, 80, 60, 40, 20 or 10 kb upstream of the target gene's transcription start site and 100, 80, 60, 40, 20 or 10 kb downstream of the target gene's transcription stop site.

[0039] In one embodiment, the target anti sense RNA transcript comprises a sequence which is complementary to a genomic sequence located between 1 kb upstream of the target gene's transcription start site and 1 kb downstream of the target gene's transcription stop site.

[0040] In another embodiment, the target antisense RNA transcript comprises a sequence which is complementary to a genomic sequence located between 500, 250, 100, 10, 5 or 1 nucleotide upstream of the target gene's transcription start site and ending 500, 250, 100, 10, 5 or 1 nucleotide downstream of the target gene's transcription stop site.

[0041] The target antisense RNA transcript may comprise a sequence which is complementary to a genomic sequence which includes the coding region of the target gene. The target anti sense RNA transcript may comprise a sequence which is complementary to a genomic sequence that aligns with the target gene's promoter region on the template strand. Genes may possess a plurality of promoter regions, in which case the target antisense RNA transcript may align with one, two or more of the promoter regions. An online database of annotated gene loci may be used to identify the promoter regions of genes. The terms ‘align’ and ‘alignment’ when used in the context of a pair of nucleotide sequences mean the pair of nucleotide sequences are complementary to each other or have sequence identity with each other.

[0042] The region of alignment between the target anti sense RNA transcript and the promoter region of the target gene may be partial and may be as short as a single nucleotide in length, although it may be at least 15 or at least 20 nucleotides in length, or at least 25 nucleotides in length, or at least 30, 35, 40, 45 or 50 nucleotides in length, or at least 55, 60, 65, 70 or 75 nucleotides in length, or at least 100 nucleotides in length. Each of the following specific arrangements is intended to fall within the scope of the term “alignment”:

[0043] a) The target antisense RNA transcript and the target gene's promoter region are identical in length and they align (i.e. they align over their entire lengths).

[0044] b) The target antisense RNA transcript is shorter than the target gene's promoter region and aligns over its entire length with the target gene's promoter region (i.e. it aligns over its entire length to a sequence within the target gene's promoter region).

[0045] c) The target antisense RNA transcript is longer than the target gene's promoter region and the target gene's promoter region is aligned fully by it (i.e. the target gene's promoter region is aligns over its entire length to a sequence within the target antisense RNA transcript).

[0046] d) The target anti sense RNA transcript and the target gene's promoter region are of the same or different lengths and the region of alignment is shorter than both the length of the target antisense RNA transcript and the length of the target gene's promoter region.

[0047] The above definition of “align” and “alignment” applies mutatis mutandis to the description of other overlapping, e.g., aligned sequences throughout the description. Clearly, if a target antisense RNA transcript is described as aligning with a region of the target gene other than the promoter region then the sequence of the target antisense RNA transcript aligns with a sequence within the noted region rather than within the promoter region of the target gene.

[0048] In one embodiment, the target antisense RNA transcript is at least 1 kb, or at least 2, 3, 4, 5, 6, 7, 8, 9 or 10, e.g., 20, 25, 30, 35 or 40 kb long.

[0049] In one embodiment, the target antisense RNA transcript comprises a sequence which is at least 75%, or at least 85%, or at least 90%, or at least 95% complementary along its full length to a sequence on the coding strand of the target gene.

[0050] The present invention provides saRNAs targeting the target antisense RNA transcript and may effectively and specifically down-regulate such target antisense RNA transcripts. This can be achieved by saRNA having a high degree of complementarity to a region within the target antisense RNA transcript. The saRNA will have no more than 5, or no more than 4 or 3, or no more than 2, or no more than 1, or no mismatches with the region within the target antisense RNA transcript to be targeted.

[0051] Referring to FIG. 1, as the target antisense RNA transcript has sequence identity with a region of the template strand of the target gene, the target antisense RNA transcript will be in part identical to a region within the template strand of the target gene allowing reference to be made either to the template strand of the gene or to a target anti sense RNA transcript. The location at which the saRNA hybridizes or binds to the target antisense RNA transcript (and hence the same location on the template strand) is referred to as the “targeted sequence” or “target site”.

[0052] The antisense strand of the saRNA (whether single- or double-stranded) may be at least 80%, 90%, 95%, 98%, 99% or 100% identical with the reverse complement of the targeted sequence. Thus, the reverse complement of the antisense strand of the saRNA has a high degree of sequence identity with the targeted sequence. The targeted sequence may have the same length, i.e, the same number of nucleotides, as the saRNA and/or the reverse complement of the saRNA.

[0053] In some embodiments, the targeted sequence comprises at least 14 and less than 30 nucleotides.

[0054] In some embodiments, the targeted sequence has 19, 20, 21, 22, or 23 nucleotides.

[0055] In some embodiments, the location of the targeted sequence is situated within a promoter area of the template strand.

[0056] In some embodiments, the targeted sequence is located within a TSS (transcription start site) core of the template stand. A “TSS core” or “TSS core sequence” as used herein, refers to a region between 2000 nucleotides upstream and 2000 nucleotides downstream of the TSS (transcription start site). Therefore, the TSS core comprises 4001 nucleotides and the TSS is located at position 2001 from the 5′ end of the TSS core sequence.

[0057] In some embodiments, the targeted sequence is located between 1000 nucleotides upstream and 1000 nucleotides downstream of the TSS.

[0058] In some embodiments, the targeted sequence is located between 500 nucleotides upstream and 500 nucleotides downstream of the TSS.

[0059] In some embodiments, the targeted sequence is located between 250 nucleotides upstream and 250 nucleotides downstream of the TSS.

[0060] In some embodiments, the targeted sequence is located between 100 nucleotides upstream and 100 nucleotides downstream of the TSS.

[0061] In some embodiments, the targeted sequence is located between 10 nucleotides upstream and 10 nucleotides downstream of the TSS.

[0062] In some embodiments, the targeted sequence is located between 5 nucleotides upstream and 5 nucleotides downstream of the TSS.

[0063] In some embodiments, the targeted sequence is located between 1 nucleotide upstream and 1 nucleotide downstream of the TSS.

[0064] In some embodiments, the targeted sequence is located upstream of the TSS in the TSS core. The targeted sequence may be less than 2000, less than 1000, less than 500, less than 250, less than 100, less than 10 or less than 5 nucleotides upstream of the TSS.

[0065] In some embodiments, the targeted sequence is located downstream of the TSS in the TSS core. The targeted sequence may be less than 2000, less than 1000, less than 500, less than 250, less than 100, less than 10 or less than 5 nucleotides downstream of the TSS.

[0066] In some embodiments, the targeted sequence is located +/−50 nucleotides surrounding the TSS of the TSS core. In some embodiments, the targeted sequence substantially overlaps the TSS of the TSS core. In some embodiments, the targeted sequence overlaps begins or ends at the TSS of the TSS core. In some embodiments, the targeted sequence overlaps the TSS of the TSS core by 1, 2, 3, 4, 5, 9, 10, 11, 12, 13, 14, 15, 16, 17, 18 or 19 nucleotides in either the upstream or downstream direction.

[0067] The location of the targeted sequence on the template strand is defined by the location of the 5′ end of the targeted sequence. The 5′ end of the targeted sequence may be at any position of the TSS core and the targeted sequence may start at any position selected from position 1 to position 4001 of the TSS core. For reference herein, when the 5′ most end of the targeted sequence from position 1 to position 2000 of the TSS core, the targeted sequence is considered upstream of the TSS and when the 5′ most end of the targeted sequence is from position 2002 to 4001, the targeted sequence is considered downstream of the TSS. When the 5′ most end of the targeted sequence is at nucleotide 2001, the targeted sequence is considered to be a TSS centric sequence and is neither upstream nor downstream of the TSS.

[0068] For further reference, for example, when the 5′ end of the targeted sequence is at position 1600 of the TSS core, i.e., it is the 1600^{th} nucleotide of the TSS core, the targeted sequence starts at position 1600 of the TSS core and is considered to be upstream of the TSS.

[0069] In one embodiment, the TSS core is a sequence for the target gene as described in Lengthy Table 1 and Lengthy Table 2.

[0070] In one embodiment, the TSS core is a sequence such as, but not limited to, SEQ ID NO: 1-4047, 315236-318726, 584785-589061, 913310-917531, 1241080-1245401, 1559932-1564372 and 1879189-1889207.

[0071] In one embodiment, the saRNA of the present invention may have two strands that form a duplex, one strand being a guide strand. The saRNA duplex is also called a double-stranded saRNA. A double-stranded saRNA or saRNA duplex, as used herein, is an saRNA that includes more than one, and preferably, two, strands in which interstrand hybridization can form a region of duplex structure. The two strands of a double-stranded saRNA are referred to as an antisense strand or a guide strand, and a sense strand or a passenger strand.

[0072] The anti sense strand of an saRNA duplex, used interchangeably with antisense strand saRNA or antisense saRNA, has a high degree of complementarity to a region within the target anti sense RNA transcript. The antisense strand may have no more than 5, or no more than 4 or 3, or no more than 2, or no more than 1, or no mismatches with the region within the target antisense RNA transcript or targeted sequence. Therefore, the antisense strand has a high degree of complementary to the targeted sequence on the template strand. The sense strand of the saRNA duplex, used interchangeably with sense strand saRNA or sense saRNA, has a high degree of sequence identity with the targeted sequence on the template strand. In some embodiments, the targeted sequence is located within the promoter area of the template strand. In some embodiments, the targeted sequence is located within the TSS core of the template stand.

[0073] The location of the antisense strand and/or sense strand of the saRNA duplex, relative to the targeted sequence is defined by making reference to the TSS core sequence. For example, when the targeted sequence is downstream of the TSS, the antisense saRNA and the sense saRNA start downstream of the TSS. In another example, when the targeted sequence starts at position 200 of the TSS core, the antisense saRNA and the sense saRNA start upstream of the TSS.

[0074] The relationships among the saRNAs, a target gene, a coding strand of the target gene, a template strand of the target gene, a target antisense RNA transcript, a target transcript, a targeted sequence/target site, and the TSS are shown in FIG. 1.

[0075] A “strand” in the context of the present invention means a contiguous sequence of nucleotides, including non-naturally occurring or modified nucleotides. Two or more strands may be, or each form a part of, separate molecules, or they may be connected covalently, e.g., by a linker such as a polyethyleneglycol linker. At least one strand of an saRNA may comprise a region that is complementary to a target antisense RNA. Such a strand is called an antisense or guide strand of the saRNA duplex. A second strand of an saRNA that comprises a region complementary to the antisense strand of the saRNA is called a sense or passenger strand.

[0076] An saRNA duplex may also be formed from a single molecule that is at least partly self-complementary forming a hairpin structure, including a duplex region. In such case, the term “strand” refers to one of the regions of the saRNA that is complementary to another internal region of the saRNA. The guide strand of the saRNA will have no more than 5, or no more than 4 or 3, or no more than 2, or no more than 1, or no mismatches with the sequence within the target antisense RNA transcript.

[0077] In some embodiments, the passenger strand of an saRNA may comprise at least one nucleotide that is not complementary to the corresponding nucleotide on the guide strand, called a mismatch with the guide strand. The mismatch with the guide strand may encourage preferential loading of the guide strand (Wu et al., PLoS ONE, vol. 6 (12):e28580 (2011), the contents of which are incorporated herein by reference in their entirety). In one embodiment, the at least one mismatch with the guide strand may be at 3′ end of the passenger strand. In one embodiment, the 3′ end of the passenger strand may comprise 1-5 mismatches with the guide strand. In one embodiment, the 3′ end of the passenger strand may comprise 2-3 mismatches with the guide strand. In one embodiment, the 3′ end of the passenger strand may comprise 6-10 mismatches with the guide strand.

[0078] In one embodiment, an saRNA duplex may show efficacy in proliferating cells.

[0079] An saRNA duplex may have siRNA-like complementarity to a region of a target antisense RNA transcript; that is, 100% complementarity between nucleotides 2-6 from the 5′ end of the guide strand in the saRNA duplex and a region of the target antisense RNA transcript. Other nucleotides of the saRNA may, in addition, have at least 80%, 90%, 95%, 98%, 99% or 100% complementarity to a region of the target antisense RNA transcript. For example, nucleotides 7 (counted from the 5′ end) until the 3′ end of the saRNA may have least 80%, 90%, 95%, 98%, 99% or 100% complementarity to a region of the target antisense RNA transcript.

[0080] The terms “small interfering RNA” or “siRNA” in the context mean a double-stranded RNA typically 20-25 nucleotides long involved in the RNA interference (RNAi) pathway and interfering with or inhibiting the expression of a specific gene. The gene is the target gene of the siRNA. For example, siRNA that interferes the expression of A3GALT2 gene is called “A3GALT2-siRNA” and the A3GALT2 gene is the target gene. An siRNA is usually about 21 nucleotides long, with 3′ overhangs (e.g., 2 nucleotides) at each end of the two strands.

[0081] An siRNA inhibits target gene expression by binding to and promoting the cleavage of one or more RNA transcripts of the target gene at specific sequences. Typically in RNAi the RNA transcripts are mRNA, so cleavage of mRNA results in the down-regulation of gene expression. In the present invention, not willing to be bound with any theory, one of the possible mechanisms is that saRNA of the present invention may modulate the target gene expression by cleavage of the target antisense RNA transcript.

[0082] A double-stranded saRNA may include one or more single-stranded nucleotide overhangs. The term “overhang” or “tail” in the context of double-stranded saRNA and siRNA refers to at least one unpaired nucleotide that protrudes from the duplex structure of saRNA or siRNA. For example, when a 3′-end of one strand of an saRNA extends beyond the 5′-end of the other strand, or vice versa, there is a nucleotide overhang. An saRNA may comprise an overhang of at least one nucleotide; alternatively the overhang may comprise at least two nucleotides, at least three nucleotides, at least four nucleotides, at least five nucleotides or more. A nucleotide overhang may comprise of consist of a nucleotide/nucleoside analog, including a deoxynucleotide/nucleoside. The overhang(s) may be on the sense strand, the antisense strand or any combination thereof. Furthermore, the nucleotide(s) of an overhang can be present on the 5′ end, 3′ end or both ends of either an anti sense or sense strand of an saRNA. Where two oligonucleotides are designed to form, upon hybridization, one or more single-stranded overhangs, and such overhangs shall not be regarded as mismatches with regard to the determination of complementarity. For example, an saRNA comprising one oligonucleotide 19 nucleotides in length and another oligonucleotide 21 nucleotides in length, wherein the longer oligonucleotide comprises a sequence of 19 nucleotides that is fully complementary to the shorter oligonucleotide, can yet be referred to as “fully complementary” for the purposes described herein.

[0083] In one embodiment, the antisense strand of a double-stranded saRNA has a 1-10 nucleotide overhang at the 3′ end and/or the 5′ end. In one embodiment, the antisense strand of a double-stranded saRNA has 1-4 nucleotide overhang at its 3′ end, or 1-2 nucleotide overhang at its 3′ end. In one embodiment, the sense strand of a double-stranded saRNA has a 1-10 nucleotide overhang at the 3′ end and/or the 5′ end. In one embodiment, the sense strand of a double-stranded saRNA has 1-4 nucleotide overhang at its 3′ end, or 1-2 nucleotide overhang at its 3′ end. In one embodiment, both the sense strand and the antisense strand of a double-stranded saRNA have 3′ overhangs. The 3′ overhangs may comprise one or more uracils, e.g., the sequences UU or UUU. In one embodiment, one or more of the nucleotides in the overhang is replaced with a nucleoside thiophosphate, wherein the internucleoside linkage is thiophosphate. In one embodiment, the overhang comprises one or more deoxyribonucleoside, e.g., the sequence dTdT or dTdTdT. In one embodiments, the overhang comprises the sequence dT*dT, wherein * is a thiophosphate internucleoside linkage.

[0084] The skilled person will appreciate that it is convenient to define the saRNA of the present invention by reference to the target antisense RNA transcript or the targeted sequence, regardless of the mechanism by which the saRNA modulates the target gene expression. However, the saRNA of the present invention may alternatively be defined by reference to the target gene. The target anti sense RNA transcript is complementary to a genomic region on the coding strand of the target gene, and the saRNA of the present invention is in turn complementary to a region of the target antisense RNA transcript, so the saRNA of the present invention may be defined as having sequence identity to a region on the coding strand of the target gene. All of the features discussed herein with respect to the definition of the saRNA of the present invention by reference to the target antisense RNA transcript apply mutatis mutandis to the definition of the saRNA of the present invention by reference to the target gene so any discussion of complementarity to the target antisense RNA transcript should be understood to include identity to the genomic sequence of the target gene. Thus, the saRNA of the present invention may have a high percent identity, e.g. at least 80%, 90%, 95%, 98% or 99%, or 100% identity, to a genomic sequence on the target gene. The genomic sequence may be up to 2000, 1000, 500, 250, or 100 nucleotides upstream or downstream of the target gene's transcription start site. It may align with the target gene's promoter region. Thus, the saRNA may have sequence identity to a sequence that aligns with the promoter region of the target gene.

[0085] In one embodiment, the existence of the target antisense RNA transcript does not need to be determined to design the saRNA of the present invention. In another word, the design of the saRNA does not require the identification of the target antisense RNA transcript. For example, the nucleotide sequence of the TSS core, i.e., the sequence in the region 2000 nucleotides upstream of the target gene's transcription start site to 2000 nucleotides downstream of the target gene's transcription start may be obtained by the genomic sequence of the coding strand of the target gene, by sequencing or by searching in a database. Targeted sequence within the TSS core starting at any position from position 1 to position 4001 of the TSS core on the template strand can be selected and can then be used to design saRNA sequences. As discussed above, the saRNA has a high degree of sequence identity with the reverse complement of the targeted sequence.

[0086] The saRNA sequence's off-target hit number in the whole genome, 0 mismatch (0 mm) hit number, and 1 mismatch (1 mm) hit number are then determined. The term “off-target hit number” refers to the number of other sites in the whole genome that are identical to the saRNA's targeted sequence on the template strand of the target gene. The term “0 mm hit number” refers to the number of known protein coding transcript other than the target transcript of the saRNA, the complement of which the saRNA may hybridize with or bind to with 0 mismatch. In another word, “0 mm hit number” counts the number of known protein coding transcript, other than the target transcript of the saRNA that comprises a region completely identical with the saRNA sequence. The term “1 mm hit number” refers to the number of known protein coding transcript other than the target transcript of the saRNA, the complement of which the saRNA may hybridize with or bind to with 1 mismatch. In another word, “1 mm hit number” counts the number of known protein coding transcript, other than the target transcript of the saRNA that comprises a region identical with the saRNA sequence with only 1 mismatch. In one embodiment, only saRNA sequences that have no off-target hit, no 0 mm hit and no 1 mm hit are selected. For those saRNA sequences disclosed in the present application, each has no off-target hit, no 0 mm hit and no 1 mm hit.

[0087] The method disclosed in US 2013/0164846 filed Jun. 23, 2011 (saRNA algorithm), the contents of which are incorporated herein by reference in their entirety, may also be used to design saRNA. The design of saRNA is also disclosed in U.S. Pat. No. 8,324,181 and U.S. Pat. No. 7,709,566 to Corey et al., US Pat. Pub. No. 2010/0210707 to Li et al., and Voutila et al., Mol Ther Nucleic Acids, vol. 1, e35 (2012), the contents of each of which are incorporated herein by reference in their entirety.

[0088] “Determination of existence” means either searching databases of ESTs and/or antisense RNA transcripts around the locus of the target gene to identify a suitable target antisense RNA transcript, or using RT PCR or any other known technique to confirm the physical presence of a target antisense RNA transcript in a cell.

[0089] In some embodiments, the saRNA of the present invention may be single or, double-stranded. Double-stranded molecules comprise a first strand and a second strand. If double-stranded, each strand of the duplex may be at least 14, or at least 18, e.g. 19, 20, 21 or 22 nucleotides in length. The duplex may be hybridized over a length of at least 12, or at least 15, or at least 17, or at least 19 nucleotides. Each strand may be exactly 19 nucleotides in length. Preferably, the length of the saRNA is less than 30 nucleotides since oligonucleotide duplex exceeding this length may have an increased risk of inducing the interferon response. In one embodiment, the length of the saRNA is 19 to 25 nucleotides. The strands forming the saRNA duplex may be of equal or unequal lengths.

[0090] In one embodiment, the saRNAs of the present invention comprise a sequence of at least 14 nucleotides and less than 30 nucleotides which has at least 80%, 90%, 95%, 98%, 99% or 100% complementarity to the targeted sequence. In one embodiment, the sequence which has at least 80%, 90%, 95%, 98%, 99% or 100% complementarity to the targeted sequence is at least 15, 16, 17, 18 or 19 nucleotides in length, or 18-22 or 19 to 21, or exactly 19.

[0091] The saRNA of the present invention may include a short 3′ or 5′ sequence which is not complementary to the target antisense RNA transcript. In one embodiment, such a sequence is at 3′ end of the strand. The sequence may be 1-5 nucleotides in length, or 2 or 3. The sequence may comprises uracil, so it may be a 3′ stretch of 2 or 3 uracils. The sequence may comprise one or more deoxyribonucleoside, such as dT. In one embodiment, one or more of the nucleotides in the sequence is replaced with a nucleoside thiophosphate, wherein the internucleoside linkage is thiophosphate. As a non-limiting example, the sequence comprises the sequence dT*dT, wherein * is a thiophosphate internucleoside linkage. This non-complementary sequence may be referred to as “tail”. If a 3′ tail is present, the strand may be longer, e.g., 19 nucleotides plus a 3′ tail, which may be UU or UUU. Such a 3′ tail shall not be regarded as mismatches with regard to determine complementarity between the saRNA and the target anti sense RNA transcript.

[0092] Thus, the saRNA of the present invention may consist of (i) a sequence having at least 80% complementarity to a region of the target antisense RNA transcript; and (ii) a 3′ tail of 1-5 nucleotides, which may comprise or consist of uracil residues. The saRNA will thus typically have complementarity to a region of the target antisense RNA transcript over its whole length, except for the 3′ tail, if present. Any of the saRNA sequences disclosed in the present application may optionally include such a 3′ tail. Thus, any of the saRNA sequences disclosed in the saRNA Tables and Sequence Listing may optionally include such a 3′ tail. The saRNA of the present invention may further comprise Dicer or Drosha substrate sequences.

[0093] The saRNA of the present invention may contain a flanking sequence. The flanking sequence may be inserted in the 3′ end or 5′ end of the saRNA of the present invention. In one embodiment, the flanking sequence is the sequence of a miRNA, rendering the saRNA to have miRNA configuration and may be processed with Drosha and Dicer. In a non-limiting example, the saRNA of the present invention has two strands and is cloned into a microRNA precursor, e.g., miR-30 backbone flanking sequence.

[0094] The saRNA of the present invention may comprise a restriction enzyme substrate or recognition sequence. The restriction enzyme recognition sequence may be at the 3′ end or 5′ end of the saRNA of the present invention. Non-limiting examples of restriction enzymes include NotI and AscI.

[0095] In one embodiment, the saRNA of the present invention consists of two strands stably base-paired together. In some embodiments, the passenger strand may comprise at least one nucleotide that is not complementary to the corresponding nucleotide on the guide strand, called a mismatch with the guide strand. In one embodiment, the at least one mismatch with the guide strand may be at 3′ end of the passenger strand. In one embodiment, the 3′ end of the passenger strand may comprise 1-5 mismatches with the guide strand. In one embodiment, the 3′ end of the passenger strand may comprise 2-3 mismatches with the guide strand. In one embodiment, the 3′ end of the passenger strand may comprise 6-10 mismatches with the guide strand.

[0096] In some embodiments, the double-stranded saRNA may comprise a number of unpaired nucleotides at the 3′ end of each strand forming 3′ overhangs. The number of unpaired nucleotides forming the 3′ overhang of each strand may be in the range of 1 to 5 nucleotides, or 1 to 3 nucleotides, or 2 nucleotides. The 3′ overhang may be formed on the 3′ tail mentioned above, so the 3′ tail may be the 3′ overhang of a double-stranded saRNA.

[0097] Thus, the saRNA of the present invention may be single-stranded and consists of (i) a sequence having at least 80% complementarity to a region of the target antisense RNA transcript; and (ii) a 3′ tail of 1-5 nucleotides, which may comprise uracil residues. The saRNA of the present invention may have complementarity to a region of the target antisense RNA transcript over its whole length, except for the 3′ tail, if present. As mentioned above, instead of “complementary to the target antisense RNA transcript” the saRNA of the present invention may also be defined as having “identity” to the coding strand of the target gene. The saRNA of the present invention may be double-stranded and consists of a first strand comprising (i) a first sequence having at least 80% complementarity to a region of the target anti sense RNA transcript and (ii) a 3′ overhang of 1-5 nucleotides; and a second strand comprising (i) a second sequence that forms a duplex with the first sequence and (ii) a 3′ overhang of 1-5 nucleotides.

[0098] As described herein, the genomic sequence of the target gene may be used to design saRNA of the target gene. The sequence of a target antisense RNA transcript may be determined from the sequence of the target gene for designing saRNA of the target gene. However, the existence of such a target antisense RNA transcript does not need to be determined.

[0099] One aspect of the present invention provides an saRNA that modulates the expression of a target gene. Also provided is an saRNA that modulates the level of a target transcript. In some embodiments, the target transcript is a coding transcript, e.g., mRNA. Another aspect of the present invention provides an saRNA that modulates the level of a protein encoded by the coding target transcript. In one embodiment, the expression of target gene is increased by at least 20, 30, 40%, or at least 45, 50, 55, 60, 65, 70, 75%, or at least 80% in the presence of the saRNA of the present invention compared to the expression of target gene in the absence of the saRNA of the present invention. In a further embodiment, the expression of target gene is increased by a factor of at least 2, 3, 4, 5, 6, 7, 8, 9, 10, or by a factor of at least 15, 20, 25, 30, 35, 40, 45, 50, or by a factor of at least 60, 70, 80, 90, 100, in the presence of the saRNA of the present invention compared to the expression of target gene in the absence of the saRNA of the present invention. The modulation of the expression of target gene may be reflected or determined by the change of mRNA levels encoding the target gene.

[0100] Non-limiting examples of target genes which can be modulated by the saRNA of the present invention may be coding genes, including the target genes described in Lengthy Table 1 such as target genes located on chromosomes 1-2 including A3GALT2, AADACL3, AADACL4, AAK1, AAMP, ABCA12, ABCA4, ABCB10, ABCB11, ABCB6, ABCD3, ABCG5, ABCG8, ABHD1, ABI2, ABL2, ACADL, ACADM, ACAP3, ACBD3, ACBD6, ACKR1, ACKR3, ACMSD, ACOT11, ACOT7, ACOXL, ACP1, ACP6, ACSL3, ACTA1, ACTG2, ACTL8, ACTN2, ACTR1B, ACTR2, ACTR3, ACTRT2, ACVR1, ACVR1C, ACVR2A, ACYP2, ADAM15, ADAM17, ADAM23, ADAM30, ADAMTS4, ADAMTSL4, ADAR, ADCK3, ADCY10, ADCY3, ADD2, ADI1, ADIPOR1, ADORA1, ADORA3, ADPRHL2, ADRA2B, ADSS, AFF3, AFTPH, AGAP1, AGBL4, AGBL5, AGFG1, AGL, AGMAT, AGO1, AGO3, AGO4, AGPS, AGRN, AGT, AGTRAP, AGXT, AHCTF1, AHCYL1, AHDC1, AHSA2, AIDA, AIM1L, AIM2, AJAP1, AK2, AK4, AK5, AKIRIN1, AKNAD1, AKR1A1, AKR7A2, AKR7A3, AKT3, ALDH4A1, ALDH9A1, ALG14, ALG6, ALK, ALLC, ALMS1, ALPI, ALPL, ALPP, ALPPL2, ALS2, ALS2CR11, ALS2CR12, ALX3, AMER3, AMIGO1, AMMECR1L, AMPD1, AMPD2, AMY1A, AMY1B, AMY1C, AMY2A, AMY2B, ANAPC1, ANGEL2, ANGPTL1, ANGPTL3, ANGPTL7, ANKAR, ANKMY1, ANKRD13C, ANKRD23, ANKRD34A, ANKRD35, ANKRD36, ANKRD36B, ANKRD39, ANKRD44, ANKRD45, ANKRD53, ANKRD65, ANKZF1, ANO7, ANP32E, ANTXR1, ANXA4, ANXA9, AOX1, AP1S3, AP4B1, APCS, APH1 A, APITD1, APITD1-CORT, APLF, APOA1BP, APOA2, APOB, APOBEC4, AQP10, AQP12A, AQP12B, ARF1, ARHGAP15, ARHGAP25, ARHGAP29, ARHGAP30, ARHGEF10L, ARHGEF11, ARHGEF16, ARHGEF19, ARHGEF2, ARHGEF33, ARHGEF4ARID1A, ARID4B, ARID5A, ARL4C, ARL5A, ARL6IP6, ARL8A, ARMC9, ARNT, ARPC2, ARPC5, ARTN, ARV1, ASAP2, ASAP3, ASB1, ASB17, ASB18, ASB3, ASCL5, ASH1L, ASIC4, ASNSD1, ASPM, ASPRV1, ASTL, ASTN1, ASXL2, ATAD2B, ATAD3A, ATAD3B, ATAD3C, ATF2, ATF3, ATF6, ATG16L1, ATG4B, ATG4C, ATG9A, ATIC, ATL2, ATOH8, ATP13A2, ATP1A1, ATP1A2, ATP1A4, ATP1B1, ATP2B4, ATP5F1, ATP5G3, ATP6V0B, ATP6V1B1, ATP6V1C2, ATP6V1E2, ATP6V1G3, ATP8B2, ATPAF1, ATPIF1, ATRAID, ATXN7L2, AUNIP, AUP1, AURKAIP1, AVPR1B, AXDND1, AZIN2, B3GALNT2, B3GALT1, B3GALT2, B3GALT6, B3GNT2, B3GNT7, B4GALT2, B4GALT3, BAI2, BARD1, BARHL2, BATF3, BAZ2B, BBS5, BCAN, BCAR3, BCAS2, BCL10, BCL11A, BCL2L11, BCL2L15, BCL9, BCS1L, BECN1P1, BEND5, BEST4, BGLAP, BIN1, BIRC6, BLZF1, BMP10, BMP8A, BMP8B, BMPR2, BNIPL, BOK, BOLA1, BOLA3, BOLL, BPNT1, BRDT, BRE, BRINP2, BRINP3, BROX, BSDC1, BSND, BTBD19, BTBD8, BTF3L4, BTG2, BTNL10, BUB1, BZW1, C1D, C1orf100, C1orf101, C1orf105, C1orf106, C1orf109, C1orf110, C1orf111, C1orf112, C1orf115, C1orf116, C1orf122, C1orf123, C1orf127, C1orf131, C1orf137, C1orf141, C1orf146, C1orf158, C1orf159, C1orf162, C1orf167, C1orf168, C1orf174, C1orf177, C1orf185, C1orf186, C1orf189, C1orf194, C1orf195, C1orf198, C1orf204, C1orf21, C1orf210, C1orf216, C1orf226, C1orf228, C1orf229, C1orf233, C1orf234, C1orf27, C1orf35, C1orf43, C1orf50, C1orf52, C1orf53, C1orf54, C1orf56, C1orf61, C1orf64, C1orf68, C1orf74, C1orf85, C1orf86, C1orf87, C1orf94, C1orf95, C1QA, C1QB, C1QC, C1QL2, C2CD4D, C2orf15, C2orf16, C2orf27A, C2orf27B, C2orf40, C2orf42, C2orf43, C2orf44, C2orf47, C2orf48, C2orf49, C2orf50, C2orf54, C2orf57, C2orf61, C2orf66, C2orf68, C2orf69, C2orf70, C2orf71, C2orf72, C2orf73, C2orf74, C2orf76, C2orf78, C2orf80, C2orf81, C2orf82, C2orf83, C2orf88, C2orf91, C4BPA, C4BPB, C8A, C8B, CA14, CA6, CAB39, CACHD1, CACNA1E, CACNA1S, CACNB4, CACYBP, CAD, CADM3, CALCRL, CALM2, CALML6, CAMK1G, CAMK2N1, CAMKMT, CAMSAP2, CAMTA1, CAP1, CAPG, CAPN10, CAPN13, CAPN14, CAPN2, CAPN8, CAPN9, CAPZA1, CAPZB, CARF, CASP10, CASP8, CASP9, CASQ1, CASQ2, CASZ1, CATIP, CATSPER4, CBWD2, CC2D1B, CCBL2, CCDC108, CCDC115, CCDC121, CCDC138, CCDC140, CCDC141, CCDC142, CCDC148, CCDC150, CCDC17, CCDC173, CCDC18, CCDC181, CCDC185, CCDC23, CCDC24, CCDC27, CCDC28B, CCDC30, CCDC74A, CCDC74B, CCDC85A, CCDC88A, CCDC93, CCL20, CCNL2, CCNT2, CCNYL1, CCSAP, CCT3, CCT4, CCT7, CD101, CD160, CD164L2, CD1A, CD1B, CD1C, CD1D, CD1E, CD2, CD207, CD244, CD247, CD28, CD302, CD34, CD46, CD48, CD52, CD53, CD55, CD58, CD5L, CD84, CD8A, CD8B, CDA, CDC14A, CDC20, CDC42, CDC42BPA, CDC42EP3, CDC42SE1, CDC7, CDC73, CDCA7, CDCA8, CDCP2, CDK11A, CDK11B, CDK15, CDK18, CDK5R2, CDKL4, CDKN2C, CEBPZ, CELA2A, CELA2B, CELA3A, CELA3B, CELF3, CELSR2, CENPA, CENPF, CENPL, CENPO, CEP104, CEP170, CEP350, CEP68, CEP85, CEPT1, CERKL, CERS2, CERS6, CFAP126, CFAP221, CFAP36, CFAP45, CFAP57, CFAP74, CFC1, CFC1B, CFH, CFHR1, CFHR2, CFHR3, CFHR4, CFHR5, CFLAR, CGN, CGREF1, CHAC2, CHCHD5, CHD1L, CHD5, CHI3L1, CHI3L2, CHIA, CHIT1, CHML, CHMP3, CHN1, CHPF, CHRM3, CHRNA1, CHRNB2, CHRND, CHRNG, CHST10, CHTOP, CIAO1, CIART, CIB4, CIR1, CITED4, CKAP2L, CKS1B, CLASP1, CLCA1, CLCA2, CLCA4, CLCC1, CLCN6, CLCNKA, CLCNKB, CLDN19, CLEC4F, CLHC1, CLIC4, CLIP4, CLK1, CLK2, CLSPN, CLSTN1, CMPK1, CMPK2, CNGA3, CNIH3, CNIH4, CNKSR1, CNN3, CNNM3, CNNM4, CNOT11, CNPPD1, CNR2, CNRIP1, CNST, CNTN2, CNTNAP5, COA5, COA6, COA7, COBLL1, COG2, COL11 A1, COL16A1, COL24A1, COL3A1, COL4A3, COL4A4, COL5A2, COL6A3, COL8A2, COL9A2, COLEC11, COLGALT2, COMMD1, COPA, COPS7B, COPS8, COQ10B, CORT, COX20, COX5B, COX7A2L, CPO, CPS1, CPSF3, CPSF3L, CPT2, CPTP, CR1, CR1L, CR2, CRABP2, CRB1, CRCT1, CREB1, CREB3L4, CREG1, CREG2, CRIM1, CRIPT, CRNN, CROCC, CRP, CRTC2, CRYBA2, CRYGA, CRYGB, CRYGC, CRYGD, CRYZ, CSDE1, CSF1, CSF3R, CSMD2, CSRNP3, CSRP1, CTBS, CTDSP1, CTH, CTLA4, CTNNA2, CTNNBIP1, CTPS1, CTRC, CTSE, CTSK, CTSS, CTTNBP2NL, CUL3, CWC22, CXCR1, CXCR2, CXCR4, CYB561D1, CYB5R1, CYB5RL, CYBRD1, CYP1B1, CYP20A1, CYP26B1, CYP27A1, CYP27C1, CYP2J2, CYP4A11, CYP4A22, CYP4B1, CYP4X1, CYP4Z1, CYR61, CYS1, CYTIP, D2HGDH, DAB1, DAP3, DAPL1, DARS, DARS2, DAW1, DBI, DBT, DCAF17, DCAF6, DCAF8, DCDC2B, DCDC2C, DCLRE1B, DCST1, DCST2, DCTN1, DDAH1, DDI2, DDOST, DDR2, DDX1, DDX18, DDX20, DDX59, DEDD, DEGS1, DENND1B, DENND2C, DENND2D, DENND4B, DEPDC1, DES, DESI2, DFFA, DFFB, DFNB59, DGKD, DGUOK, DHCR24, DHDDS, DHRS3, DHRS9, DHX57, DHX9, DIEXF, DIO1, DIRAS3, DIRC1, DIS3L2, DISC1, DISP1, DLGAP3, DLX1, DLX2, DMAP1, DMBX1, DMRTA2, DMRTB1, DNAH14, DNAH6, DNAH7, DNAJB2, DNAJB3, DNAJB4, DNAJC10, DNAJC11, DNAJC16, DNAJC27, DNAJC5G, DNAJC6, DNAJC8, DNALI1, DNASE2B, DNER, DNM3, DNMT3A, DNPEP, DNTTIP2, DOCK10, DOCK7, DOK1, DPH2, DPH5, DPM3, DPP10, DPP4, DPT, DPY30, DPYD, DPYSL5, DQX1, DR1, DRAM2, DRAXIN, DRC1, DSTYK, DTL, DTNB, DTYMK, DUSP10, DUSP11, DUSP12, DUSP19, DUSP2, DUSP23, DUSP27, DUSP28, DVL1, DYNC1I2, DYNC2LI1, DYRK3, DYSF, DYTN, E2F2, E2F6, EBNA1BP2, ECE1, ECEL1, ECHDC2, ECM1, EDAR, EDARADD, EDEM3, EDN2, EEF1B2, EFCAB14, EFCAB2, EFCAB7, EFEMP1, EFHD1, EFHD2, EFNA1, EFNA3, EFNA4, EFR3B, EGLN1, EGR4, EHBP1, EHD3, EIF2AK2, EIF2AK3, EIF2B3, EIF2B4, EIF2D, EIF4E2, EIF4G3, EIF5B, ELAVL4, ELF3, ELK4, ELMOD3, ELOVL1, ELTD1, EMC1, EMILIN1, EML4, EML6, EMX1, EN1, ENAH, ENO1, ENSA, EPAS1, EPB41, EPB41L5, EPC2, EPCAM, EPHA10, EPHA2, EPHA4, EPHA8, EPHB2, EPHX1, EPHX4, EPRS, EPS15, EPS8L3, EPT1, ERBB4, ERCC3, ERI3, ERICH2, ERICH3, ERLEC1, ERMAP, ERMN, ERO1LB, ERRFI1, ESPN, ESPNL, ESRRG, ETAA1, ETNK2, ETV3, ETV3L, EVA1A, EVA1B, EVI5, EVX2, EXO1, EXO5, EXOC6B, EXOC8, EXOSC10, EXTL1, EXTL2, EYA3, F11R, F13B, F3, F5, FAAH, FABP1, FABP3, FAF1, FAHD2A, FAHD2B, FAIM3, FAM102B, FAM110C, FAM110D, FAM117B, FAM124B, FAM126B, FAM129A, FAM131C, FAM132A, FAM132B, FAM134A, FAM136A, FAM150B, FAM151A, FAM159A, FAM161A, FAM163A, FAM167B, FAM168B, FAM171B, FAM177B, FAM178B, FAM179A, FAM183A, FAM189B, FAM19A3, FAM20B, FAM212B, FAM213B, FAM228A, FAM228B, FAM229A, FAM231A, FAM43B, FAM46B, FAM46C, FAM49A, FAM63A, FAM69A, FAM71A, FAM72A, FAM72B, FAM72C, FAM72D, FAM73A, FAM76A, FAM78B, FAM84A, FAM89A, FAM98A, FANCL, FAP, FARP2, FARSB, FASLG, FASTKD1, FASTKD2, FBLIM11, FBLN7, FBXO11, FBXO2, FBXO28, FBXO36, FBXO41, FBXO42, FBXO44, FBXO48, FBXO6, FCAMR, FCER1A, FCER1G, FCGR1A, FCGR1B, FCGR2A, FCGR2B, FCGR2C, FCGR3A, FCGR3B, FCN3, FCRL1, FCRL2, FCRL3, FCRL4, FCRL5, FCRL6, FCRLA, FCRLB, FDPS, FER1L5, FEV, FEZ2, FGGY, FGR, FH, FHAD1, FHL2, FHL3, FIGLA, FIGN, FKBP1B, FKBP7, FLAD1, FLG, FLG2, FLVCR1, FMN2, FMNL2, FMO1, FMO2, FMO3, FMO4, FMO5, FMOD, FN1, FNBP1L, FNDC4, FNDC5, FNDC7, FOSL2, FOXD2, FOXD3, FOXD4L1, FOXE3, FOXI3, FOXJ3, FOXN2, FOXO6, FPGT, FPGT-TNNI3K, FRRS1, FRZB, FSHR, FSIP2, FUBP1, FUCA1, FZD5, FZD7, G0S2, G6PC2, GABPB2, GABRD, GAD1, GADD45A, GAL3ST2, GALE, GALM, GALNT13, GALNT14, GALNT2, GALNT3, GALNT5, GAREML, GATAD2B, GBA, GBP1, GBP2, GBP3, GBP4, GBP5, GBP6, GBP7, GBX2, GCA, GCC2, GCFC2, GCC, GCKR, GCLM, GCSAML, GDAP2, GDF7, GEMIN6, GEN1, GFI1, GFPT1, GGCX, GGPS1, GIGYF2, GIPC2, GJA4, GJA5, GJA8, GJA9, GJB3, GJB4, GJB5, GJC2, GKN1, GKN2, GLB1L, GLI2, GLIS1, GLMN, GLRX2, GLS, GLUL, GMCL1, GMEB1, GMPPA, GNAI3, GNAT2, GNB1, GNG12, GNG4, GNG5, GNL2, GNLY, GNPAT, GOLPH3L, GOLT1A, GON4L, GORAB, GORASP2, GPA33, GPAT2, GPATCH11, GPATCH2, GPATCH3, GPATCH4, GPBAR1, GPBP1L1, GPC1, GPD2, GPN1, GPN2, GPR1, GPR113, GPR137B, GPR148, GPR153, GPR155, GPR157, GPR161, GPR17, GPR25, GPR3, GPR35, GPR37L1, GPR39, GPR45, GPR52, GPR55, GPR61, GPR75, GPR75-ASB3, GPR88, GPR89A, GPR89B, GPSM2, GPX7, GRB14, GREB1, GREM2, GRHL1, GRHL3, GRIK3, GSTM1, GSTM2, GSTM3, GSTM4, GSTM5, GTDC1, GTF2A1L, GTF2B, GTF3C2, GTF3C3, GUCA2A, GUCA2B, GUK1, GULP1, GYPC, H3F3A, H6PD, HAAO, HADHA, HADHB, HAO2, HAPLN2, HAT1, HAX1, HCN3, HCRTR1, HDAC1, HDAC4, HDGF, HDLBP, HEATR1, HEATR5B, HECTD3, HECW2, HENMT1, HES2, HES3, HES4, HES5, HES6, HEYL, HFE2, HFM1, HHAT, HHIPL2, HHLA3, HIAT1, HIBCH, HIPK1, HIST2H2AA3, HIST2H2AA4, HIST2H2AB, HIST2H2AC, HIST2H2BE, HIST2H2BF, HIST2H3A, HIST2H3C, HIST2H3D, HIST2H4A, HIST2H4B, HIST3H2A, HIST3H2BB, HIST3H3, HIVEP3, HIJURP, HK2, HLX, HMCN1, HMGB4, HMGCL, HMGCS2, HMGN2, HNMT, HNRNPA3, HNRNPCL1, HNRNPCL2, HNRNPCL3, HNRNPCL4, HNRNPLL, HNRNPR, HNRNPU, HOOK1, HORMAD1, HOXD1, HOXD10, HOXD11, HOXD12, HOXD13, HOXD3, HOXD4, HOXD8, HOXD9, HP1BP3, HPCA, HPCAL1, HPCAL4, HPDL, HRNR, HS1BP3, HS2ST1, HS6ST1, HSD11B1, HSD17B7, HSD3B1, HSD3B2, HSPA6, HSPB11, HSPB7, HSPD1, HSPE1, HSPE1-MOB4, HSPG2, HTR1D, HTR2B, HTR6, HTRA2, HYI, IAH1, IARS2, IBA57, ICA1L, ICMT, ICOS, ID2, ID3, IDH1, IER5, IFFO2, IFI16, IFI44, IFI44L, IFI6, IFIH1, IFNLR1, IFT172, IGFBP2, IGFBP5, IGFN1, IGSF21, IGSF3, IGSF8, IGSF9, IHH, IKBKE, IKZF2, IL10, IL12RB2, IL18R1, IL18RAP, IL19, IL1A, IL1B, IL IF10, IL1R1, IL1R2, IL1RL1, IL1RL2, IL1RN, IL20, IL22RA1, IL23R, IL24, IL36A, IL36B, IL36G, IL36RN, IL37, IL6R, ILDR2, ILF2, ILKAP, IMMT, IMP4, INADL, ING5, INHA, INHBB, INO80B, INO80D, INPP1, INPP4A, INPP5B, INPP5D, INSIG2, INSL5, INSRR, INTS3, INTS7, IPO13, IPO9, IPP, IQCA1, IQGAP3, IRF2BP2, IRF6, IRS1, ISG15, ISG20L2, ITGA10, ITGA4, ITGA6, ITGAV, ITGB1BP1, ITGB3BP, ITGB6, ITLN2, ITM2C, ITPKB, ITPRIPL1, ITSN2, IVL, IVNS1ABP, IWS1, JAK1, JMJD4, JTB, JUN, KANK4, KANSL1L, KANSL3, KAZN, KCMF1, KCNA10, KCNA2, KCNA3, KCNAB2, KCNC4, KCND3, KCNE4, KCNF1, KCNG3, KCNH1, KCNH7, KCNIP3, KCNJ10, KCNJ13, KCNJ3, KCNJ9, KCNK1, KCNK12, KCNK2, KCNK3, KCNN3, KCNQ4, KCNS3, KCNT2, KCTD18, KCTD3, KDF1, KDM1A, KDM3A, KDM4A, KDM5B, KHDRBS1, KHK, KIAA0040, KIAA0319L, KIAA0754, KIAA0907, KIAA1107, KIAA1211L, KIAA1324, KIAA1522, KIAA1614, KIAA1715, KIAA1804, KIAA1841, KIAA2012, KIAA2013, KIDINS220, KIF14, KIF17, KIF1A, KIF1B, KIF21B, KIF26B, KIF2C, KIF3C, KIF5C, KIFAP3, KIRREL, KISS1, KLF11, KLF17, KLF7, KLHDC7A, KLHDC8A, KLHDC9, KLHL12, KLHL17, KLHL20, KLHL21, KLHL23, KLHL29, KLHL30, KLHL41, KMO, KNCN, KPNA6, KPRP, KRCC1, KRTCAP2, KRTCAP3, KTI12, KYNU, L1TD1, LACTBL1, LAD1, LAMB3, LAMC1, LAMC2, LAMTOR2, LAMTOR5, LANCL1, LAPTM4A, LAPTM5, LAX1, LBH, LBR, LBX2, LCE1A, LCE1B, LCE1C, LCE1D, LCE1E, LCE1F, LCE2A, LCE2B, LCE2C, LCE2D, LCE3A, LCE3B, LCE3C, LCE3D, LCE3E, LCE4A, LCE5A, LCE6A, LCK, LCLAT1, LCT, LDLRAD1, LDLRAD2, LDLRAP1, LEFTY1, LEFTY2, LELP1, LEMD1, LENEP, LEPR, LEPRE1, LEPROT, LGALS8, LGALSL, LGR6, LHCGR, LHX4, LHX8, LHX9, LIMS1, LIMS2, LIMS3, LIMS3L, LIN28A, LIN9, LINGO4, LIPT1, LIX1L, LMAN2L, LMNA, LMO4, LMOD1, LMX1A, LOC100129924, LOC100130451, LOC100144595, LOC100996693, LOC101927844, LOC101928436, LOC101929983, LOC149373, LOC200726, LOC391003, LOC400736, LOC643355, LOC645382, LOC653602, LOC728819, LOC730159, LONRF2, LOR, LOXL3, LPAR3, LPGAT1, LPHN2, LPIN1, LPPR4, LPPR5, LRIF1, LRIG2, LRP1B, LRP2, LRP8, LRPPRC, LRRC38, LRRC39, LRRC40, LRRC41, LRRC42, LRRC47, LRRC52, LRRC7, LRRC71, LRRC8B, LRRC8C, LRRC8D, LRRFIP1, LRRIQ3, LRRN2, LRRTM1, LRRTM4, LSM10, LTBP1, LURAP1, LUZP1, LY75, LY75-CD302, LY9, LYG1, LYG2, LYPD1, LYPD6, LYPD6B, LYPD8, LYPLA2, LYPLAL1, LYSMD1, LYST, LZIC, M1AP, MAB21L3, MACF1, MAD2L2, MAEL, MAGI3, MAGOH, MAL, MALL, MAN1A2, MAN1C1, MANEAL, MAP10, MAP1LC3C, MAP2, MAP3K19, MAP3K2, MAP3K6, MAP4K3, MAP4K4, MAP7D1, MAPKAPK2, MAPRE3, MARC1, MARC2, MARCH4, MARCH7, MARCKSL1, MARCO, MARK1, MARS2, MASP2, MAST2, MAT2A, MATN1, MATN3, MBD5, MBOAT2, MCEE, MCFD2, MCL1, MCM6, MCOLN2, MCOLN3, MDH1, MDH1B, MDM4, MEAF6, MECR, MED18, MED8, MEF2D, MEGF6, MEIS1, MEMO1, MERTK, METAP1D, METTL11B, METTL13, METTL18, METTL21A, METTL5, METTL8, MEX3A, MFAP2, MFF, MFN2, MFSD2A, MFSD2B, MFSD4, MFSD6, MFSD9, MGAT4A, MGAT5, MGST3, MIA3, MIB2, MIER1, MIIP, MINOS1, MINOS1-NBL1, MIR205HG, MITD1, MIXL1, MKNK1, MLLT11, MLPH, MMACHC, MMADHC, MMEL1, MMP23B, MNDA, MOB1A, MOB3C, MOB4, MOGAT1, MOGS, MORN1, MORN2, MOV10, MPC2, MPHOSPH10, MPL, MPP4, MPV17, MPZ, MPZL1, MR1, MREG, MROH2A, MROH7, MROH9, MRPL19, MRPL20, MRPL24, MRPL30, MRPL33, MRPL35, MRPL37, MRPL44, MRPL53, MRPL55, MRPL9, MRPS14, MRPS15, MRPS21, MRPS5, MRPS9, MRTO4, MSGN1, MSH2, MSH4, MSH6, MST1L, MSTN, MSTO1, MT1HL1, MTA3, MTERF4, MTF1, MTF2, MTFR1L, MTHFD2, MTHFR, MTIF2, MTMR11, MTOR, MTR, MTX1, MTX2, MUC1, MUL1, MUTYH, MXD1, MXRA8, MYBPH, MYBPHL, MYCBP, MYCL, MYCN, MYEOV2, MYL1, MYO1B, MYO3B, MYO7B, MYOC, MYOG, MYOM3, MYSM1, MYT1L, MZT2A, MZT2B, NAB1, NABP1, NADK, NAGK, NASP, NAT8, NAT8B, NAV1, NBAS, NBEAL1, NBL1, NBPF1, NBPF10, NBPF11, NBPF12, NBPF14, NBPF15, NBPF20, NBPF3, NBPF4, NBPF6, NBPF7, NBPF8, NBPF9, NCAPH, NCDN, NCF2, NCK2, NCKAP1, NCKAP5, NCL, NCMAP, NCOA1, NCSTN, NDC1, NDUFA10, NDUFAF7, NDUFB3, NDUFS1, NDUFS2, NDUFS5, NEB, NECAP2, NEGR1, NEK2, NEK7, NENF, NES, NEU2, NEU4, NEURL3, NEUROD1, NEXN, NFASC, NFE2L2, NFIA, NFU1, NFYC, NGEF, NGF, NHEJ1, NHLH1, NHLH2, NID1, NIF3L1, NIFK, NIPAL3, NIT1, NKAIN1, NLRC4, NLRP3, NME7, NMI, NMNAT1, NMNAT2, NMS, NMUR1, NOC2L, NOL10, NOL9, NOP58, NOS1AP, NOSTRIN, NOTCH2, NOTCH2NL, NOTO, NPAS2, NPHP1, NPHP4, NPHS2, NPL, NPPA, NPPB, NPPC, NPR1, NR0B2, NR1I3, NR4A2, NR5A2, NRAS, NRBP1, NRD1, NRP2, NRXN1, NSL1, NSUN4, NT5C1A, NT5C1B, NT5C1B-RDH14, NTNG1, NTPCR, NTRK1, NTSR2, NUAK2, NUCKS1, NUDC, NUDT17, NUF2, NUP133, NUP210L, NUP35, NVL, NXPH2, NYAP2, OAZ3, OBSCN, OBSL1, OCLM, ODC1, ODF2L, OLA1, OLFM3, OLFML2B, OLFML3, OMA1, OPN3, OPRD1, OPTC, OR10J1, OR10J3, OR10J5, OR10K1, OR10K2, OR10R2, OR10T2, OR10X1, OR10Z1, OR11L1, OR13G1, OR14A16, OR14C36, OR14I1, OR1C1, OR2AK2, OR2B11, OR2C3, OR2G2, OR2G3, OR2G6, OR2L13, OR2L2, OR2L3, OR2L5, OR2L8, OR2M2, OR2M3, OR2M4, OR2M5, OR2M7, OR2T1, OR2T10, OR2T11, OR2T12, OR2T2, OR2T27, OR2T29, OR2T3, OR2T33, OR2T34, OR2T35, OR2T4, OR2T5, OR2T6, OR2T8, OR2W3, OR2W5, OR4F16, OR4F29, OR4F3, OR4F5, OR6B2, OR6B3, OR6F1, OR6K2, OR6K3, OR6K6, OR6N1, OR6N2, OR6P1, OR6Y1, ORC1, ORC2, ORC4, ORMDL1, OSBPL6, OSBPL9, OSCP1, OSGEPL1, OSR1, OST4, OTOF, OTOS, OTUD3, OTUD7B, OTX1, OVGP1, OXCT2, OXER1, PABPC4, PADI1, PADI2, PADI3, PADI4, PADI6, PAFAH2, PAIP2B, PALMD, PANK4, PAPOLG, PAPPA2, PAQR6, PAQR7, PARD3B, PARK7, PARP1, PARS2, PASK, PAX3, PAX7, PAX8, PBX1, PBXIP1, PCBP1, PCGF1, PCNXL2, PCP4L1, PCSK9, PCYOX1, PDC, PDCD1, PDCL3, PDE11A, PDE1A, PDE4B, PDE4DIP, PDE6D, PDIA6, PDIK1L, PDK1, PDPN, PDZK1, PDZK1IP1, PEA15, PEAR1, PECR, PEF1, PELI1, PER2, PER3, PERM1, PEX10, PEX11B, PEX13, PEX14, PEX19, PFDN2, PFKFB2, PFN4, PGAP1, PGBD2, PGBD5, PGD, PGLYRP3, PGLYRP4, PGM1, PHACTR4, PHC2, PHF13, PHGDH, PHLDA3, PHOSPHO2, PHOSPHO2-KLHL23, PHTF1, PI4KB, PIAS3, PID1, PIFO, PIGC, PIGF, PIGK, PIGM, PIGR, PIGV, PIK3C2B, PIK3CD, PIK3R3, PIKFYVE, PINK1, PIP5KIA, PITHD1, PKDCC, PKLR, PKN2, PKP1, PKP4, PLA2G2A, PLA2G2C, PLA2G2D, PLA2G2E, PLA2G2F, PLA2G4A, PLA2G5, PLA2R1, PLB1, PLCD4, PLCH2, PLCL1, PLD5, PLEK, PLEKHA3, PLEKHA6, PLEKHB2, PLEKHG5, PLEKHH2, PLEKHM2, PLEKHM3, PLEKHN1, PLEKHO1, PLGLB1, PLGLB2, PLK3, PLOD1, PLXNA2, PM20D1, PMF1, PMF1-BGLAP, PMS1, PMVK, PNKD, PNO1, PNPT1, PNRC2, PODN, POGK, POGZ, POLE4, POLR1A, POLR1B, POLR2D, POLR3C, POLR3GL, POMC, POMGNT1, POTEE, POTEF, POTEI, POTEJ, POU2F1, POU3F1, POU3F3, PPAP2B, PPCS, PPFIA4, PPIAL4B, PPIAL4C, PPIAL4D, PPIAL4E, PPIAL4F, PPIAL4G, PPIE, PPIG, PPIH, PPIL3, PPM1B, PPM1G, PPM1J, PPOX, PPP1CB, PPP1R12B, PPP1R15B, PPP1R1C, PPP1R21, PPP1R7, PPP1R8, PPP2R5A, PPP3R1, PPT1, PQLC2, PQLC3, PRADC1, PRAMEF1, PRAMEF10, PRAMEF11, PRAMEF12, PRAMEF14, PRAMEF15, PRAMEF16, PRAMEF17, PRAMEF19, PRAMEF2, PRAMEF20, PRAMEF22, PRAMEF4, PRAMEF5, PRAMEF6, PRAMEF7, PRAMEF8, PRAMEF9, PRCC, PRDM16, PRDM2, PRDX1, PRDX6, PREB, PRELP, PREPL, PRG4, PRKAA2, PRKAB2, PRKACB, PRKAG3, PRKCE, PRKCZ, PRKD3, PRKRA, PRLH, PMRT6, PROC, PROK1, PROKR1, PROM2, PROX1, PRPF3, PRPF38A, PRPF38B, PRPF40A, PRR21, PRR30, PRR9, PRRC2C, PRRX1, PRSS38, PRSS56, PRUNE, PSD4, PSEN2, PSMA5, PSMB2, PSMB4, PSMD1, PSMD14, PSMD4, PSME4, PSRC1, PTAFR, PTBP2, PTCD3, PTCH2, PTCHD2, PTGER3, PTGFR, PTGFRN, PTGS2, PTH2R, PTMA, PTP4A2, PTPN14, PTPN18, PTPN22, PTPN4, PTPN7, PTPRC, PTPRF, PTPRN, PTPRU, PTRHD1, PUM1, PUM2, PUS10, PUSL1, PVRL4, PXDN, PYCR2, PYGO2, PYHIN1, QPCT, QSOX1, R3HDM1, RAB10, RAB11FIP5, RAB13, RAB17, RAB1A, RAB25, RAB29, RAB3B, RAB3GAP1, RAB3GAP2, RAB42, RAB4A, RAB6C, RAB7B, RABGAP1L, RABGGTB, RABIF, RABL2A, RAD51AP2, RAD54L, RALB, RALGPS2, RAMP1, RANBP2, RAP1A, RAP1GAP, RAPGEF4, RAPH1, RASAL2, RASGRP3, RASSF5, RAVER2, RBBP4, RBBP5, RBKS, RBM1 5, RBM34, RBM43, RBM44, RBM45, RBM8A, RBMS1, RBMXL1, RBP7, RC3H1, RCAN3, RCC1, RCC2, RCOR3, RCSD1, RD3, RDH14, REEP1, REG1A, REG1B, REG3 A, REG3G, REG4, REL, REN, RER1, RERE, RESP18, RETSAT, REV1, RFTN2, RFWD2, RFX5, RFX8, RGL1, RGPD1, RGPD2, RGPD3, RGPD4, RGPD5, RGPD6, RGPD8, RGS1, RGS13, RGS16, RGS18, RGS2, RGS21, RGS4, RGS5, RGS7, RGS8, RGSL1, RHBDD1, RHBDL2, RHBG, RHCE, RHD, RHOB, RHOC, RHOQ, RHOU, RIF1, RIIAD1, RIMKLA, RIMS3, RIT1, RLF, RMDN2, RMND5A, RNASEH1, RNASEL, RND3, RNF103, RNT103-CHMP3, RNF11, RNF115, RNF144A, RNF149, RNF181, RNF186, RNF187, RNF19B, RNF2, RNF207, RNF220, RNF223, RNF25, RNPC3, RNPEP, RNPEPL1, ROCK2, ROR1, RORC, RPA2, RPAP2, RPE, RPE65, RPF1, RPIA, RPI11, RPL22, RPL31, RPL37A, RPL5, RPRD2, RPRM, RPS27, RPS27A, RPS6KA1, RPS6KC1, RPS7, RPS8, RPTN, RQCD1, RRAGC, RRM2, RRNAD1, RRP15, RSAD2, RSBN1, RSC1A1, RSG1, RSPO1, RSRP1, RTCA, RTKN, RTN4, RTP5, RUFY4, RUNX3, RUSC1, RUSC1-AS1, RWDD3, RXFP4, RXRG, RYR2, S100A1, S100A10, S100A11, S100A12, S100A13, S100A14, S100A16, S100A2, S100A3, S100A4, S100A5, S100A6, S100A17, S100A7A, S100A7L2, S100A8, S100A9, S100PBP, S1PR1, SAG, SAMD11, SAMD13, SAP130, SARS, SASS6, SATB2, SCAMP3, SCCPDH, SCG2, SCLY, SCMH1, SCN1A, SCN2A, SCN3A, SCN7A, SCN9A, SCNM1, SCNN1D, SCP2, SCRN3, SCTR, SCYL3, SDC1, SDC3, SDCCAG8, SDE2, SDF4, SDHB, SDHC, SDPR, SEC16B, SEC22B, SELE, SELENBP1, SELL, SELP, SEMA4A, SEMA4C, SEMA4F, SEMA6C, SEP15, SEPN1, SEPT10, SEPT2, SERBP1, SERINC2, SERPINC1, SERPINE2, SERTAD2, SERTAD4, SESN2, SESTD1, SETDB1, SETSIP, SF3A3, SF3B1, SF3B4, SF3B6, SFN, SFPQ, SFT2D2, SFT2D3, SFTPB, SFXN5, SGIP1, SGOL2, SGPP2, SH2D1B, SH2D2A, SH2D5, SH2D6, SH3BGRL3, SH3BP4, SH3BP5L, SH3D21, SH3GLB1, SH3RF3, SH3YL1, SHC1, SHCBP1L, SHE, SHISA4, SIKE1, SIPA1L2, SIX2, SIX3, SKI, SLAMF1, SLAMF6, SLAMF7, SLAMF8, SLAMF9, SLC11A1, SLC16A1, SLC16A14, SLC16A4, SLC19A2, SLC19A3, SLC1A4, SLC1A7, SLC20A1, SLC22A15, SLC23A3, SLC25A12, SLC25A24, SLC25A33, SLC25A34, SLC25A44, SLC26A9, SLC27A3, SLC2A1, SLC2A5, SLC2A7, SLC30A1, SLC30A10, SLC30A2, SLC30A3, SLC30A6, SLC30A7, SLC35A3, SLC35D1, SLC35E2, SLC35E2B, SLC35F3, SLC35F5, SLC35F6, SLC38A11, SLC39A1, SLC39A10, SLC3A1, SLC40A1, SLC41A1, SLC44A3, SLC44A5, SLC45A1, SLC45A3, SLC4A10, SLC4A1AP, SLC4A3, SLC4A5, SLC50A1, SLC5A6, SLC5A7, SLC5A9, SLC6A17, SLC6A9, SLC8A1, SLC9A1, SLC9A2, SLC9A4, SLC9C2, SLFNL1, SMAP2, SMARCAL1, SMC6, SMCP, SMEK2, SMG5, SMG7, SMIM1, SMIM12, SMPD4, SMPDL3B, SMYD1, SMYD2, SMYD3, SMYD5, SNAP47, SNAPIN, SNED1, SNIP1, SNRNP200, SNRNP27, SNRNP40, SNRPE, SNRPG, SNTG2, SNX17, SNX27, SNX7, SOAT1, SOCS5, SORT1, SOS1, SOWAHC, SOX11, SOX13, SP100, SP110, SP140, SP140L, SP3, SP5, SP9, SPAG16, SPAG17, SPAST, SPATA17, SPATA21, SPATA3, SPATA45, SPATA6, SPATS2L, SPC25, SPDYA, SPEG, SPEN, SPHAR, SPHKAP, SPOCD1, SPOPL, SPP2, SPR, SPRED2, SPRR1A, SPRR1B, SPRR2A, SPRR2B, SPRR2D, SPRR2E, SPRR2F, SPRR2G, SPRR3, SPRR4, SPRTN, SPSB1, SPTA1, SPTBN1, SRBD1, SRD5A2, SRGAP2, SRGAP2B, SRGAP2C, SRM, SRP9, SRRM1, SRSF10, SRSF11, SRSF4, SRSF7, SSB, SSBP3, SSFA2, SSR2, SSU72, SSX2IP, ST3GAL3, ST3GAL5, ST6GAL2, ST6GALNAC3, ST6GALNAC5, ST7L, STAM2, STAMBP, STARD7, STAT1, STAT4, STEAP3, STIL, STK11IP, STK16, STK17B, STK25, STK36, STK39, STK40, STMN1, STON1, STON1-GTF2A1L, STPG1, STRADB, STRIP1, STRN, STX12, STX6, STXBP3, SUCLG1, SUCO, SULT1C2, SULT1C3, SULT1C4, SULT6B1, SUMO1, SUPT7L, SUSD4, SV2A, SWT1, SYCP1, SYDE2, SYF2, SYNC, SYPL2, SYT11, SYT14, SYT2, SYT6, SYTL1, SZRD1, SZT2, TACR1, TACSTD2, TADA1, TAF12, TAF13, TAF1A, TAF1B, TAF5L, TAGLN2, TAL1, TANC1, TANK, TARBP1, TARDBP, TARS2, TAS1R1, TAS1R2, TAS1R3, TATDN3, TBC1D8, TBCE, TBR1, TBX15, TBX19, TCEA3, TCEANC2, TCEB3, TCF23, TCF7L1, TCHH, TCHHL1, TCTEX1D1, TCTEX1D4, TDRD10, TDRD5, TDRKH, TEDDM1, TEKT2, TEKT4, TESK2, TET3, TEX261, TEX35, TEX37, TEX38, TFAP2E, TFB2M, TFCP2L1, TFPI, TGFA, TGFB2, TGFBR3, TGFBRAP1, TGOLN2, THADA, THAP3, THAP4, THBS3, THEM4, THEM5, THEMIS2, THNSL2, THRAP3, THSD7B, THUMPD2, TIA1, TIE1, TIGD1, TIMM17A, TINAGL1, TIPRL, TLK1, TLR5, TLX2, TM2D1, TM4SF20, TMBIM1, TMCC2, TMCO1, TMCO2, TMCO4, TMED5, TMEFF2, TMEM125, TMEM127, TMEM131, TMEM150A, TMEM163, TMEM167B, TMEM169, TMEM17, TMEM177, TMEM178A, TMEM18, TMEM182, TMEM183A, TMEM185B, TMEM194B, TMEM198, TMEM200B, TMEM201, TMEM206, TMEM214, TMEM222, TMEM234, TMEM237, TMEM240, TMEM247, TMEM37, TMEM39B, TMEM50A, TMEM51, TMEM52, TMEM53, TMEM54, TMEM56, TMEM56-RWDD3, TMEM57, TMEM59, TMEM61, TMEM63A, TMEM69, TMEM79, TMEM81, TMEM82, TMEM87B, TMEM88B, TMEM9, TMIGD3, TMOD4, TMSB10, TNFAIP6, TNFAIP8L2, TNFAIP8L2-SCNM1, TNFRSF14, TNFRSF18, TNFRSF1B, TNFRSF25, TNFRSF4, TNFRSF8, TNFRSF9, TNFSF18, TNFSF4, TNN, TNNI1, TNNI3K, TNNT2, TNP1, TNR, TNS1, TOE1, TOMM20, TOMM40L, TOR1AIP1, TOR1AIP2, TOR3A, TP53BP2, TP53I3, TP73, TPM3, TPO, TPR, TPRG1L, TPRKB, TRABD2A, TRABD2D, TRAF3IP1, TRAF3IP3, TRAF5, TRAK2, TRAPPC12, TRAPPC3, TRIB2, TRIM11, TRIM17, TRIM33, TRIM43, TRIM43B, TRIM45, TRIM46, TRIM54, TRIM58, TRIM62, TRIM63, TRIM67, TRIP12, TRIT1, TRMT13, TRMT1L, TRMT61B, TRNAU1AP, TRNP1, TROVE2, TRPM8, TSACC, TSEN15, TSGA10, TSHB, TSN, TSNAX, TSPAN1, TSPAN2, TSPYL6, TSSC1, TSSK3, TSTD1, TTC13, TTC21B, TTC22, TTC24, TTC27, TTC30A, TTC30B, TTC31, TTC32, TTC34, TTC39A, TTC4, TTC7A, TTF2, TTLL10, TTLL4, TTLL7, TTN, TUBA3D, TUBA3E, TUBA4A, TUFT1, TWIST2, TXLNA, TXNDC12, TXNDC9, TXNIP, TYW3, TYW5, UAP1, UBAP2L, UBE2E3, UBE2F, UBE2J2, UBE2Q1, UBE2T, UBE2U, UBE4B, UBIAD1, UBL4B, UBQLN4, UBR3, UBR4, UBXN10, UBXN11, UBXN2A, UBXN4, UCHL5, UCK2, UCN, UFC1, UGGT1, UGP2, UGT1A1, UGT1A10, UGT1A3, UGT1A4, UGT1A5, UGT1A6, UGT1A7, UGT1A8, UGT1A9, UHMK1, UNC50, UNC80, UPP2, UQCRH, UQCRHL, URB2, UROD, USF1, USH2A, USP1, USP21, USP24, USP33, USP34, USP37, USP39, USP40, USP48, UTP11L, UTS2, UXS1, VAMP3, VAMP4, VAMP5, VAMP8, VANGL1, VANGL2, VASH2, VAV3, VAX2, VCAM1, VHLL, VIL1, VIT, VN1R5, VPS13D, VPS45, VPS54, VPS72, VRK2, VSNL1, VTCN1, VWA1, VWA3B, VWA5B1, VWC2L, WARS2, WASF2, WBP1, WDFY1, WDPCP, WDR12, WDR26, WDR3, WDR33, WDR35, WDR43, WDR47, WDR54, WDR63, WDR64, WDR75, WDR77, WDR78, WDR92, WDSUB1, WDTC1, WIPF1, WLS, WNT10A, WNT2B, WNT3 A, WNT4, WNT6, WNT9A, WRAP73, WTH3DI, XCL1, XCL2, XDH, XIRP2, XKR8, XPO1, XPR1, XRCC5, YARS, YBX1, YIPF1, YIPF4, YOD1, YPEL5, YRDC, YTHDF2, YWHAQ, YY1AP1, ZAK, ZAP70, ZBED6, ZBTB17, ZBTB18, ZBTB37, ZBTB40, ZBTB41, ZBTB48, ZBTB7B, ZBTB8A, ZBTB8B, ZBTB8OS, ZC3H11A, ZC3H12A, ZC3H15, ZC3H6, ZC3H8, ZCCHC11, ZCCHC17, ZDBF2, ZDHHC18, ZEB2, ZFAND2B, ZFP36L2, ZFP69, ZFP69B, ZFYVE9, ZMPSTE24, ZMYM1, ZMYM4, ZMYM6, ZMYM6NB, ZMYND12, ZNF124, ZNF142, ZNF2, ZNF281, ZNF326, ZNF362, ZNF385B, ZNF436, ZNF496, ZNF512, ZNF513, ZNF514, ZNF593, ZNF638, ZNF644, ZNF648, ZNF669, ZNF670, ZNF672, ZNF678, ZNF683, ZNF684, ZNF687, ZNF691, ZNF692, ZNF695, ZNF697, ZNF804A, ZNHIT6, ZP4, ZRANB2, ZRANB3, ZSCAN20, ZSWIM2, ZSWIM5, ZYG11A, ZYG11B, and ZZZ3; target genes located on chromosomes 3-5 including A4GNT, AADAC, AADACL2, AADAT, AASDH, ABCC5, ABCE1, ABCF3, ABCG2, ABHD10, ABHD14A, ABHD14B, ABHD5, ABHD6, ABI3BP, ABLIM2, ABLIM3, ABTB1, ACAA1, ACAD11, ACAD9, ACAP2, ACKR2, ACKR4, ACOT12, ACOX2, ACOX3, ACPP, ACSL1, ACSL6, ACTBL2, ACTL6A, ACTR8, ACTRT3, ACVR2B, ACY1, ADAD1, ADAM19, ADAM29, ADAMTS12, ADAMTS16, ADAMTS19, ADAMTS2, ADAMTS3, ADAMTS6, ADAMTS9, ADCY2, ADCY5, ADD1, ADH1A, ADH1B, ADH1C, ADH4, ADH5, ADH6, ADH7, ADIPOQ, ADPRH, ADRA1B, ADRA2C, ADRB2, AFAP1, AFAP1L1, AFF1, AFF4, AFM, AFP, AGA, AGGF1, AGPAT9, AGTR1, AGXT2, AHRR, AHSG, AIMP1, AK6, ALAS1, ALB, ALCAM, ALDH1L1, ALDH7A1, ALG1L, ALG1L2, ALG3, ALPK1, ALS2CL, AMACR, AMBN, AMIGO3, AMOTL2, AMT, AMTN, ANAPC10, ANAPC13, ANAPC4, ANK2, ANKDD1B, ANKH, ANKHD1, ANKHD1-EIF4EBP3, ANKRA2, ANKRD17, ANKRD28, ANKRD31, ANKRD32, ANKRD33B, ANKRD34B, ANKRD37, ANKRD50, ANKRD55, ANKUB1, ANO10, ANP32C, ANTXR2, ANXA10, ANXA2R, ANXA3, ANXA5, ANXA6, AP1AR, AP2M1, AP3B1, AP3S1, APBB2, APBB3, APC, APEH, APELA, APOD, APPL1, AQPEP, ARAP2, ARAP3, AREG, ARF4, ARFIP1, ARGFX, ARHGAP10, ARHGAP24, ARHGAP26, ARHGAP31, ARHGEF26, ARHGEF28, ARHGEF3, ARHGEF37, ARHGEF38, ARIH2, ARIH2OS, ARL10, ARL13B, ARL14, ARL14EPL, ARL15, ARL6, ARL6IP5, ARL8B, ARL9, ARMC8, ARPC4, ARPC4-TTLL3, ARPP21, ARRDC3, ARSB, ARSI, ARSJ, ARSK, ART3, ASB14, ASB5, ASIC5, ASTE1, ATG10, ATG12, ATG3, ATG7, ATOH1, ATOX1, ATP10B, ATP10D, ATP11B, ATP13A3, ATP13A4, ATP13A5, ATP1B3, ATP2B2, ATP2C1, ATP5I, ATP6AP1L, ATP6V0E1, ATP6V1A, ATP8A1, ATR, ATRIP, ATXN7, AZI2, B3GALNT1, B3GNT5, B4GALT4, B4GALT7, BANK1, BAP1, BASP1, BBS12, BBS7, BBX, BCHE, BCL6, BDH1, BDH2, BDP1, BEND4, BFSP2, BHLHE40, BHMT, BHMT2, BLOC1S4, BMP2K, BMP3, BMPR1B, BNIP1, BOC, BOD1, BOD1L1, BRD8, BRD9, BRIX1, BRK1, BRPF1, BSN, BST1, BTC, BTD, BTF3, BTLA, BTNL3, BTNL8, BTNL9, C1QTNF2, C1QTNF3, C1QTNF7, C3orf14, C3orf17, C3orf18, C3orf20, C3orf22, C3orf30, C3orf33, C3orf35, C3orf36, C3orf38, C3orf52, C3orf56, C3orf58, C3orf62, C3orf67, C3orf70, C3orf79, C3orf80, C3orf84, C4orf17, C4orf19, C4orf22, C4orf26, C4orf27, C4orf29, C4orf3, C4orf32, C4orf33, C4orf36, C4orf45, C4orf46, C4orf47, C4orf48, C4orf51, C4orf6, C5orf15, C5orf22, C5orf24, C5orf28, C5orf30, C5orf34, C5orf38, C5orf42, C5orf45, C5orf46, C5orf47, C5orf49, C5orf51, C5orf52, C5orf55, C5orf58, C5orf60, C5orf63, C5orf64, C5orf66, C6, C7, C9, CABS1, CACNA1D, CACNA2D2, CACNA2D3, CADM2, CADPS, CAMK1, CAMK2A, CAMK2D, CAMK2N2, CAMK4, CAMKV, CAMLG, CAMP, CAND2, CANX, CAPN7, CAPSL, CARD6, CARTPT, CASP3, CASP6, CASR, CAST, CATSPER3, CAV3, CBLB, CBR4, CBY3, CC2D2A, CCDC109B, CCDC110, CCDC112, CCDC12, CCDC125, CCDC127, CCDC13, CCDC14, CCDC149, CCDC152, CCDC158, CCDC174, CCDC36, CCDC37, CCDC39, CCDC50, CCDC51, CCDC54, CCDC58, CCDC66, CCDC69, CCDC71, CCDC80, CCDC96, CCK, CCKAR, CCL28, CCNA2, CCNB1, CCNG1, CCNG2, CCNH, CCNI, CCNI2, CCNJL, CCNL1, CCNO, CCR1, CCR2, CCR3, CCR4, CCR5, CCR8, CCR9, CCRL2, CCRN4L, CCSER1, CCT5, CD14, CD180, CD200, CD200R1, CD200R1L, CD38, CD47, CD74, CD80, CD86, CD96, CDC20B, CDC23, CDC25A, CDC25C, CDC42SE2, CDCP1, CDH10, CDH12, CDH18, CDH6, CDH9, CDHR2, CDHR4, CDK7, CDKL2, CDKL3, CDKN2AIP, CDKN2AIPNL, CDO1, CDS1, CDV3, CDX1, CELSR3, CENPC, CENPE, CENPH, CFNPK CENPU, CEP120, CEP135, CEP19, CEP44, CEP63, CEP70, CEP72, CEP97, CETN3, CFAP44, CFAP97, CFAP99, CFI, CGGBP1, CHCHD4, CHCHD6, CHD1, CHDH, CHIC2, CHL1, CHMP2B, CHRD, CHRNA9, CHST13, CHST2, CHSY3, CIDEC, CISD2, CISH, CKMT2, CLASP2, CLCN2, CLCN3, CLDN1, CLDN11, CLDN16, CLDN18, CLDN22, CLDN24, CLDND1, CLEC3B, CLGN, CLINT1, CLK4, CLNK, CLOCK, CLPTM1L, CLRN1, CLRN2, CLSTN2, CLTB, CMBL, CMC1, CMSS1, CMTM6, CMTM7, CMTM8, CMYA5, CNBP, CNGA1, CNOT10, CNOT6, CNOT6L, CNOT8, CNTN3, CNTN4, CNTN6, COL23A1, COL25A1, COL4A3BP, COL6A5, COL6A6, COL7A1, COL8A1, COLQ, COMMD10, COMMD2, COMMD8, COPB2, COPG1, COPS4, COQ2, CORIN, COX17, COX18, COX7B2, COX7C, CP, CPA3, CPB1, CPE, CPEB2, CPEB4, CPLX1, CPLX2, CPN2, CPNE4, CPNE9, CPOX, CPZ, CRBN, CREBRF, CRELD1, CRHBP, CRIPAK, CRMP1, CRTAP, CRYBG3, CRYGS, CSF1R, CSF2, CSN1S1, CSN2, CSN3, CSNK1A1, CSNK1G3, CSPG5, CSRNP1, CSTA, CTBP1, CTDSPL, CTNNA1, CFNNB1, CTNND2, CTSO, CTXN3, CWC27, CWH43, CX3CR1, CXCL1, CXCL10, CXCL11, CXCL13, CXCL14, CXCL2, CXCL3, CXCL5, CXCL6, CXCL8, CXCL9, CXCR6, CXXC4, CXXC5, CYB561D2, CYFIP2, CYP2U1, CYP4V2, CYP8B1, CYSTM1, CYTL1, DAB2, DAG1, DALRD3, DAP, DAPP1, DAZL, DBN1, DBR1, DCAF16, DCAF4L1, DCANP1, DCBLD2, DCHS2, DCK, DCLK2, DCLK3, DCP1A, DCP2, DCTD, DCTN4, DCUN1D1, DCUN1D4, DDIT4L, DDX4, DDX41, DDX46, DDX60, DDX60L, DEFB131, DENND6A, DEPDC1B, DGKG, DGKQ, DHFR, DHFRL1, DHX15, DHX29, DHX30, DHX36, DIAPH1, DIMT1, DIRC2, DKK2, DLEC1, DLG1, DMGDH, DMP1, DMXL1, DNAH1, DNAH12, DNAH5, DNAJB11, DNAJB14, DNAJB8, DNAJC13, DNAJC18, DNAJC19, DNAJC21, DNASE1L3, DND1, DOCK2, DOCK3, DOK3, DOK7, DPH3, DPPA2, DPPA4, DPYSL3, DRD1, DRD3, DRD5, DROSHA, DSPP, DTHD1, DTWD2, DTX3L, DUSP1, DUSP7, DUX4, DVL3, DYNC1LI1, DZIP1L, DZIP3, EAF1, EAF2, EBF1, EBLN2, ECE2, ECSCR, ECT2, EDEM1, EDIL3, EDNRA, EEFSEC, EFCAB12, EFCAB9, EFCC1, EFHB, EFNA5, EGF, EGFLAM, EGR1, EHHADH, EIF1B, EIF2A, EIF2B5, EIF4A2, EIF4E, EIF4E1B, EIF4E3, EIF4EBP3, EIF4G1, EIF5A2, ELF2, ELL2, ELMOD2, ELOVL6, ELOVL7, ELP6, EMB, EMC3, EMCN, ENAM, ENC1, ENOPH1, ENPEP, ENPP6, ENTPD3, EOGT, EOMES, EPB41L4A, EPGN, EPHA3, EPHA5, EPHA6, EPHB1, EPHB3, EPM2AIP1, ERAP1, ERAP2, ERBB2IP, ERC2, ERCC8, EREG, ERGIC1, ERICH6, ERVMER34-1, ESM1, ESYT3, ETF1, ETFDH, ETNPPL, ETV5, EVC, EVC2, EXOC1, EXOC3, EXOG, EXOSC7, EXOSC9, F11, F12, F2R, F2RL1, F2RL2, FABP2, FABP6, FAF2, FAIM, FAM105A, FAM107A, FAM114A1, FAM114A2, FAM131A, FAM134B, FAM13A, FAM13B, FAM149A, FAM151B, FAM153A, FAM153B, FAM157A, FAM159B, FAM160A1, FAM162A, FAM169A, FAM170A, FAM172A, FAM173B, FAM174A, FAM175A, FAM184B, FAM193A, FAM193B, FAM196B, FAM198A, FAM198B, FAM19A1, FAM19A4, FAM200B, FAM208A, FAM212A, FAM218A, FAM3D, FAM43A, FAM47E, FAM47E-STBD1, FAM53A, FAM53C, FAM71B, FAM81B, FANCD2, FANCD2OS, FASTKD3, FAT1, FAT2, FAT4, FAXDC2, FBLN2, FBN2, FBXL17, FBXL2, FBXL21, FBXL5, FBXL7, FBXO38, FBXO4, FBXO40, FBXO45, FBXO8, FBXW11, FBXW12, FBXW7, FCHO2, FCHSD1, FDCSP, FEM1C, FER, FETUB, FEZF2, FGA, FGB, FGD5, FGF1, FGF10, FGF12, FGF18, FGF2, FGF5, FGFBP1, FGFBP2, FGFR3, FGFR4, FGFRL1, FGG, FHDC1, FHIT, FILIP1L, FIP1L1, FLNB, FLT4, FNDC3B, ENDC9, FNIP1, FNIP2, FOXD1, FOXI1, FOXL2, FOXL2NB, FOXP1, FRAS1, FREM3, FRG1, FRG2, FRG2C, FRMD4B, FRYL, FST, FSTL1, FSTL4, FSTL5, FTMT, FXR1, FYB, FYCO1, FYTTD1, G3BP1, G3BP2, GAB1, GABRA1, GABRA2, GABRA4, GABRA6, GABRB1, GABRB2, GABRG1, GABRG2, GABRP, GABRR3, GADL1, GAK, GALNT10, GALNT15, GALNT7, GALNTL6, GAP43, GAPT, GAR1, GATA2, GATB, GBA3, GBE1, GC, GCNT4, GCSAM, GDF9, GDNF, GDNF-AS1, GEMIN5, GFM1, GFM2, GFPT2, GFRA3, GHR, GHRL, GHSR, GIMD1, GIN1, GK2, GK5, GLB1, GLRA1, GLRA3, GLRB, GLRX, GLT8D1, GLYCTK, GM2A, GMNC, GMPPB, GMPS, GNAI2, GNAT1, GNB2L1, GNB4, GNL3, GNPDA1, GNPDA2, GNRHR, GOLGA4, GOLGB1, GOLIM4, GOLPH3, GORASP1, GP5, GP9, GPBP1, GPD1L, GPM6A, GPR125, GPR128, GPR149, GPR15, GPR150, GPR151, GPR156, GPR160, GPR171, GPR27, GPR62, GPR78, GPR87, GPR98, GPRIN1, GPRIN3, GPX1, GPX3, GPX8, GRAMD1C, GRAMD3, GRIA1, GRIA2, GRID2, GRIP2, GRK4, GRK6, GRK7, GRM2, GRM6, GRM7, GRPEL1, GRPEL2, GRSF1, GRXCR1, GRXCR2, GSK3B, GSTCD, GSX2, GTF2E1, GTF2H2, GTF2H2C, GTF2H2C_2, GTPBP8, GUCA1C, GUCY1A3, GUCY1B3, GUF1, GXYLT2, GYG1, GYPA, GYPB, GYPE, GZMA, GZMK, H1FOO, H1FX, H2AFY, H2AFZ, HACL1, HADH, HAND1, HAND2, HAPLN1, HARS, HARS2, HAUS3, HAVCR1, HAVCR2, HBEGF, HCLS1, HCN1, HDAC11, HDAC3, HEG1, HELQ, HELT, HEMK1, HERC3, HERC5, HERC6, HES1, HESX1, HEXB, HGD, HGFAC, HHATL, HHIP, HHLA2, HIGD1A, HIGD2A, HINT1, HK3, HLTF, HMCES, HMGB2, HMGCR, HMGCS1, HMGXB3, HMHB1, HMMR, HMP19, HMX1, HNRNPA0, HNRNPAB, HNRNPD, HNRNPDL, HNRNPH1, HOMER1, HOPX, HPGD, HPGDS, HPS3, HPSE, HRASLS, HRG, HSRH1, HRH2, HS3ST1, HSD17B11, HSD17B13, HSD17B4, HSPA4, HSPA4L, HSPA9, HSPB3, HSPBAP1, HTN1, HTN3, HTR1A, HTR1F, HTR3C, HTR3D, HTR3E, HTR4, HTRA3, HTT, HYAL1, HYAL2, HYAL3, IBSP, ICE1, IDUA, IFRD2, IFT122, IFT57, IFT80, IGF2BP2, IGFBP7, IGIP, IGJ, IGSF10, IGSF11, IK, IL12A, IL12B, IL13, IL15, IL17B, IL17RB, IL17RC, IL17RD, IL17RE, IL1RAP, IL2, IL20R13, IL21, IL3, IL31RA, IL4, IL5, IL5RA, IL6ST, IL7R, IL9, ILDR1, IMPDH2, IMPG2, ING2, INPP4B, INTS12, INTU, IP6K1, IP6K2, IPO11, IQCB1, IQCF1, IQCF2, IQCF3, IQCF5, IQCF6, IQCG, IQCJ, IQCJ-SCRIP1, IQGAP2, IQSEC1, IRAK2, IRF1, IRF2, IRGM, IRX1, IRX2, IRX4, ISL1, ISOC1, ISY1, ISY1-RAB43, ITGA1, ITGA2, ITGA9, ITGB5, ITIH1, ITIH3, ITIH4, ITK, ITPR1, JADE1, JADE2, JAGN1, JAKMIP1, JAKMIP2, JMY, KALRN, KAT2B, KBTBD12, KBTBD8, KCNAB1, KCNH8, KCNIP1, KCNIP4, KCNMB1, KCNMB2, KCNMB3, KCNN2, KCTD16, KCTD6, KCTD8, KDM3B, KDR, KIAA0141, KIAA0226, KIAA0232, KIAA0825, KIAA0922, KIAA1024L, KIAA1109, KIAA1143, KIAA1191, KIAA1211, KIAA1257, KIAA1407, KIAA1524, KIAA2018, KIF15, KIF20A, KIF2A, KIF3A, KIF4B, KIF9, KIT, KLB, KLF15, KLF3, KLHDC8B, KLHL18, KLHL2, KLHL24, KLHL3, KLHL40, KLHL5, KLHL6, KLHL8, KLKB1, KNG1, KPNA1, KPNA4, KRBOX1, KY, LAMB2, LAMP3, LAMTOR3, LAP3, LARP1, LARP1B, LARP7, LARS, LARS2, LCORL, LCP2, LDB2, LEAP2, LECT2, LEF1, LEKR1, LEPREL1, LETM1, LGI2, LHFPL2, LHFPL4, LIAS, LIFR, LIMCH1, LIMD1, LIN54, LIPH, LIX1, LMAN2, LMBRD2, LMCD1, LMLN, LMNB1, LMOD3, LNP1, LNPEP, LNX1, LOC100132146, LOC100505841, LOC100652758, LOC101928093, LOC101928448, LOC339862, LOC401052, LOC650293, LOC728637, LOX, LPCAT1, LPHN3, LPP, LRAT, LRBA, LRCH3, LRIG1, LRIT3, LRP2BP, LRPAP1, LRRC14B, LRRC15, LRRC2, LRRC31, LRRC34, LRRC3B, LRRC58, LRRC66, LRRC70, LRRFIP2, LRRIQ4, LRRN1, LRRTM2, LRTM1, LSAMP, LSG1, LSM11, LSM3, LSM6, LSMEM2, LTC4S, LTF, LXN, LYAR, LYRM7, LYSMD3, LYZL4, LZTFL1, MAATS1, MAB21L2, MAD2L1, MAEA, MAGEF1, MAGI1, MAML1, MAML3, MAN2A1, MAN2B2, MANBA, MANF, MAP1B, MAP3K1, MAP3K13, MAP4, MAP6D1, MAP9, MAPK10, MAPK9, MAPKAPK3, MARCH1, MARCH11, MARCH3, MARCH6, MARVELD2, MASP1, MAST4, MAT2B, MATR3, MB21D2, MBD4, MBLAC2, MBNL1, MCC, MCCC1, MCCC2, MCF2L2, MCIDAS, MCM2, MCTP1, MECOM, MED10, MED12L, MED28, MED7, MEF2C, MEGF10, MEPE, METAP1, METTL14, METTL6, MFAP3, MFAP3L, MFI2, MFN1, MFSD1, MFSD10, MFSD7, MFSD8, MGARP, MGAT1, MGAT4B, MGAT4D, MGLL, MGST2, MIER3, MINA, MITF, MKRN2, MKRN2OS, MLF1, MLH1, MMAA, MME, MMRN1, MND1, MOB1B, MOBP, MOCS2, MON1A, MORC1, MRAS, MRFAP1, MRFAP1L1, MROH2B, MRPL1, MRPL22, MRPL3, MRPL36, MRPL47, MRPS18C, MRPS22, MRPS25, MRPS27, MRPS30, MRPS36, MSANTD1, MSH3, MSL2, MSMO1, MST1, MST1R, MSX1, MSX2, MTHFD2L, MTMR12, MTMR14, MTNR1A, MTRNR2L2, MTRR, MTTP, MTX3, MUC13, MUC20, MUC4, MUC7, MUSTN1, MXD3, MXD4, MYD88, MYH15, MYL3, MYL5, MYLK, MYNN, MYO10, MYOT, MYOZ2, MYOZ3, MYRIP, MZB1, N4BP2, N4BP3, NAA11, NAA15, NAA50, NAAA, NAALADL2, NADK2, NAF1, NAIP, NAP1L5, NAT6, NAT8L, NBEAL2, NCAPG, NCBP2, NCEH1, NCK1, NCKIPSD, NDFIP1, NDNF, NDST1, NDST3, NDST4, NDUFA2, NDUFAF2, NDUFAF3, NDUFB4, NDUFB5, NDUFC1, NDUFS4, NDUFS6, NEIL3, NEK1, NEK10, NEK11, NEK4, NELFA, NEURL1B, NEUROG1, NEUROG2, NFKB1, NFKBIZ, NFXL1, NGLY1, NHP2, NICN1, NIM1K, NIPAL1, NIPAL4, NIPBL, NISCH, NIT2, NKD2, NKIRAS1, NKTR, NKX1-1, NKX2-5, NKX3-2, NKX6-1, NLGN1, NLN, NMD3, NME5, NME6, NME9, NMNAT3, NMU, NMUR2, NNT, NOA1, NOP14, NOP16, NPFFR2, NPHP3, NPM1, NPNT, NPR3, NPRL2, NPY1R, NPY2R, NPY5R, NR1D2, NR1I2, NR2C2, NR2F1, NR3C1, NR3C2, NREP, NRG2, NRROS, NSA2, NSD1, NSG1, NSUN2, NSUN3, NSUN7, NT5DC2, NUDCD2, NUDT12, NUDT16, NUDT6, NUDT9, NUP155, NUP210, NUP54, NWD2, NXPE3, OC1AD1, OC1AD2, OCLN, ODAM, OGG1, OPA1, OR2V1, OR2V2, OR2Y1, OR4F16, OR4F29, OR4F3, OR5AC2, OR5H1, OR5H14, OR5H15, OR5H2, OR5H6, OR5K1, OR5K2, OR5K3, OR5K4, OSBPL10, OSBPL11, OSMR, OSTC, OSTN, OTOL1, OTOP1, OTP, OTUD4, OTULIN, OXCT1, OXNAD1, OXSM, OXSR1, OXTR, P2RY1, P2RY12, P2RY13, P2RY14, P4HA2, P4HTM, PABPC4L, PACRGL, PAJCS, PAIP1, PAIP2, PAK2, PALLD, PAM, PANK3, PAPD4, PAPD7, PAPSS1, PAQR3, PAQR9, PARL, PARM1, PARP14, PARP15, PARP3, PARP8, PARP9, PBRM1, PCBD2, PCBP4, PCCB, PCDH1, PCDH10, PCDH12, PCDH18, PCDH7, PCDHA1, PCDHA10, PCDHA11, PCDHA12, PCDHA13, PCDHA2, PCDHA3, PCDHA4, PCDHA5, PCDHA6, PCDHA7, PCDHA8, PCDHA9, PCDHAC1, PCDHAC2, PCDHB1, PCDHB10, PCDHB11, PCDHB12, PCDHB13, PCDHB14, PCDHB15, PCDHB16, PCDHB2, PCDHB3, PCDHB4, PCDHB5, PCDHB6, PCDHB7, PCDHB8, PCDHB9, PCDHGA1, PCDHGA10, PCDHGA11, PCDHGA12, PCDHGA2, PCDHGA3, PCDHGA4, PCDHGA5, PCDHGA6, PCDHGA7, PCDHGA8, PCDHGA9, PCDHGB1, PCDHGB2, PCDHGB3, PCDHGB4, PCDHGB5, PCDHGB6, PCDHGB7, PCDHGC3, PCDHGC4, PCDHGC5, PCGFA3, PCNP, PCOLCE2, PCSK1, PCYOX1L, PCYT1A, PDCD10, PDCD6, PDCD6IP, PDCL2, PDE12, PDE4D, PDE5A, PDE6A, PDE6B, PDE8B, PDGFC, PDGFRA, PDGFRB, PDHA2, PDHB, PDIA5, PDLIM3, PDLIM4, PDLIM5, PDLIM7, PDS5A, PDZD2, PDZRN3, PELO, PEX5L, PF4, PF4V1, PFDN1, PFKFB4, PFN2, PFN3, PGGT1B, PGM2, PGRMC2, PHAX, PHC3, PHF7, PHLDB2, PHOX2B, PHYKPL, PI4K2B, PIGG, PIGX, PIGY, PIGZ, PIK3CA, PIK3CB, PIK3R1, PIK3R4, PITX1, PITX2, PJA2, PKD2, PKD2L2, PLA1A, PLA2G12A, PLAC8, PLAC8L1, PLCD1, PLCH1, PLCL2, PLCXD2, PLCXD3, PLD1, PLEKHG4B, PLK2, PLK4, PLOD2, PLRG1, PLS1, PLSCR1, PLSCR2, PLSCR4, PLSCR5, PLXNA1, PLXNB1, PLXND1, POC1A, POC5, PODXL2, POGLUT1, POLK, POLN, POLQ, POLR2B, POLR2H, POLR3G, POMGNT2, POPDC2, POU1F1, POU4F2, POU4F3, POU5F2, PP2D1, PPA2, PPAP2A, PPARG, PPARGC1A, PPARGC1B, PPAT, PPBP, PPEF2, PPIC, PPID, PPIP5K2, PPM1K, PPM1L, PPM1M, PPP1R2, PPP2CA, PPP2R2B, PPP2R2C, PPP2R3A, PPP3CA, PPP4R2, PPWD1, PQLC2L, PRDM5, PRDM6, PRDM8, PRDM9, PRELID1, PRELID2, PRICKLE2, PRIMPOL, PRKAA1, PRKAR2A, PRKCD, PRKCI, PRKG2, PRLR, PRMT9, PROB1, PROK2, PROL1, PROM1, PROP1, PROS1, PRR16, PRR23A, PRR23B, PRR23C, PRR27, PRR7, PRRC1, PRRT3, PRSS12, PRSS42, PRSS45, PRSS46, PRSS48, PRSS50, PSAPL1, PSD2, PSMD2, PSMD6, PTCD2, PTGER4, PTH1R, PTPLB, PTPN13, PTPN23, PTPRG, PTTG1, PTTG2, PTX3, PURA, PVRL3, PWWP2A, PXK, PXYLP1, PYDC2, PYURF, QARS, QDPR, QRFPR, QRICH1, QTRTD1, RAB24, RAB28, RAB33B, RAB3C, RAB43, RAB5A, RAB6B, RAB7A, RABL3, RAD1, RAD17, RAD18, RAD50, RAD54L2, RAF1, RAI14, RANBP17, RANBP3L, RAP1GDS1, RAP2B, RAPGEF2, RAPGEF6, RARB, RARRES1, RARS, RASA1, RASA2, RASGEF1B, RASGEF1C, RASGRF2, RASL11B, RASSF1, RASSF6, RBM15B, RBM22, RBM27, RBM46, RBM47, RBM5, RBM6, RBMS3, RBP1, RBP2, RBPJ, RBSN, RCHY1, REEP2, REEP5, RELL1, RELL2, REST, RETNLB, RFC1, RFC4, RFESD, RFT1, RFTN1, RGMB, RGS12, RGS14, RGS7BP, RHO, RHOA, RHOBTB3, RHOH, RICTOR, RIOK2, RMND5B, RNF123, RNF13, RNF130, RNF14, RNF145, RNF150, RNF168, RNF175, RNF180, RNF212, RNF4, RNF44, RNF7, ROBO1, ROBO2, ROPN1, ROPN1B, ROPN1L, RPL14, RPL15, RPL22L1, RPL24, RPL26L1, RPL29, RPL32, RPL34, RPL35A, RPL37, RPL39L, RPL9, RPN1, RPP14, RPS14, RPS23, RPS3A, RPSA, RPUSD3, RRH, RRP9, RSRC1, RTP1, RTP2, RTP3, RTP4, RUFY1, RUFY3, RUVBL1, RWDD4, RXFP1, RXFP3, RYBP, RYK, S100P, S100Z, SACM1L, SAMD7, SAP30, SAP30L, SAR1B, SATB1, SCAMP1, SCAP, SCARB2, SCD5, SCFD2, SCGB3A1, SCGB3A2, SCHIP1, SCLT1, SCN10A, SCN11A, SCN5A, SCOC, SCRG1, SDAD1, SDHA, SEC13, SEC22A, SEC22C, SEC24A, SEC24B, SEC24D, SEC31A, SEC61A1, SEC62, SEL1L3, SELK, SELT, SEMA3B, SEMA3F, SEMA3G, SEMA5A, SEMA5B, SEMA6A, SENP2, SENP5, SENP7, SEPP1, SEPSECS, SEPT11, SEPT8, SERF1A, SERF1B, SERINC5, SERP1, SERPINI1, SERPINI2, SETD2, SETD5, SETD7, SETD9, SETMAR, SFMBT1, SFRP2, SFXN1, SGCB, SGCD, SGMS2, SGOL1, SGTB, SH3BP2, SH3BP5, SH3D19, SH3PXD2B, SH3RF1, SH3RF2, SH3TC1, SH3TC2, SHISA3, SHISA5, SHOX2, SHQ1, SHROOM1, SHROOM3, SI, SIAH2, SIDT1, SIL1, SIMC1, SKIL, SKIV2L2, SKP1, SKP2, SLAIN2, SLBP, SLC10A4, SLC10A6, SLC10A7, SLC12A2, SLC12A7, SLC12A8, SLC15A2, SLC1A3, SLC22A13, SLC22A14, SLC22A4, SLC22A5, SLC23A1, SLC25A2, SLC25A20, SLC25A26, SLC25A31, SLC25A36, SLC25A38, SLC25A4, SLC25A46, SLC25A48, SLC26A1, SLC26A2, SLC26A6, SLC27A6, SLC2A2, SLC2A9, SLC30A5, SLC30A9, SLC33A1, SLC34A1, SLC34A2, SLC35A4, SLC35A5, SLC35G2, SLC36A1, SLC36A2, SLC36A3, SLC38A3, SLC38A9, SLC39A8, SLC41A3, SLC45A2, SLC4A4, SLC4A7, SLC4A9, SLC51A, SLC6A1, SLC6A11, SLC6A18, SLC6A19, SLC6A20, SLC6A3, SLC6A6, SLC6A7, SLC7A11, SLC7A14, SLC9A3, SLC9A9, SLC9B1, SLC9B2, SLC9C1, SLCO2A1, SLCO4C1, SLCO6A1, SLIT2, SLIT3, SLITRK3, SLMAP, SLU7, SMAD1, SMAD5, SMARCA5, SMARCAD1, SMARCC1, SMC4, SMCO1, SMIM14, SMIM15, SMIM20, SMIM23, SMIM3, SMIM4, SMN1, SMN2, SMR3A, SMR3B, SNCA, SNCAIP, SNCB, SNRK, SNTN, SNX18, SNX2, SNX24, SNX25, SNX4, SOD3, SORBS2, SORCS2, SOWAHA, SOWAHB, SOX14, SOX2, SOX30, SPARC, SPARCL1, SPATA12, SPATA16, SPATA18, SPATA24, SPATA4, SPATA5, SPATA9, SPCS1, SPCS3, SPDL1, SPEF2, SPICE1, SPINK1, SPINK13, SPINK14, SPINK2, SPINK5, SPINK6, SPINK7, SPINK8, SPINK9, SPOCK1, SPOCK3, SPON2, SPP1, SPRY1, SPRY4, SPSB4, SPTSSB, SPZ1, SQSTM1, SRA1, SRD5A1, SRD5A3, SREK1, SREK1IP1, SRFBP1, SRGAP3, SRP19, SRP72, SRPRB, SS18L2, SSBP2, SSR3, SST, SSUH2, ST3GAL6, ST6GAL1, ST8SIA4, STAB1, STAC, STAG1, STAP1, STARD4, STATH, STBD1, STC2, STIM2, STK10, STK32A, STK32B, STOX2, STPG2, STT3B, STX18, STX19, STXBP5L, SUB1, SUCLG2, SUCNR1, SULT1B1, SULT1E1, SUMF1, SUSD5, SV2C, SYN2, SYNPO, SYNPO2, SYNPR, TACC3, TACR3, TADA2B, TADA3, TAF7, TAF9, TAGLN3, TAMM41, TAPT1, TARS, TAS2R1, TATDN2, TBC1D1, TBC1D14, TBC1D19, TBC1D23, TBC1D5, TBC1D9, TBC1D9B, TBCA, TBCCD1, TBCK, TBLIXR1, TCAIM, TCERG1, TCF7, TCOF1, TCTA, TCTEX1D2, TDGF1, TDO2, TEC, TECRL, TENM2, TENM3, TERT, TET2, TEX264, TEX43, TF, TFDP2, TFG, TFRC, TGFBI, TGFBR2, TGM4, THAP6, THAP9, THBS4, THEGL, THG1L, THOC3, THOC7, THPO, THRB, THUMPD3, TICAM2, TIFA, TIFAB, TIGD2, TIGD4, TIGD6, TIGIT, TIMD4, TIMMDC1, TIMP4, TIPARP, TKT, TKTL2, TLL1, TLR1, TLR10, TLR2, TLR3, TLR6, TLR9, TLX3, TM4SF1, TM4SF18, TM4SF19, TM4SF4, TMA16, TMA7, TMCC1, TMCO6, TMED7, TMED7-TICAM2, TMED9, TMEM108, TMEM110, TMEM110-MUSTN1, TMEM115, TMEM128, TMEM129, TMEM144, TMEM14E, TMEM150C, TMEM154, TMEM155, TMEM156, TMEM158, TMEM161B, TMEM165, TMEM167A, TMEM171, TMEM173, TMEM174, TMEM175, TMEM183B, TMEM184C, TMEM192, TMEM207, TMEM212, TMEM232, TMEM33, TMEM39A, TMEM40, TMEM41A, TMEM42, TMEM43, TMEM44, TMEM45A, TMEM89, TMF1, TMIE, TMPPE, TMPRSS11A, TMPRSS11B, TMPRSS11D, TMPRSS11E, TMPRSS11F, TMPRSS7, TNFAIP8, TNFSF10, TNIK, TNIP1, TNIP2, TNIP3, TNK2, TNNC1, TNPO1, TOMM70A, TOP2B, TOPAZ1, TOPBP1, TP63, TPPP, TPRA1, TPRG1, TRA2B, TRAIP, TRAK1, TRAM1L1, TRANK1, TRAPPC11, TRAPPC13, TRAT1, TREX1, TRH, TRIM2, TRIM23, TRIM36, TRIM41, TRIM42, TRIM52, TRIM59, TRIM60, TRIM61, TRIM7, TRI M71, TRIML1, TRIML2, TRIO, TRIP13, TRMT10A, TRMT10C, TRMT44, TRNT1, TRPC1, TRPC3, TRPC7, TSC22D2, TSEN2, TSLP, TSPAN17, TSPAN5, TSSK1B, TTC1, TTC14, TTC21A, TTC23L, TTC29, TTC33, TTC37, TTLL3, TUSC2, TWF2, TXK, TXNDC15, TXNRD3, TXNRD3NB, U2SURP, UBA3, UBA5, UBA6, UBA7, UBE2B, UBE2D2, UBE2D3, UBE2E1, UBE2E2, UBE2K, UBE2QL1, UBLCP1, UBP1, UBTD2, UBXN7, UCHL1, UCN2, UCP1, UFSP2, UGDH, UGT2A1, UGT2A2, UGT2A3, UGT2B10, UGT2B11, UGT2B15, UGT2B17, UGT2B28, UGT2B4, UGT2B7, UGT3A1, UGT3A2, UGT8, UIMC1, ULK4, UMPS, UNC5A, UNC5C, UPK1B, UQCRC1, UQCRQ, UROC1, USO1, USP13, USP17L10, USP17L11, USP17L12, USP17L13, USP17L15, USP17L17, USP17L18, USP17L19, USP17L20, USP17L21, USP17L22, USP17L24, USP17L25, USP17L26, USP17L27, USP17L28, USP17L29, USP17L30, USP17L5, USP19, USP38, USP4, USP46, USP53, UTP15, UTP3, UVSSA, VCAN, VDAC1, VEGFC, VEPH1, VGLL3, VGLL4, VHL, VILL, VIPR1, VPRBP, VPS8, VWA5B2, WDFY3, WDR1, WDR17, WDR19, WDR36, WDR41, WDR48, WDR49, WDR53, WDR55, WDR5B, WDR6, WDR70, WDR82, WFS1, WHSC1, WNT5A, WNT7A, WNT8A, WWC1, WWC2, WWTR1, XCR1, XIRP1, XPC, XRCC4, XRN1, XXYLT1, XYLB, YEATS2, YIPF5, YIPF7, YTHDC1, YTHDC2, ZAR1, ZBBX, ZBED2, ZBED3, ZBED8, ZBTB11, ZBTB20, ZBTB38, ZBTB47, ZBTB49, ZCCHC10, ZCCHC4, ZCCHC9, ZCWPW2, ZDHHC11, ZDHHC19, ZDHHC23, ZDHHC3, ZFP2, ZFP42, ZFP62, ZFR, ZFYVE16, ZFYVE28, ZGRF1, ZIC1, ZIC4, ZKSCAN7, ZMAT2, ZMAT3, ZMYND10, ZNF131, ZNF141, ZNF148, ZNF197, ZNF300, ZNF330, ZNF346, ZNF35, ZNF354A, ZNF354B, ZNF354C, ZNF366, ZNF385D, ZNF445, ZNF454, ZNF474, ZNF501, ZNF502, ZNF518B, ZNF589, ZNF595, ZNF608, ZNF619, ZNF620, ZNF621, ZNF622, ZNF639, ZNF654, ZNF660, ZNF662, ZNF717, ZNF718, ZNF721, ZNF732, ZNF80, ZNF827, ZNF852, ZNF860, ZNF879, ZPLD1, ZSWIM6 and ZXDC; target genes located on chromosomes 6-9 including AAED1, AARD, AARS2, AASS, ABCA1, ABCA13, ABCA2, ABCB1, ABCB4, ABCB5, ABCB8, ABCC10, ABCF1, ABCF2, ABHD11, ABHD16A, ABHD17B, ABL1, ABO, ABRA, ABRACL, ABT1, ACAT2, ACER2, ACHE, ACN9, ACO1, ACOT13, ACTB, ACTL6B, ACTL7A, ACTL7B, ACTR3B, ACTR3C, ADAM18, ADAM2, ADAM22, ADAM28, ADAM32, ADAM7, ADAM9, ADAMDEC1, ADAMTS13, ADAMTSL1, ADAMTSL2, ADAP1, ADAT2, ADCK2, ADCK5, ADCY1, ADCY8, ADCYAP1R1, ADGB, ADHFE1, ADRA1A, ADRB3, ADTRP, AEBP1, AGAP3, AGBL3, AGER, AGFG2, AGK, AGMO, AGO2, AGPAT1, AGPAT2, AGPAT4, AGPAT5, AGPAT6, AGR2, AGR3, AGTPBP1, AHCYL2, AHI1, AHR, AIF1, AIF1L, AIG1, AIM1, AIMP2, AK1, AK3, AK8, AK9, AKAP12, AKAP2, AKAP7, AKAP9, AKIRIN2, AKNA, AKR1B1, AKR1B10, AKR1B15, AKR1D1, ALAD, ALDH1A1, ALDH1B1, ALDH5A1, ALDH8A1, ALDOB, ALG2, ALKBH4, AMBP, AND1, AMPH, AMZ1, ANAPC2, ANGPT1, ANGPT2, ANGPTL2, ANK1, ANKIB1, ANKMY2, ANKRD18A, ANKRD18B, ANKRD20A1, ANKRD20A2, ANKRD20A3, ANKRD20A4, ANKRD46, ANKRD6, ANKRD61, ANKRD66, ANKRD7, ANKS1A, ANKS6, ANLN, ANP32B, ANXA1, ANXA13, AOAH, AOC1, AP1S1, AP3M2, AP4M1, AP5Z1, APBA1, APOBEC2, APOM, APTX, AQP1, AQP3, AQP7, ARC, ARF5, ARFGEF1, ARG1, ARHGAP18, ARHGAP39, ARHGEF10, ARHGEF35, ARHGEF39, ARHGEF5, ARID1B, ARID3C, ARL4A, ARMC1, ARMC10, ARMC12, ARMC2, ARPC1A, ARPC1B, ARPC5L, ARRDC1, ASAH1, ASAP1, ASB10, ASB15, ASB4, ASB6, ASCC3, ASF1A, ASH2L, ASIC3, ASL, ASNS, ASPH, ASPN, ASS1, ASTN2, ASZ1, ATAD2, ATAT1, ATF6B, ATG5, ATG9B, ATP5J2, ATP5J2-PTCD1, ATP6V0A4, ATP6V0D2, ATP6V0E2, ATP6V1B2, ATP6V1C1, ATP6V1F, ATP6V1G1, ATP6V1G2, ATP6V1H, ATXN1, ATXN7L1, AUH, AUTS2, AVL9, AZGP1, AZIN1, B3GALT4, B3GAT2, B4GALT1, BAALC, BAAT, BACH2, BAG1, BAG2, BAG4, BAG6, BAI1, BAI3, BAIAP2L1, BAK1, BARHL1, BARX1, BAZ1B, BBS9, BCAP29, BCKDHB, BCL7B, BCLAF1, BEND3, BEND6, BET1, BHLHA15, BHLHE22, BICD2, BIN3, BLK, BLOC1S5, BLVRA, BMP1, BMP5, BMP6, BMPER, BNC2, BNIP3L, BOP1, BPGM, BPHL, BRAF, BRAT1, BRD2, BRD3, BRF2, BRI3, BRINP1, BRPF3, BSPRY, BTBD9, BTN1A1, BTN2A1, BTN2A2, BTN3A1, BTN3A2, BTN3A3, BTNL2, BUD31, BVES, BYSL, BZW2, C1GALT1, C2, C4A, C4B, C4B_2, C5, C6orf1, C6orf10, C6orf106, C6orf118, C6orf120, C6orf132, C6orf136, C6orf141, C6orf15, C6orf163, C6orf165, C6orf195, C6orf201, C6orf203, C6orf211, C6orf222, C6orf223, C6orf226, C6orf229, C6orf25, C6orf47, C6orf48, C6orf52, C6orf57, C6orf58, C6orf62, C6orf7, C6orf89, C6orf99, C7orf25, C7orf26, C7orf31, C7orf33, C7orf34, C7orf43, C7orf49, C7orf50, C7orf55, C7orf55-LUC7L2, C7orf57, C7orf60, C7orf61, C7orf62, C7orf65, C7orf66, C7orf69, C7orf71, C7orf72, C7orf73, C7orf76, C8G, C8orf22, C8orf31, C8orf33, C8orf34, C8orf37, C8orf4, C8orf44, C8orf44-SGK3, C8orf46, C8orf48, C8orf58, C8orf59, C8orf74, C8orf76, C8orf82, C8orf86, C8orf87, C8orf88, C8orf89, C9orf106, C9orf114, C9orf116, C9orf117, C9orf129, C9orf131, C9orf135, C9orf139, C9orf142, C9orf152, C9orf153, C9orf156, C9orf16, C9orf163, C9orf170, C9orf171, C9orf172, C9orf173, C9orf24, C9orf3, C9orf40, C9orf41, C9orf43, C9orf47, C9orf50, C9orf57, C9orf62, C9orf64, C9orf66, C9orf69, C9orf72, C9orf78, C9orf84, C9orf85, C9orf89, C9orf9, C9orf91, C9orf92, CA1, CA13, CA2, CA3, CA8, CA9, CAAP1, CACFD1, CACNA1B, CACNA2D1, CADPS2, CAGE1, CALB1, CALCR, CALD1, CALN1, CALU, CAMK2B, CAMSAP1, CAP2, CAPN11, CAPZA2, CARD11, CARD9, CASD1, CASP2, CASP8AP2, CAV1, CAV2, CBLL1, CBWD1, CBWD3, CBWD5, CBWD6, CBX3, CCAR2, CCBL1, CCDC107, CCDC126, CCDC129, CCDC132, CCDC136, CCDC146, CCDC166, CCDC167, CCDC170, CCDC171, CCDC180, CCDC183, CCDC25, CCDC28A, CCDC71L, CCHCR1, CCIN, CCL19, CCL21, CCL24, CCL26, CCL27, CCM2, CCNC, CCND3, CCNE2, CCR6, CCT6A, CCZ1, CCZ1B, CD109, CD164, CD24, CD274, CD2AP, CD36, CD72, CD83, CDC14B, CDC26, CDC37L1, CDC40, CDC5L, CDCA2, CDCA7L, CDH17, CDHR3, CDK13, CDK14, CDK19, CDK20, CDK5, CDK5RAP2, CDK6, CDK9, CDKAL1, CDKN1A, CDKN2A, CDKN2B, CDSN, CDYL, CEBPD, CEL, CENPP, CENPQ, CENPW, CEP162, CEP41, CEP57L1, CEP78, CEP85L, CER1, CERCAM, CFAP69, CFB, CFTR, CGA, CHCHD2, CHCHD3, CHCHD7, CHD7, CHMP4C, CHMP5, CHMP7, CHN2, CHPF2, CHRAC1, CHRM2, CHRNA2, CHRNA6, CHRNB3, CHST12, CITED2, CIZ1, CKS2, CLCN1, CLDN12, CLDN15, CLDN20, CLDN23, CLDN3, CLDN4, CLEC2L, CLEC5A, CLIC1, CLIC3, CLIC5, CLIP2, CLN8, CLPS, CLPS1, CLPSL2, CLA, CLU, CLVS1, CLVS2, CMTR1, CNBD1, CNGB3, CNKSR3, CNOT4, CNOT7, CNPY1, CNPY3, CNPY4, CNR1, CNTFR, CNTLN, CNTNAP2, CNTNAP3, CNTNAP3B, CNTRL, COA1, COBL, COG5, COL10A1, COL11A2, COL12A1, COL14A1, COL15A1, COL19A1, COL1A2, COL21A1, COL22A1, COL26A1, COL27A1, COL28A1, COL5A1, COL9A1, COLEC10, COMMD5, COPG2, COPS5, COPS6, COQ3, COQ4, CORO2A, COX19, COX6C, COX7A2, CPA1, CPA2, CPA4, CPA5, CPA6, CPED1, CPNE3, CPNE5, CPQ, CPSF1, CPSF4, CPVL, CRAT, CRB2, CRCP, CREB3, CREB3L2, CREB5, CRH, CRHR2, CRIP3, CRISP1, CRISP2, CRISP3, CRISPLD1, CROT, CRYGN, CSGALNACT1, CSMD1, CSMD3, CSNK2B, CSPP1, CTAGE15, CTAGE4, CTAGE6, CTAGE8, CTAGE9, CTGF, CTHRC1, CTNNAL1, CTSB, CTSL, CTSV, CTTNBP2, CUL1, CUL7, CUL9, CUTA, CLTX1, CYB5R4, CYC1, CYCS, CYHR1, CYLC2, CYP11B1, CYP11B2, CYP21A2, CYP2W1, CYP39A1, CYP3A4, CYP3A43, CYP3A5, CYP3A7, CYP3A7-CYP3AP1, CYP51A1, CYP7A1, CYP7B1, CYSRT1, CYTH3, DAAM2, DAB2IP, DACT2, DAGLB, DAPK1, DAXX, DBF4, DBH, DBNL, DCAF10, DCAF12, DCAF13, DCAF4L2, DCBLD1, DCDC2, DCSTAMP, DCTN3, DCTN6, DDAH2, DDC, DDHD2, DDO, DDR1, DDX31, DDX39B, DDX43, DDX56, DDX58, DEC1, DECR1, DEF6, DEFA1, DEFA1B, DEFA3, DEFA4, DEFA5, DEFA6, DEFB1, DEFB103A, DEFB103B, DEFB104A, DEFB104B, DEFB105A, DEFB105B, DEFB106A, DEFB106B, DEFB107A, DEFB107B, DEFB110, DEFB112, DEFB113, DEFB114, DEFB130, DEFB133, DEFB134, DEFB135, DEFB136, DEFB4A, DEFB4B, DEK, DENND1A, DENND2A, DENND3, DENND4C, DEPTOR, DERL1, DFNA5, DFNB31, DGAT1, DGKB, DGKI, DHX16, DIRAS2, DKK4, DLC1, DLD, DLGAP2, DLK2, DLL1, DLX5, DLX6, DMRT1, DMRT2, DMRT3, DMRTA1, DMTF1, DMTN, DNAAF5, DNAH11, DNAH8, DNAI1, DNAJA1, DNAJB5, DNAJB6, DNAJB9, DNAJC2, DNAJC25, DNAJC25-GNG10, DNAJC30, DNAJC5B, DNLZ, DNM1, DNPH1, DOCK4, DOCK5, DOCK8, DOK2, DOLK, DOLPP1, DOPEY1, DPCR1, DPH7, DPM2, DPP6, DPP7, DPPA5, DPY19L1, DPY19L4, DPYS, DPYSL2, DSCC1, DSE, DSP, DST, DTNBP1, DTX2, DUS4L, DUSP22, DUSP26, DUSP4, DXO, DYNC1I1, DYNLT1, E2F3, E2F5, EBAG9, EBF2, ECHDC1, ECI2, ECM2, ECT2L, EDF1, EDN1, EEF1A1, EEF1D, EEF1E1, EEPD1, EFCAB1, EFHC1, EFR3A, EGFL7, EGFL8, EGFR, EGR3, EHMT1, EHMT2, EIF2AK1, EIF3B, EIF3E, EIF3H, EIF4EBP1, EIF4H, ELAVL2, ELFN1, ELMO1, ELN, ELOVL2, ELOVL4, ELOVL5, ELP3, EMC2, EN2, ENDOG, ENG, ENHO, ENPP1, ENPP2, ENPP3, ENPP4, ENPP5, ENTPD2, ENTPD4, ENTPD8, ENY2, EPB41L2, EPB41L4B, EPDR1, EPHA1, EPHA7, EPHB4, EPHB6, EPHX2, EPM2A, EPO, EPPK1, EQTN, ERCC6L2, ERI1, ERICH1, ERICH5, ERLIN2, ERMARD, ERMP1, ERP44, ERV3-1, ERVFRD-1, ERVW-1, ESCO2, ESR1, ESRP1, ESYT2, ETV1, ETV7, EVX1, EXD3, EXOC2, EXOC4, EXOSC2, EXOSC3, EXOSC4, EXT1, EXTL3, EYA1, EYA4, EYS, EZH2, EZR, F13A1, FABP12, FABP4, FABP5, FABP7, FABP9, FAM102A, FAM110B, FAM115A, FAM115C, FAM120A, FAM120AOS, FAM120B, FAM122A, FAM126A, FAM129B, FAM131B, FAM133B, FAM135A, FAM135B, FAM150A, FAM154A, FAM157B, FAM160B2, FAM162B, FAM163B, FAM166A, FAM166B, FAM167A, FAM180A, FAM184A, FAM185A, FAM188B, FAM189A2, FAM200A, FAM205A, FAM206A, FAM20C, FAM214B, FAM217A, FAM219A, FAM220A, FAM221A, FAM221B, FAM229B, FAM26D, FAM26E, FAM26F, FAM3C, FAM46A, FAM49B, FAM50B, FAM65B, FAM69B, FAM71F1, FAM71F2, FAM73B, FAM78A, FAM83A, FAM83B, FAM83H, FAM84B, FAM86B1, FAM86B2, FAM8A1, FAM91A1, FAM92A1, FANCC, FANCE, FANCG, FARS2, FASTK, FAXC, FBP1, FBP2, FBXL13, FBXL18, FBXL4, FBXL6, FBXO10, FBXO16, FBXO24, FBXO25, FBXO30, FBXO32, FBXO43, FBXO5, FBXO9, FBXW2, FBXW5, FCN1, FCN2, FDFT1, FER1L6, FERD3L, FEZF1, FGD2 FGD3, FGF17, FGF20, FGFR1, FGFR1OP, FGL1, FGL2, FHL5, FIBCD1, FIG4, FIGNL1, FILIP1, FIS1, FKBP14, FKBP15, FKBP5, FKBP6, FKBP9, FKBPL, FKTN, FLNC, FLOT1, FNBP1, FNDC1, FNTA, FOCAD, FOXB2, FOXC1, FOXD4, FOXD4L3, FOXD4L4, FOXD4L5, FOXD4L6, FOXE1, FOXF2, FOXH1, FOXK1, FOXO3, FOXP2, FOXP4, FOXQ1, FPGS, FREM1, FRK, FRMD1, FRMD3, FRMPD1, FRRS1L, FRS3, FSBP, FSCN1, FSCN3, FSD1L, FTSJ2, FUBP3, FUCA2, FUT10, FUT7, FUT9, FXN, FYN, FZD1, FZD3, FZD6, FZD9, GABBR1, GABBR2, GABRR1, GABRR2, GADD45G, GAL3ST4, GALNT11, GALNT12, GALNTL5, GALT, GAPVD1, GARNL3, GARS, GAS1, GATA4, GATAD1, GATS, GATSL2, GBA2, GBAS, GBGT1, GBX1, GCC1, GCK, GCLC, GCM1, GCM2, GCNT1, GCNT2, GDA, GDAP1, GDF6, GEM, GET4, GFI1B, GFOD1, GFRA2, GFRAL, GGCT, GGH, GHRHR, GIGYF1, GIMAP1, GIMAP1-GIMAP5, GIMAP2, GIMAP4, GIMAP5, GIMAP6, GIMAP7, GIMAP8, GINM1, GINS4, GJA1, GJA10, GJB7, GJC3, GKAP1, GLCCI1, GLDC, GLE1, GLI3, GLI4, GLIPR2, GLIS3, GLO1, GLP1R, GLT6D1, GLTSCR1L, GLYATL3, GMDS, GML, GMNN, GMPR, GNA12, GNA14, GNAI1, GNAQ, GNAT3, GNB2, GNE, GNG10, GNG11, GNGT1, GNL1, GNMT, GNRH1, GOLGA1, GOLGA2, GOLGA7, GOLM1, GOPC, GOT1L1, GPAA1, GPANK1, GPC2, GPER1, GPIHBP1, GPLD1, GPNMB, GPR107, GPR110, GPR111, GPR115, GPR116, GPR124, GPR126, GPR141, GPR146, GPR20, GPR21, GPR22, GPR31, GPR37, GPR6, GPR63, GPR85, GPRC6A, GPSM1, GPSM3, GPT, GPX5, GPX6, GRB10, GRHL2, GRHPR, GRID2IP, GRIFIN, GRIK2, GRIN1, GRIN3A, GRINA, GRM1, GRM3, GRM4, GRM8, GS1-259H13.2, GSAP, GSDMC, GSDMD, GSN, GSR, GSTA1, GSTA2, GSTA3, GSTA4, GSTA5, GSTK1, GTF2E2, GTF2H4, GTF2H5, GTF2I, GTF2IRD1, GTF2IRD2, GTF2IRD2B, GTF3C4, GTF3C5, GTF3C6, GTPBP10, GTPBP2, GUCA1A, GUCA1B, GUSB, H2AFV, HABP4, HACE1, HAS2, HAUS6, HBP1, HBS1L, HCRTR2, HDAC2, HDAC9, HDDC2, HDGFL1, HDHD3, HEBP2, HECA, HECW1, HEMGN, HEPACAM2, HERPUD2, HEY1, HEY2, HFE, HGC6.3, HGF, HGH1, HGSNAT, HHLA1, HIATL1, HIBADH, HILPDA, HINT2, HINT3, HIP1, HIPK2, HIST1H1A, HIST1H1B, HIST1H1C, HIST1H1D, HIST1H1E, HIST1H1T, HIST1H2AA, HIST1H2AB, HIST1H2AC, HIST1H2AD, HIST1H2AE, HIST1H2AG, HIST1H2AH, HIST1H2AI, HIST1H2AJ, HIST1H2AK, HIST1H2AL, HIST1H2AM, HIST1H2BA, HIST1H2BB, HIST1H2BC, HIST1H2BD, HIST1H2BE, HIST1H2BF, HIST1H2BG, HIST1H2BH, HIST1H2BI, HIST1H2BJ, HIST1H2BK, HIST1H2BL, HIST1H2BM, HIST1H2BN, HIST1H2BO, HIST1H3A, HIST1H3B, HIST1H3C, HIST1H3D, HIST1H3E, HIST1H3F, HIST1H3G, HIST1H3H, HIST1H3I, HIST1H3J, HIST1H4A, HIST1H4B, HIST1H4C, HIST1H4D, HIST1H4E, HIST1H4F, HIST1H4G, HIST1H4H, HIST1H4I, HIST1H4J, HIST1H4K, HIST1H4L, HIVEP1, HIVEP2, HLA-A, HLA-B, HLA-C, HLA-DMA, HLA-DMB, HLA-DOA, HLA-DOB, HLA-DPA1, HLA-DPB1, HLA-DQA1, HLA-DQA2, HLA-DQB1, HEA-DQB2, HLA-DRA, HLA-DRB1, HLA-DRB5, HLA-E, HLA-F, HLA-G, HMBOX1, HMCN2, HMGA1, HMGCLL1, HMGN3, HMGN4, HNF4G, HNRNPA2B1, HNRNPK, HOOK3, HOXA1, HOXA10, HOXA11, HOXA13, HOXA2, HOXA3, HOXA4, HOXA5, HOXA6, HOXA7, HOXA9, HR, HRCT1, HRSP12, HS3ST5, HSD17B3, HSD17B8, HSDL2, HSF1, HSF2, HSP90AB1, HSPA1A, HSPA1B, HSPA1L, HSPA5, HSPB1, HTR1B, HTR1E, HTR5A, HTRA4, HUS1, HUS1B, HYAL4, IARS, IBTK, ICA1, ICK, ID4, IDNK, IDO1, IDO2, IER3, IER5L, IFNA1, IFNA10, IFNA13, IFNA14, IFNA16, IFNA17, IFNA2, IFNA21, IFNA4, IFNA5, IFNA6, IFNA7, IFNA8, IFNB1, IFNE, IFNGR1, IFNK, IFNW1, IFRD1, IFT22, IFT74, IGF2BP3, IGF2R, IGFBP1, IGFBP3, IGFBPL1, IKBKAP, IKBKB, IKZF1, IL11RA, IL17A, IL17F, IL20RA, IL22RA2, IL33, IL6, IL7, IMMP2L, IMPA1, IMPAD1, IMPDH1, IMPGL1, ING3, INHBA, INIP, INMT, INPP5E, INSIG1, INSL4, INSL6, INTS1, INTS10, INTS8, INTS9, INVS, IP6K3, IPCEF1, IPPK, IQCE, IQUB, IRAK1BP1, IRF4, IRF5, ISCA1, ISPD, ITGB8, ITPR3, IYD, IZUMO3, JAK2, JARID2, JAZF1, JPH1, JRK, KAAG1, KANK1, KAT6A, KATNA1, KBTBD11, KBTBD2, KCNB2, KCND2, KCNH2, KCNK16, KCNK17, KCNK5, KCNK9, KCNQ3, KCNQ5, KCNS2, KCNT1, KCNU1, KCNV1, KCNV2, KCP, KCTD20, KCTD7, KCTD9, KDELR2, KDM1B, KDM4C, KDM7A, KEL, KHDC1, KHDC1L, KHDC3L, KHDRBS2, KHDRBS3, KIAA0020, KIAA0196, KIAA0319, KIAA0368, KIAA0408, KIAA0895, KIAA1045, KIAA1147, KIAA1161, KIAA1244, KIAA1324L, KIAA1429, KIAA1456, KIAA1549, KIAA1586, KIAA1919, KIAA1958, KIAA2026, KIF12, KIF13A, KIF13B, KIF24, KIF25, KIF27, KIF6, KIFC1, KIFC2, KLC4, KLF10, KLF14, KLF4, KLF9, KLHDC10, KLHDC3, KLHL31, KLHL32, KLHL38, KLHL7, KLHL9, KLRG2, KMT2C, KMT2E, KPNA5, KPNA7, KRBA1, KRIT1, L3MBTL3, LACE1, LACTB2, LAMA2, LAMA4, LAMB1, LAMB4, LAMC3, LAMTOR4, LANCL2, LAPTM4B, LAT2, LATS1, LCA5, LCN1, LCN10, LCN12, LCN15, LCN2, LCN6, LCN8, LCN9, LCNL1, LEMD2, LEP, LEPROTL1, LETM2, LFNG, LGI3, LGSN, LHFPL3, LHFPL5, LHX2, LHX3, LHX6, LIMK1, LIN28B, LINGO2, LMBR1, LMBRD1, LMOD2, LMTK2, LMX1B, LOC100130357, LOC100130705, LOC100130880, LOC100133267, LOC100289561, LOC100505478, LOC100506422, LOC100507462, LOC100996634, LOC154872, LOC158434, LOC286238, LOC389602, LOC441155, LOC554223, LOC93432, LONRF1, LOXL2, LPA, LPAR1, LPL, LPPR1, LRCH4, LRFN2, LRGUK, LRP11, LRP12, LRRC1, LRRC14, LRRC16A, LRRC17, LRRC19, LRRC24, LRRC26, LRRC4, LRRC6, LRRC61, LRRC69, LRRC72, LRRC73, LRRC8A, LRRCC1, LRRD1, LRRN3, LRSAM1, LRWD1, LSM1, LSM2, LSM5, LSM8, LSMEM1, LST1, LTA, LTB, LTV1, LUC7L2, LURAP1L, LUZP6, LY6D, LY6E, LY6G5B, LY6G5C, LY6G6C, LY6G6D, LY6G6F, LY6H, LY6K, LY86, LY96, LYN, LYNX1, LYPD2, LYPLA1, LYRM2, LYRM4, LZTS1, MACC1, MAD1L1, MAD2L1BP, MAF1, MAFA, MAFK, MAGI2, MAK, MAK16, MAL2, MALSU1, MAMDC2, MAMDC4, MAN1A1, MAN1B1, MANEA, MAP3K4, MAP3K5, MAP3K7, MAP7, MAPK13, MAPK14, MAPK15, MAPKAP1, MARCKS, MAS1, MAS1L, MATN2, MB21D1, MBLAC1, MBOAT1, MBOAT4, MCCD1, MCHR2, MCM3, MCM4, MCM7, MCM9, MCMDC2, MCPH1, MCUR1, MDC1, MDFI, MDFIC, MDGA1, MDH2, MDN1, ME1, MEA1, MED20, MED22, MED23, MED27, MED30, MEGF9, MEI4, MELK, MEOX2, MEP1A, MEPCE, MEST, MET, METTL24, METTL2B, MFHAS1, MFSD3, MGAM, MGC50722, MICA, MICAL1, MICALL2, MICB, MICU3, MIOS, MKLN1, MKRN1, MLANA, MLIP, MLLT3, MLLT4, MLN, MLXIPL, MMD2, MMP16, MMS22L, MNX1, MOB3B, MOCS1, MOG, MOGAT3, MORN5, MOS, MOSPD3, MOXD1, MPC1, MPDZ, MPLKIP, MPP6, MRAP2, MROH1, MROH5, MROH6, MRPL13, MRPL14, MRPL15, MRPL18, MRPL2, MRPL32, MRPL41, MRPL50, MRPS10, MRPS17, MRPS18A, MRPS18B, MRPS2, MRPS24, MRPS28, MRPS33, MRRF, MRS2, MSANTD3, MSANTD3-TMEFF1, MSC, MSH5, MSMP, MSR1, MSRA, MTAP, MTBP, MTCH1, MTDH, MTERF1, MTERF3, MTFR1, MTFR2, MTHFD1L, MTMR7, MTMR9, MTO1, MTPN, MTRF1L, MTRNR2L6, MTRNR2L9, MTSS1, MTURN, MTUS1, MUC12, MUC17, MUC21, MUC22, MUC3A, MURC, MUSK, MUT, MVB12B, MYB, MYBL1, MYC, MYCT1, MYL10, MYL7, MYLIP, MYLK4, MYO1G, MYO6, MYOM2, NAA35, NACAD, NACC2, NAIF1, NAMPT, NANS, NAPEPLD, NAPRT, NAT1, NAT16, NAT2, NBN, NCALD, NCAPG2, NCBP1, NCF1, NCOA2, NCOA7, NCR2, NCR3, NCS1, NDOR1, NDRG1, NDUFA4, NDUFA5, NDUFA8, NDUFAF4, NDUFAF6 NDUFB2, NDUFB6, NDUFB9, NECAB1, NEDD9, NEFL, NEFM, NEIL2, NEK6, NELFB, NELFE, NEU1, NEUROD6, NFE2L3, NFE4, NFIB, NFIL3, NFKBIE, NFKBIL1, NFX1, NFYA, NHLRC1, NHSL1, NINJ1, NIPAL2, NIPSNAP3A, NIPSNAP3B, NKAIN2, NKAIN3, NKAPL, NKX2-6, NKX3-1, NKX6-3, NMBR, NME8, NMRK1, NOBOX, NOD1, NOL6, NOL7, NOL8, NOM1, NOS3, NOTCH1, NOTCH4, NOV, NOX3, NOXA1, NPBWR1, NPC1L1, NPDC1, NPM2, NPR2, NPSR1, NPTX2, NPVF, NPY, NQO2, NR2E1, NR4A3, NR5A1, NR6A1, NRARP, NRBP2, NRCAM, NRF1, NRG1, NRM, NRN1, NRSN1, NSMAF, NSMCE2, NSMF, NSUN5, NT5C3A, NT5DC1, NT5E, NTMT1, NTNG2, NTRK2, NUB1, NUDCD1, NUDCD3, NUDT1, NUDT18, NUDT2, NUDT3, NUGGC, NUP153, NUP188, NUP205, NUP214, NUP43, NUPL2, NUPR1L, NUS1, NUTM2F, NUTM2G, NXNL2, NXPH1, NYAP1, OARD1, OBP2A, OBP2B, OC90, OCM, OCM2, ODF1, ODF2, OGDH, OGFRL1, OGN, OLFM1, OLFML2A, OLIG3, OMD, OOEP, OPLAH, OPN1SW, OPN5, OPRK1, OPRM1, OR10C1, OR11A1, OR12D2, OR12D3, OR13C2, OR13C3, OR13C4, OR13C5, OR13C8, OR13C9, OR13D1, OR13J1, OR14J1, OR1B1, OR1J1, OR1J2, OR1J4, OR1K1, OR1L1, OR1 L3, OR1L4, OR1L6, OR1L8, OR1N1, OR1N2, OR1Q1, OR2A1, OR2A12, OR2A14, OR2A2, OR2A25, OR2A4, OR2A42, OR2A5, OR2A7, OR2AE1, OR2B2, OR2B3, OR2B6, OR2F1, OR2F2, OR2H1, OR2H2, OR2J2, OR2J3, OR2K2, OR2S2, OR2W1, OR4F21, OR5C1, OR5V1, OR6B1, OR6V1, OR9A2, OR9A4, ORAI2, ORC3, ORC5, ORM1, ORM2, OSBPL3, OSGIN2, OSR2, OSTF1, OSTM1, OTUD6B, OXR1, PABPC1, PACRG, PACSIN1, PAEP, PAG1, PAK1IP1, PALM2, PALM2-AKAP2, PAPOLB, PAPPA, PAQR8, PARK2, PARP10, PARP12, PAX4, PAX5, PAXIP1, PBK, PBOV1, PBX2, PBX3, PCLO, PCM1, PCMT1, PCMTD1, PCOLCE, PCSK5, PDAP1, PDCD1LG2, PDCD2, PDCL, PDE10A, PDE1C, PDE7A, PDE7B, PDGFA, PDGFRL, PDIA4, PDK4, PDLIM2, PDP1, PDSS2, PEBP4, PEG10, PENK, PERP, PEX1, PEX2, PEX3, PEX6, PEX7, PFDN6, PGAM2, PGBD1, PGC, PGK2, PGM3, PGM5, PHACTR1, PHACTR2, PHF1, PHF10, PHF14, PHF19, PHF2, PHF20L1, PHF3, PHIP, PHKG1, PHPT1, PHTF2, PHYHD1, PHYHIP, PI15, PI16, PIGO, PIK3CG, PILRA, PILRB, PIM1, PINX1, PIP, PIP5K1B, PIP5KL1, PIWIL2, PKD1L1, PKHD1, PKHD1L1, PKIA, PKIB, PKN3, PLA2G7, PLAA, PLAG1, PLAGL1, PLAT, PLEC, PLEKHA2, PLEKHA8, PLEKHF2, PLEKHG1, PLG, PLGRKT, PLIN2, PLN, PLOD3, PLXNA4, PM20D2, PMP2, PMPCA, PMPCB, PMS2, PNISR, PNLDC1, PNMA2, PNOC, PNPLA1, PNPLA7, PNPLA8, PNRC1, PODXL, POLB, POLD2, POLE3, POLH, POLM, POLR1C, POLR1E, POLR2J, POLR2J2, POLR2J3, POLR2K, POLR3D, POM121, POM121C, POM121L12, POM121L2, POMK, POMT1, POMZP3, PON1, PON2, PON3, POP1, POP7, POPDC3, POR, POT1, POTEA, POU3F2, POU5F1, POU5F1B, POU6F2, PPAPDC1B, PPAPDC2, PPAPDC3, PPARD, PPIA, PPIL1, PPIL4, PPIL6, PPP1R10, PPP1R11, PPP1R14C, PPP1R16A, PPP1R17, PPP1R18, PPP1R26, PPP1R35, PPP1R3A, PPP1R3B, PPP1R3G, PPP1R42, PPP1R9A, PPP2CB, PPP2R2A, PPP2R4, PPP2R5D, PPP3CC, PPP3R2, PPP6C, PPT2, PRDM1, PRDM12, PRDM13, PRDM14, PREP, PREX2, PRICKLE4, PRIM2, PRKACG, PRKAG2, PRKAR1B, PRKAR2B, PRKDC, PRKRIP1, PRL, PROSC, PRPF4, PRPF4B, PRPH2, PRPS1L1, PRR15, PRR18, PRR23D1, PRR23D2, PRR3, PRRC2A, PRRC2B, PRRT1, PRRT4, PRRX2, PRSS1, PRSS16, PRSS2, PRSS3, PRSS35, PRSS37, PRSS55, PRSS58, PRUNE2, PSAT1, PSCA, PSD3, PSIP1, PSKH2, PSMA2, PSMB1, PSMB7, PSMB8, PSMB9, PSMC2, PSMD5, PSMG3, PSMG4, PSORS1C1, PSORS1C2, PSPH, PTAR1, PTBP3, PTCD1, PTCH1, PTCHD4, PTCRA, PTDSS1, PTGDS, PTGES, PTGES2, PTGR1, PTGS1, PTK2, PTK2B, PTK7, PTN, PTP4A1, PTP4A3, PTPDC1, PTPLAD2, PTPN12, PTPN3, PTPRD, PTPRK, PTPRN2, PTPRZ1, PTRH1, PUF60, PURB, PURG, PUS7, PVRIG, PXDC1, PXDNL, PXT1, PYCRL, QKI, QRFP, QRSL1, QSOX2, R3HCC1, RAB11FIP1, RAB14, RAB19, RAB23, RAB2A, RAB32, RAB44, RABEPK, RABGAP1, RABGEF1, RABL6, RAC1, RAD21, RAD23B, RAD54B, RADIL, RAET1E, RAET1G, RAET1L, RALA, RALGDS, RALGPS1, RALYL, RAMP3, RANBP6, RANBP9, RAPGEF1, RAPGEF5, RARRES2, RARS2, RASA4, RASA4B, RASEF, RB1CC1, RBAK, RBAK-RBAKDN, RBM12B, RBM18, RBM24, RBM28, RBM33, RBM48, RBPMS, RC3H2, RCAN2, RCL1, RDH10, RECK, RECQL4, REEP4, RELN, REPIN1, REPS1, REV3L, REXO4, RFC2, RFK, RFPL4B, RFX3, RFX6, RGL2, RGP1, RGS17, RGS20, RGS22, RGS3, RHAG, RHBDD2, RHEB, RHOBTB2, RHPN1, RIC1, RIMS1, RIMS2, RING1, RINT1, RIOK1, RIPK1, RIPK2, RIPPLY2, RLN1, RLN2, RMDN1, RMI1, RMND1, RNASET2, RNF122, RNF133, RNF139, RNF144B, RNF146, RNF148, RNF170, RNF182, RNF183, RNF19A, RNF20, RNF208, RNF216, RNF217, RNF224, RNF32, RNF38, RNF39, RNF5, RNF8, RNGTT, ROR2, RORB, ROS1, RP1, RP1L1, RP9, RPA3, RPF2, RPL10A, RPL12, RPL30, RPL35, RPL7, RPL7A, RPL7L1, RPL8, RPP21, RPP25L, RPP40, RPS10, RPS10-NUDT3, RPS12, RPS18, RPS20, RPS6, RPS6KA2, RRAGA, RRAGD, RREB1, RRM2B, RRP36, RRS1, RSBN1L, RSPH10B, RSPH10B2, RSPH3, RSPH4A, RSPH9, RSPO2, RSPO3, RTN4IP1, RUNDC3B, RUNX1T1, RUNX2, RUSC2, RWDD1, RWDD2A, RXRA, RXRB, S1PR3, SAMD12, SAMD3, SAMD5, SAMD9, SAMD9L, SAP25, SAPCD1, SAPCD2, SARAF, SARDH, SASH1, SAYSD1, SBDS, SBSPON, SCAF8, SCAI, SCARA3, SCARA5, SCGN, SCIN, SCML4, SCRIB, SCRN1, SCRT1, SCUBE3, SCX, SDC2, SDCBP, SDCCAG3, SDK1, SDR16C5, SEC16A, SEC61B, SEC61G, SEC63, SECISBP2, SEMA3A, SEMA3C, SEMA3D, SEMA3E, SEMA4D, SENP6, SEPT14, SEPT7, SERAC1, SERINC1, SERPINB1, SERPINB6, SERPINB9, SERPINE1, SESN1, SET, SETX, SF3B5, SFRP1, SFRP4, SFT2D1, SFTA2, SFTPC, SGCE, SGCZ, SGK1, SGK223, SGK3, SH2B2, SH2D3C, SH2D4A, SH3BGRL2, SH3GL2, SH3GLB2, SHARPIN, SHB, SHC3, SHFM1, SHH, SHPRH, SIGMAR1, SIM1, SIRT5, SIT1, SKAP2, SKIV2L, SLA, SLC10A5, SLC12A9, SLC13A1, SLC13A4, SLC16A10, SLC17A1, SLC17A2, SLC17A3, SLC17A4, SLC17A5, SLC18A1, SLC18B1, SLC1A1, SLC20A2, SLC22A1, SLC22A16, SLC22A2, SLC22A23, SLC22A3, SLC22A7, SLC24A2, SLC25A13, SLC25A25, SLC25A27, SLC25A32, SLC25A37, SLC25A40, SLC25A51, SLC26A3, SLC26A4, SLC26A5, SLC26A7, SLC26A8, SLC27A4, SLC28A3, SLC29A1, SLC29A4, SLC2A12, SLC2A6, SLC2A8, SLC30A8, SLC31A1, SLC31A2, SLC34A3, SLC35A1, SLC35B2, SLC35B3, SLC35B4, SLC35D2, SLC35D3, SLC35F1, SLC35G5, SLC37A3, SLC39A14, SLC39A4, SLC39A7, SLC44A1, SLC44A4, SLC45A4, SLC46A2, SLC4A2, SLC52A2, SLC7A13, SLC7A2, SLCO5A1, SLURP1, SMAP1, SMARCA2, SMARCD3, SMC2, SMC5, SMIM13, SMIM18, SMIM19, SMIM8, SMKR1, SMLR1, SMO, SMOC2, SMPD2, SMPDL3A, SMU1, SMURF1, SNAI2, SNAP91, SNAPC3, SNAPC4, SND1, SNRNP48, SNRPC, SNTB1, SNTG1, SNX10, SNX13, SNX14, SNX16, SNX3, SNX30, SNX31, SNX8, SNX9, SOBP, SOD2, SOGA3, SOHLH1, SORBS3, SOSTDC1, SOX17, SOX4, SOX7, SP4, SP8, SPACA1, SPAG1, SPAG11A, SPAG11B, SPAG8, SPAM1, SPATA31A1, SPATA31A3, SPATA31A5, SPATA31A6, SPATA31A7, SPATA31C1, SPATA31C2, SPATA31D1, SPATA31D3, SPATA31D4, SPATA31E1, SPATA6L, SPATC1, SPATS1, SPDEF, SPDYE1, SPDYE2, SPDYE2B, SPDYE3, SPDYE5, SPDYE6, SPIDR, SPIN1, SPINK4, SPTAN1, SPTLC1, SQLE, SRF, SRI, SRPK1, SRPK2, SRRM3, SRRT, SRSF12, SRSF3, SSBP1, SSC4D, SSMEM1, SSNA1, SSPO, SSR1, ST18, ST3GAL1, ST6GALNAC4, ST6GALNAC6, ST7, STAG3, STAR, STARD3NL, STAU2, STC1, STEAP1, STEAP1B, STEAP2, STEAP4, STK17A, STK19, STK3, STK31, STK38, STKLD1, STMN2, STMN4, STMND1, STOM, STOML2, STRA8, STRBP, STRIP2, STX11, STX17, STX1A, STX7, STXBP1, STXBP5, STYXL1, SUGCT, SULF1, SUMF2, SUMO4, SUN1, SUN3, SUPT3H, SURF1, SURF2, SURF4, SURF6, SUSD1, SUSD3, SVEP1, SVOPL, SWI5, SYBU, SYCP2L, SYK, SYNCRIP, SYNE1, SYNGAP1, SYNJ2, SYPL1, SYTL3, T, TAAR1, TAAR2, TAAR5, TAAR6, TAAR8, TAAR9, TAB2, TAC1, TACC1, TAF11, TAF1L, TAF2, TAF6, TAF8, TAGAP, TAL2, TAP1, TAP2, TAPBP, TARP, TAS2R16, TAS2R3, TAS2R38, TAS2R39, TAS2R4, TAS2R40, TAS2R41, TAS2R5, TAS2R60, TATDN1, TAX1BP1, TBC1D13, TBC1D2, TBCID22B, TBC1D31, TBCID32, TBC1D7, TBCC, TBL2, TBP, TBPL1, TBRG4, TBX18, TBX20, TBXAS1, TCEA1, TCEB1, TCF19, TCF21, TCF24, TCP1, TCP10, TCP10L2, TCP11, TCTE1, TCTE3, TDP2, TDRD6, TDRD7, TDRP, TEAD3, TECPR1, TEK, TERF1, TES, TESK1, TEX10, TEX15, TFAP2A, TFAP2B, TFAP2D, TFB1M, TFEB, TFEC, TFPI2, TFR2, TG, TGFBR1, TGS1, THAP1, THAP5, THBS2, THEM6, THEMIS, THSD7A, TIAM2, TIGD5, TINAG, TJAP1, TJP2, TLE1, TLE4, TLN1, TLR4, TM2D2, TMC1, TMED4, TMEFF1, TMEM106B, TMEM120A, TMEM130, TMEM139, TMEM140, TMEM141, TMEM14A, TMEM14B, TMEM14C, TMEM151B, TMEM168, TMEM170B, TMEM176A, TMEM176B, TMEM178B, TMEM181, TMEM184A, TMEM196, TMEM2, TMEM200A, TMEM203, TMEM209, TMEM210, TMEM213, TMEM215, TMEM217, TMEM229A, TMEM242, TMEM243, TMEM244, TMEM245, TMEM246, TMEM248, TMEM249, TMEM252, TMEM261, TMEM30A, TMEM38B, TMEM55A, TMEM60, TMEM63B, TMEM64, TMEM65, TMEM67, TMEM68, TMEM70, TMEM71, TMEM74, TMEM8B, TMEM8C, TMOD1, TMUB1, TNC, TNF, TNFAIP3, TNFRSF10A, TNFRSF10B, TNFRSF10C, TNFRSF10D, TNFRSF11B, TNFRSF21, TNFSF15, TNFSF8, TNKS, TNPO3, TNRC18, TNS3, TNXB, TOMM5, TOMM6, TOMM7, TONSL, TOP1MT, TOPORS, TOR1A, TOR1B, TOR2A, TOR4A, TOX, TP53INP1, TPBG, TPD52, TPD52L1, TPD52L3, TPK1, TPM2, TPMT, TPRN, TPST1, TRA2A, TRAF1, TRAF2, TRAF3IP2, TRAM1, TRAM2, TRAPPC3L, TRAPPC9, TRDN, TREM1, TREM2, TREML1, TREML2, TREML4, TRERF1, TRHR, TRIB1, TRIL, TRIM10, TRIM14, TRIM15, TRIM24, TRIM26, TRIM27, TRIM31, TRIM32, TRIM35, TRIM38, TRIM39, TRIM39-RPP21, TRIM4, TRIM40, TRIM50, TRIM55, TRIM56, TRIM73, TRIM74, TRIP6, TRIQK, TRMT10B, TRMT11, TRMT12, TRPA1, TRPM3, TRPM6, TRPS1, TRPV5, TRPV6, TRRAP, TRUB2, TSC1, TSC22D4, TSGA13, TSNARE1, TSPAN12, TSPAN13, TSPAN33, TSPO2, TSPYL1, TSPYL4, TSPYL5, TSTA3, TSTD2, TSTD3, TTBK1, TTC16, TTC26, TTC39B, TTF1, TTF2, TTK, TTLL11, TTLL2, TTPA, TTYH3, TUBB, TUBB2A, TUBB2B, TUBB4B, TUBE1, TULP1, TULP4, TUSC1, TUSC3, TWIST1, TWISTNB, TXLNB, TXN, TXNDC5, TXNDC8, TYRP1, TYW1, TYW1B, UARIL1, UBAC1, UBAP1, UBAP2, UBD, UBE2D4, UBE2H, UBE2J1, UBE2R2, UBE2V2, UBE2W, UBE3C, UBE3D, UBN2, UBQLN1, UBR2, UBR5, UBXN2B, UBXN8, UCK1, UFL1, UFSP1, UGCG, UHRF1BP1, UHRF2, ULBP1, ULBP2, ULBP3, UMAD1, UNC13B, UNC5CL, UNC5D, UNC93A, UNCX, UPK3B, UPK3BL, UPP1, UQCC2, UQCRB, URGCP, URGCP-MRPS24, URM1, USP17L1, USP17L2, USP17L3, USP17L4, USP17L7, USP17L8, USP20, USP42, USP45, USP49, UST, UTP23, UTRN, VARS, VARS2, VAV2, VCP, VCPIP1, VDAC3, VEGFA, VGF, VGLL2, VIP, VIPR2, VKORC1L1, VLDLR, VNN1, VNN2, VNN3, VOPP1, VPS13A, VPS13B, VPS28, VPS37A, VPS37D, VPS41, VPS52, VSTM2A, VTA1, VWA7, VWC2, VWDE, WASF1, WASH1, WASL, WBSCR16, WBSCR17, WBSCR22, WBSCR27, WBSCR28, WDR27, WDR31, WDR34, WDR38, WDR46, WDR5, WDR60, WDR86, WDR91, WDYHV1, WEE2, WHSC1L1, WI2-2373I1.2, WIPF3, WIP12, WISP1, WISP3, WNK2, WNT16, WNT2, WRN, WRNIP1, WTAP, WWP1, XKR4, XKR5, XKR6, XKR9, XPA, XPO5, XPO7, XRCC2, YAE1D1, YIPF3, YKT6, YTHDF3, YWHAG, YWHAZ, ZAN, ZASP, ZBED6CL, ZBED9, ZBTB10, ZBTB12, ZBTB2, ZBTB22, ZBTB24, ZBTB26, ZBTB34, ZBTB43, ZBTB5, ZBTB6, ZBTB9, ZC2HC1A, ZC2HC1 B, ZC3H12D, ZC3H3, ZC3HAV1, ZC3HAV1L, ZC3HC1, ZCCHC6, ZCCHC7, ZCWPW1, ZDHHC12, ZDHHC14, ZDHHC2, ZDHHC21, ZDHHC4, ZER1, ZFAND1, ZFAND2A, ZFAND3, ZFAND5, ZFAT, ZFHX4, ZFP37, ZFP41, ZFP57, ZFPM2, ZHX1, ZHX1-C8orf76, ZHX2, ZKSCAN1, ZKSCAN3, ZKSCAN4, ZKSCAN5, ZKSCAN8, ZMAT4, ZMIZ2, ZMYND19, ZNF107, ZNF117, ZNF12, ZNF138, ZNF16, ZNF165, ZNF169, ZNF184, ZNF189, ZNF212, ZNF250, ZNF251, ZNF273, ZNF277, ZNF282, ZNF292, ZNF3, ZNF311, ZNF316, ZNF318, ZNF322, ZNF34, ZNF367, ZNF391, ZNF394, ZNF395, ZNF398, ZNF425, ZNF451, ZNF462, ZNF467, ZNF479, ZNF483, ZNF484, ZNF510, ZNF517, ZNF572, ZNF596, ZNF618, ZNF623, ZNF655, ZNF658, ZNF679, ZNF680, ZNF696, ZNF7, ZNF703, ZNF704, ZNF705B, ZNF705D, ZNF705G, ZNF706, ZNF707, ZNF713, ZNF716, ZNF727, ZNF735, ZNF736, ZNF746, ZNF76, ZNF775, ZNF777, ZNF782, ZNF783, ZNF786, ZNF789, ZNF79, ZNF800, ZNF804B, ZNF853, ZNF862, ZNF883, ZNF92, ZNHIT1, ZNRD1, ZNRF2, ZP3, ZPBP, ZSCAN12, ZSCAN16, ZSCAN21, ZSCAN23, ZSCAN25, ZSCAN26, ZSCAN31, ZSCAN9, ZUFSP and ZYX; target genes located on chromosomes 10-13 including A1CF, A2M, A2ML1, AAAS, AACS, AAMDC, AASDHPPT, ABCB9, ABCC2, ABCC4, ABCC8, ABCC9, ABCD2, ABCG4, ABHD13, ABI1, ABLIM1, ABTB2, ACACB, ACAD10, ACAD8, ACADS, ACADSB, ACAT1, ACBD5, ACBD7, ACCS, ACCSL, ACER3, ACP2, ACRBP, ACRV1, ACSL5, ACSM4, ACSM6, ACSS3, ACTA2, ACTN3, ACTR1A, ACTR6, ACVR1B, ACVRL1, ACY3, ADAM12, ADAM8, ADAMTS14, ADAMTS15, ADAMTS20, ADAMTS8, ADARB2, ADCY6, ADD3, ADIPOR2, ADIRF, ADK, ADM, ADO, ADPRHL1, ADRA2A, ADRB1, ADRBK1, AEBP2, AFAP1L2, AGAP11, AGAP2, AGAP4, AGAP5, AGAP6, AGAP7P, AGAP9, AGBL2, AHNAK, AJCDA, AIFM2, AIP, AKAP11, AKAP3, AKIP1, AKR1C1, AKR1C2, AKR1C3, AKR1C4, AKR1E2, ALDH18A1, ALDH1L2, ALDH2, ALDH3B1, ALDH3B2, ALG10, ALG10B, ALG11, ALG5, ALG8, ALG9, ALKBH2, ALKBH3, ALKBH8, ALOX5, ALOX5AP, ALX1, ALX4, AMBRA1, AMDHD1, AMER2, AMHR2, AMICA1, AMIGO2, AMN1, AMOTL1, AMPD3, ANAPC15, ANAPC16, ANAPC5, ANAPC7, ANGPTL5, ANHX, ANK3, ANKK1, ANKLE2, ANKRD1, ANKRD10, ANKRD13A, ANKRD13D, ANKRD16, ANKRD2, ANKRD22, ANKRD26, ANKRD30A, ANKRD33, ANKRD42, ANKRD49, ANKRD52, ANKS1B, ANO1, ANO2, ANO3, ANO4, ANO5, ANO6, ANO9, ANP32D, ANTXRL, ANXA11, ANXA7, ANXA8, ANXA8L1, AP2A2, AP3M1, AP5B1, APAF1, APBB1, APBB1IP, API5, APIP, APLNR, APLP2, APOA1, APOA4, APOA5, APOBEC1, APOC3, APOF, APOLD1, APPL2, AQP11, AQP2, AQP5, AQP6, ARAP1, ARCN1, ARF3, ARFGAP2, ARFIP2, ARGLU1, ARHGAP1, ARHGAP12, ARHGAP19, ARHGAP20, ARHGAP21, ARHGAP22, ARHGAP32, ARHGAP42, ARHGAP9, ARHGDIB, ARHGEF12, ARHGEF17, ARHGEF25, ARHGEF7, ARID2, ARID5B, ARL1, ARL11, ARL14EP, ARL2, ARL3, ARL5B, ARL6IP4, ARMC3, ARMC4, ARMS2, ARNTL, ARNTL2, ARPC3, ARRB1, ART1, ART4, ART5, AS3MT, ASAH2, ASAH2B, ASB13, ASB8, ASCC1, ASCL1, ASCL2, ASCL3, ASCL4, ASIC1, ASRGL1, ASUN, ATAD1, ATE1, ATF1, ATF7, ATF7IP, ATG101, ATG13, ATG16L2, ATG2A, ATHL1, ATL3, ATM, ATN1, ATOH7, ATP11A, ATP11AUN, ATP12A, ATP2A2, ATP2B1, ATP4B, ATP5B, ATP5C1, ATP5G2, ATP5L, ATP6V0A2, ATP7B, ATP8A2, ATRNL1, ATXN2, ATXN7L3B, AVIL, AVPI1, AVPR1 A, B3GALTL, B3GAT1, B3GAT3, B3GNT1, B3GNT4, B3GNT6, B4GALNT1, B4GALNT3, B4GALNT4, BACE1, BAD, BAG3, BAMBI, BANF1, BARX2, BATF2, BAZ2A, BBIP1, BBOX1, BBS1, BBS10, BCAT1, BCCIP, BCDIN3D, BCL2L14, BCL7A, BCL9L, BCO2, BDNF, BEND7, BEST1, BEST3, BET1L, BHLHE41, BICC1, BICD1, BIN2, BIRC2, BIRC3, BIVM, RIVM-ERCC5, BLID, BLNK, BLOC1S1, BLOC1S2, BMI1, BMPR1A, RMS1, BNIP3, BORA, BRAP, BRCA2, BRI3BP, BRMS1, BRSK2, BSCL2, BSX, BTAF1, BTBD10, BTBD11, BTBD16, BTBD18, BTG1, BTG4, BTRC, BUB3, BUD13, C10orf10, C10orf105, C10orf107, C10orf11, C10orf111, C10orf113, C10orf12, C10orf120, C10orf126, C10orf128, C10orf131, C10orf2, C10orf25, C10orf32, C10orf3 5, C10orf53, C10orf54, C10orf5 5, C10orf62, C10orf67, C10orf71, C10orf76, C10orf82, C10orf88, C10orf90, C10orf91, C10orf95, C10orf99, C11orf1, C11orf16, C11orf21, C11orf24, C11orf30, C11orf31, C11orf40, C11orf42, C11orf44, C11orf45, C11orf49, C11orf52, C11orf53, C11orf54, C11orf57, C11orf58, C11orf63, C11orf65, C11orf68, C11orf70, C11orf71, C11orf73, C11orf74, C11orf80, C11orf84, C11orf85, C11orf86, C11orf87, C11orf88, C11orf91, C11orf94, C11orf95, C11orf96, C11orf97, C11orf98, C12orf10, C12orf29, C12orf4, C12orf40, C12orf42, C12orf43, C12orf45, C12orf49, C12orf5, C12orf50, C12orf54, C12orf56, C12orf57, C12orf60, C12orf65, C12orf66, C12orf71, C12orf73, C12orf74, C12orl75, C12orf76, C12orf77, C12orf79, C12orf80, C1QL3, C1QL4, C1QTNF4, C1QTNF5, C1QTNT9, C1QTNT9B, C1QTNT9B-AS1, C1R, C1RL, C1S, C2CD2L, C2CD3, C2CD5, C3AR1, CAB39L, CABP1, CABP2, CABP4, CACNA1C, CACNA2D4, CACNB2, CACNB3, CACUL1, CADM1, CALCA, CALCB, CALCOCO1, CALHM1, CALHM2, CALHM3, CALML3, CALML5, CALY, CAMK1D, CAMK2G, CAMKK2, CAND1, CAPN1, CAPN5, CAPRIN1, CAPRIN2, CAPS2, CAPZA3, CARD16, CARD17, CARD18, CARKD, CARNS1, CARS, CARS2, CASC1, CASC10, CASP1, CASP12, CASP4, CASP5, CASP7, CAT, CATSPER1, CBL, CBX5, CC2D2B, CCAR1, CCDC122, CCDC15, CCDC153, CCDC168, CCDC169, CCDC169-SOHLH2, CCDC172, CCDC179, CCDC184, CCDC186, CCDC3, CCDC34, CCDC38, CCDC42B, CCDC53, CCDC59, CCDC6, CCDC60, CCDC62, CCDC63, CCDC64, CCDC65, CCDC67, CCDC7, CCDC70, CCDC73, CCDC77, CCDC81, CCDC82, CCDC83, CCDC84, CCDC85B, CCDC86, CCDC87, CCDC88B, CCDC89, CCDC90B, CCDC91, CCDC92, CCER1, CCKBR, CCNA1, CCND1, CCND2, CCNJ, CCNT1, CCNY, CCS, CCSER2, CCT2, CD151, CD163, CD163L1, CD248, CD27, CD3D, CD3E, CD3G, CD4, CD44, CD5, CD59, CD6, CD63, CD69, CD81, CD82, CD9, CDADC1, CDC123, CDC16, CDC42BPG, CDC42EP2, CDCA3, CDCA5, CDH23, CDHR1, CDHR5, CDK1, CDK17, CDK2, CDK2AP1, CDK2AP2, CDK4, CDK8, CDKN1B, CDKN1C, CDNF, CDON, CDX2, CELA1, CELF1, CELF2, CEND1, CENPJ, CEP164, CEP290, CEP295, CEP55, CEP57, CEP83, CERS5, CFAP43, CFAP46, CFAP58, CFAP70, CH25H, CHAMP1, CHAT, CHCHD1, CHD4, CHEK1, CHFR, CHID1, CHKA, CHORDC1, CHPT1, CHRDL2, CHRM1, CHRM4, CHRNA10, CHST1, CHST11, CHST15, CHST3, CHUK, CISD1, CIT, CKAP2, CKAP4, CKAP5, CLCF1, CLDN10, CLDN25, CLEC12A, CLEC12B, CLEC1A, CLEC1B, CLEC2A, CLEC2B, CLEC2D, CLEC4A, CLEC4C, CLEC4D, CLEC4E, CLEC6A, CLEC7A, CLEC9A, CLECL1, CLIP1, CLLU1, CLLU1OS, CLMP, CLN5, CLNS1A, CLP1, CLPB, CLRN3, CLSTN3, CLYBL, CMAS, CMKLR1, CNGA4, CNIH2, CNNM1, CNNM2, CNOT2, CNPY2, CNTF, CNTN1, CNTN5, COA4, COG3, COG6, COL13A1, COL17A1, COL2A1, COL4A1, COL4A2, COLCA1, COLCA2, COMMD3, COMMD3-BMI1, COMMD6, COMMD9, COMTD1, COPB1, COPS7A, COPZ1, COQ10A, COQ5, CORO1B, CORO1C, COX14, COX15, COX6A1, COX8A, CPB2, CPEB3, CPM, CPN1, CPNE8, CPSF6, CPSF7, CPT1A, CPXM2, CRACR2A, CRACR2B, CRADD, CREB3L1, CREBL2, CREBZF, CREM, CRTAC1, CRTAM, CRY1, CRY2, CRYAB, CRYL1, CS, CSAD, CSGALNACT2, CSNK1A1L, CSNK2A3, CSRNP2, CSRP2, CSRP3, CST6, CSTF2T, CSTF3, CTBP2, CTDSP2, CTNNA3, CTNND1, CTR9, CTSC, CTSD, CTSF, CTSW, CTTN, CUBN, CUEDC2, CUL2, CUL4A, CUL5, CUTC, CUX2, CUZD1, CWC15, CWF19L1, CWF19L2, CXCL12, CXCR5, CYB561A3, CYB5R2, CYP17A1, CYP26A1, CYP26C1, CYP27B1, CYP2C18, CYP2C19, CYP2C8, CYP2C9, CYP2E1, CYP2R1, CYSLTR2, DACH1, DAGLA, DAK, DAO, DAOA, DAZAP2, DBX1, DBX2, DCD, DCDC1, DCDC5, DCHS1, DCLK1, DCLRE1A, DCLRE1C, DCN, DCP1B, DCPS, DCT, DCTN2, DCUN1D2, DCUN1D5, DDB1, DDB2, DDI1, DDIAS, DDIT3, DDIT4, DDN, DDX10, DDX11, DDX21, DDX23, DDX25, DDX47, DDX50, DDX51, DDX54, DDX55, DDX6, DEAF1, DEFB108B, DENND5A, DENND5B, DENR, DEPDC4, DEPDC7, DERA, DGAT2, DGKA, DGKH, DGKZ, DHCR7, DHH, DHRS12, DHTKD1, DHX32, DHX37, DIABLO, DIAPH3, DIP2B, DIP2C, DIS3, DIXDC1, DKK1, DKK3, DLAT, DLEU7, DLG2, DLG5, DMBT1, DNA2, DNAH10, DNAJB12, DNAJB13, DNAJC1, DNAJC12, DNAJC14, DNAJC15, DNAJC22, DNAJC24, DNAJC3, DNAJC4, DNAJC9, DNHD1, DNM1L, DNMBP, DNTT, DOCK1, DOCK9, DPAGT1, DPCD, DPF2, DPP3, DPPA3, DPY19L2, DPYSL4, DRAM1, DRAP1, DRD2, DRD4, DRGX, DSCAML1, DTX1, DTX3, DTX4, DUPD1, DUSP13, DUSP16, DUSP5, DUSP6, DUSP8, DYDC1, DYDC2, DYNC2H1, DYNLL1, DYRK2, DYRK4, DZIP1, E2F7, E2F8, EBF3, EBLN1, EBPL, ECD, ECHDC3, ECHS1, EDNRB, EDRF1, EEA1, EED, EEF1G, EFEMP2, EFNB2, EGR2, EHBP1L1, EHD1, EHF, EI24, EID3, EIF1AD, EIF2B1, EIF3A, EIF3F, EIF3M, EIF4B, EIF4EBP2, EIF4G2, EIF5AL1, ELF1, ELF5, ELK3, ELMOD1, ELOVL3, EIF3M, EIF4B, EML3, EMP1, EMX2, ENDOD1, ENDOU, ENKUR, ENO2, ENO4, ENOX1, ENTPD1, ENTPD7, EP400, EPC1, EPS8, EPS8L2, EPSTI1, EPYC, ERBB3, ERC1, ERCC5, ERCC6, ERCC6-PGBD3, ERGIC2, ERICH6B, ERLIN1, ERP27, ERP29, ESAM, ESD, ESPL1, ESRRA, ESYT1, ETNK1, ETS1, ETV6, EXOC6, EXOSC1, EXOSC8, EXPH5, EXT2, F10, F2, F7, FADD, FADS1, FADS2, FADS3, FAIM2, FAM101A, FAM107B, FAM109A, FAM111A, FAM111B, FAM118B, FAM124A, FAM13C, FAM149B1, FAM155A, FAM160A2, FAM160B1, FAM168A, FAM170B, FAM171A1, FAM175B, FAM178A, FAM180B, FAM181B, FAM186A, FAM186B, FAM188A, FAM196A, FAM19A2, FAM204A, FAM208B, FAM213A, FAM216A, FAM216B, FAM21A, FAM21C, FAM222A, FAM24A, FAM24B, FAM25A, FAM25C, FAM25G, FAM35A, FAM45A, FAM53B, FAM60A, FAM71C, FAM76B, FAM86C1, FAM89B, FAM90A1, FANCF, FANK1, FAR1, FAR2, FARP1, FAS, FAT3, FAU, FBRSL1, FBXL14, FBXL15, FBXL3, FBXO18, FBXO21, FBXO3, FBXW4, FBXW8, FCHSD2, FDX1, FDXACB1, FEN1, FERMT3, FEZ1, FFAR4, FGD4, FGD6, FGF14, FGF19, FGF23, FGF3, FGF4, FGF6, FGF8, FGF9, FGFBP3, FGFR1OP2, FGFR2, FIBIN, FIBP, FICD, FIGNL2, FJX1, FKBP11, FKBP2, FKBP4, FLI1, FLRT1, FLT1, FLT3, FMNL3, FNBP4, FNDC3A, FOLH1, FOLH1B, FOLR1, FOLR2, FOLR3, FOSL1, FOXI2, FOXJ2, FOXM1, FOXN4, FOXO1, FOXR1, FOXRED1, FRA10AC1, FRAT1, FRAT2, FREM2, FRG2B, FRMD4A, FRMD8, FRMPD2, FRS2, FRY, FSHB, FTH1, FUOM, FUT11, FUT4, FXYD2, FXYD4, FXYD6, FXYD6-FXYD2, FZD10, FZD4, FZD8, GAB2, GABARAPL1, GAD2, GAL, GAL3ST3, GALNT18, GALNT4, GALNT6, GALNT8, GALNT9, GANAB, GAPDH, GAS2, GAS2L3, GAS6, GATA3, GATC, GBF1, GCN1L1, GDF10, GDF11, GDF2, GDF3, GDI2, GDPD4, GDPD5, GFRA1, GGACT, GHITM, GIF, GIT2, GJA3, GJB2, GJB6, GJD4, GLB1L2, GLB1L3, GLIPR1L1, GLIPR1L2, GLRX3, GLS2, GLT1D1, GLT8D2, GLTP, GLUD1, GLYAT, GLYATL1, GLYATL2, GNB3, GNG3, GNPTAB, GNS, GOLGA3, GOLGA7B, GOLT1B, GPALPP1, GPAM, GPC5, GPC6, GPD1, GPHA2, GPN3, GPR12, GPR123, GPR133, GPR137, GPR152, GPR158, GPR162, GPR18, GPR180, GPR182, GPR183, GPR19, GPR26, GPR83, GPR84, GPRC5A, GPRC5D, GPRIN2, GRAMD1B, GRASP, GRIA4, GRID1, GRIK4, GRIN2B, GRIP1, GRK1, GRK5, GRM5, GRTP1, GSG1, GSTO1, GSTO2, GSTP1, GSX1, GTF2F2, GTF2H1, GTF2H3, GTF3A, GTPBP4, GTSF1, GUCY1A2, GUCY2C, GXYLT1, GYLTL1B, GYS2, H1FNT, H2AFJ, H2AFX, H2AFY2, H3F3C, HABP2, HAL, HARBI1, HBB, HBD, HBE1, HBG1, HBG2, HCAR1, HCAR2, HCAR3, HCFC2, HDAC7, HEBP1, HECTD2, HECTD4, HELB, HELLS, HEPACAM, HEPHL1, HEPN1, HERC4, HHEX, HIF1AN, HIGD1C, HINFP, HIP1R, HIPK3, HIST4H4, HK1, HKDC1, HMBS, HMGA2, HMGB1, HMX2, HNF1A, HNRNPA1, HNRNPA1L2, HNRNPF, HNRNPH3, HNRNPUL2, HOGA1, HOTS, HOXC10, HOXC11, HOXC12, HOXC13, HOXC4, HOXC5, HOXC6, HOXC8, HOXC9, HPD, HPS1, HPS5, HPS6, HPSE2, HPX, HRAS, HRASLS2, HRASLS5, HRK, HS6ST3, HSD17B12, HSD17B6, HSP90B1, HSPA12A, HSPA14, HSPA8, HSPB2, HSPB8, HSPH1, HTATIP2, HTR2A, HTR3A, HTR3B, HTR7, HTRA1, HVCN1, HYLS1, HYOU1, IAPP, IDE, IDI1, IDI2, IFFO1, IFIT1, IFIT1B, IFIT2, IFIT3, IFIT5, IFITM1, IFITM10, IFITM2, IFITM3, IFITM5, IFNG, IFT46, IFT81, IFT88, IGF1, IGF2, IGFBP6, IGHMBP2, IGSF22, IGSF9B, IKBIP, IKZF4, IKZF5, IL10RA, IL15RA, IL17D, IL18, IL18BP, IL22, IL23A, IL26, IL2RA, IL31, ILK, IMMP1L, INA, INCENP, ING1, ING4, INHBC, INHBE, INPP5A, INPP5F, INPPL1, INS, INSC, INS-IGF2, INTS4, INTS5, INTS6, IPMK, IPO5, IPO7, IPO8, IQCD, IQSEC3, IRAK3, IRAK4, IRF7 IRG1, IRS2 ISCU, ITFG2, ITGA5, ITGA7, ITGA8, ITGB1, ITGB7, ITGBL1, ITIH2, ITIH5, ITM2B, ITPR2, ITPRIP, IZUMO1R, JAKMIP3, JAM3, JMJD1C, JRKL, KANSL2, KAT5, KAT6B, KATNAL1, KAZALD1, KBTBD3, KBTBD4, KBTBD6, KBTBD7, KCNA1, KCNA4, KCNA5, KCNA6, KCNC1, KCNC2, KCNE3, KCNH3, KCNIP2, KCNJ1, KCNJ11, KCNJ5, KCNJ8, KCNK18, KCNK4, KCNK7, KCNMA1, KCNMB4, KCNQ1, KCNRG, KCTD10, KCTD12, KCTD14, KCTD21, KCTD4, KDELC1, KDELC2, KDM2A, KDM2B, KDM4D, KDM4E, KDM5A, KERA, KIAA0226L, KIAA1033, KIAA1217, KIAA1279, KIAA1377, KIAA1462, KIAA1467, KIAA1549L, KIAA1551, KIAA1598, KIF11, KIF18A, KIF20B, KIF21A, KIF5A, KIF5B, KIN, KIRREL3, KITLG, KL, KLC2, KLIF12, KLF5, KLF6, KLHL1, KLHL35, KLHL42, KLLN, KLRB1, KLRC1, KLRC2, KLRC3, KLRC4, KLRC4-KLRK1, KLRD1, KLRF1, KLRF2, KLRG1, KLRK1, KMT2A, KMT2D, KNDC1, KNTC1, KPNA3, KRAS, KRR1, KRT1, KRT18, KRT2, KRT3, KRT4, KRT5, KRT6A, KRT6B, KRT6C, KRT7, KRT71, KRT72, KRT73, KRT74, KRT75, KRT76, KRT77, KRT78, KRT79, KRT8, KRT80, KRT81, KRT82, KRT83, KRT84, KRT85, KRT86, KRTAP5-1, KRTAP5-10, KRTAP5-11, KRTAP5-2, KRTAP5-3, KRTAP5-4, KRTAP5-5, KRTAP5-6, KRTAP5-7, KRTAP5-8, KRTAP5-9, KSR2, LACC1, LACRT, LAG3, LALBA, LAMP1, LAMTOR1, LARP4, LARP4B, LATS2, LAYN, LBHD1, LBX1, LCOR, LCP1, LDB1, LDB3, LDHA, LDHAL6A, LDHB, LDHC, LDLRAD3, LECT1, LEMD3, LEPREL2, LETMD1, LGALS12, LGI1, LGR4, LGR5, LHFP, LHPP, LHX5, LIG4, LIMA1, LIN7A, LIN7C, LINC00452, LIPA, LIPF, LIPJ, LIPK, LIPM, LIPN, LIPT2, LLPH, LMBR1L, LMNTD1, LMNTD2, LMO1, LMO2, LMO3, LMO7, LMO7DN, LNX2, LOC100129216, LOC100129361, LOC100129940, LOC100130539, LOC100506127, LOC100996758, LOC102724957, LOC403312, LOH12CR1, LOXL4, LPAR5, LPAR6, LPCAT3, LPXN, LRCH1, LRCOL1, LRFN4, LRIG3, LRIT1, LRIT2, LRMP, LRP1, LRP4, LRP5, LRP6, LRRC10, LRRC10B, LRRC18, LRRC20, LRRC23, LRRC27, LRRC32, LRRC43, LRRC4C, LRRC55, LRRC56, LRRC63, LRRIQ1, LRRK2, LRRN4CL, LRRTM3, LRTM2, LRTOMT, LSP1, LTA4H, LTBP3, LTBR, LUM, LUZP2, LYRM5, LYVE1, LYZ, LYZL1, LYZL2, LZTS2, M6PR, MAB21L1, MACROD1, MADD, MAGOHB, MALRD1, MAML2, MANSC1, MANSC4, MAP1LC3B2, MAP3K11, MAP3K12, MAP3K8, MAP4K2, MAP6, MAPK8, MAPK8IP1, MAPKAPK5, MARCH5, MARCH8, MARCH9, MARK2, MARS, MARVELD1, MASTL, MAT1A, MBD6, MBL2, MBNL2, MCAM, MCF2L, MCM10, MCMBP, MCRS1, MCU, MDK, MDM1, MDM2, ME3, MED13L, MED17, MED19, MED21, MED4, MEDAG, MEIG1, MEN1, METAP2, METTL1, METTL10, METTL12, METTL15, METTL20, METTL21B, METTL21C, METTL25, METTL7A, METTL7B, MFAP5, MFRP, MFSD5, MGAT4C, MGEA5, MGMT, MGP, MGST1, MICAL2, MICALCL, MICU1, MICU2, MINPP1, MIP, MIPEP, MKI67, MKX, MLEC, MLF2, MLLT10, MLNR, MLXIP, MMAB, MMP1, MMP10, MMP12, MMP13, MMP17, MMP19, MMP20, MMP21, MMP26, MMP27, MMP3, MMP7, MMP8, MMRN2, MMS19, MOB2, MOGAT2, MON2, MORN3, MORN4, MPEG-1, MPHOSPH8, MPHOSPH9, MPP7, MPPED2, MPZL2, MPZL3, MRC1, MRE11A, MRGPRD, MRGPRE, MRGPRF, MRGPRG, MRGPRX1, MRGPRX2, MRGPRX3, MRGPRX4, MRPL11, MRPL16, MRPL17, MRPL21, MRPL23, MRPL42, MRPL43, MRPL48, MRPL49, MRPL51, MRPL57, MRPS16, MRPS31, MRPS35, MRVI1, MS4A1, MS4A10, MS4A12, MS4A13, MS4A14, MS4A15, MS4A2, MS4A3, MS4A4A, MS4A5, MS4A6A, MS4A6E, MS4A7, MS4A8, MSANTD2, MSANTD4, MSI1, MSMB, MSRB2, MSRB3, MSS51, MTA2, MTCH2, MTERF2, MTG1, MTIF3, MTL5, MTMR2, MTMR6, MTMR6, MTNR1B, MTPAP, MTRF1, MTRNR2L5, MTRNR2L7, MTRNR2L8, MTUS2, MUC15, MUC19, MUC2, MUC5B, MUC6, MUCL1, MUS81, MVK, MXI1, MYBPC1, MYBPC3, MYCBP2, MYEOV, MYF5, MYF6, MYL2, MYL6, MYL6B, MYO16, MYO1A, MYO1H, MYO3A, MYO7A, MYOD1, MYOF, MYOZ1, MYPN, MYRF, MZT1, N4BP2L1, N4BP2L2, N6AMT2, NAA16, NAA25, NAA40, NAALAD2, NAALADL1, NAB2, NABP2, NACA, NADSYN1, NALCN, NANOG, NANOGNB, NANOS1, NAP1L1, NAP1L4, NARS2, NAT10, NAV2, NAV3, NBEA, NCAM1, NCAPD2, NCAPD3, NCKAP1L, NCKAP5L, NCOA4, NCOR2, NCR3LG1, NDFIP2, NDST2, NDUFA12, NDUFA4L2, NDUFA9, NDUFB8, NDUFC2, NDUFC2-KCTD14, NDUFS3, NDUFS8, NDUFV1, NEBL, NECAP1, NEDD1, NEK3, NEK5, NELL1, NELL2, NET1, NEU3, NEURL1, NEUROD4, NEUROG3, NFE2, NFKB2, NFRKB, NFYB, NHLRC2, NHLRC3, NINJ2, NKX1-2, NKX2-3, NKX6-2, NLRP10, NLRP14, NLRP6, NLRX1, NMT2, NNMT, NOC3L, NOC4L, NODAL, NOLC1, NOP2, NOS1, NOX4, NPAS4, NPAT, NPFF, NPFFRI, NPM3, NPS, NPY4R, NR1H3, NR1H4, NR2C1, NR4A1, NRAP, NRBF2, NRG3, NRGN, NRIP2, NRIP3, NRP1, NRXN2, NSMCE4A, NSUN6, NT5C2, NT5DC3, NTF3, NTM, NTN4, NTS, NUAK1, NUCB2, NUDT13, NUDT15, NUDT22, NUDT4, NUDT5, NUDT8, NUFIP1, NUMA1, NUP107, NUP160, NUP37, NUP98, NUPL1, NUTM2A, NUTM2B, NXF1, NXPE1, NXPE2, NXPE4, NXPH4, OAF, OAS1, OAS2, OAS3, OASL, OAT, OBFC1, ODF3, OGDHL, OGFOD2, OIT3, OLAH, OLFM4, OLFML1, OLR1, OMP, OOSP2, OPALIN, OPCML, OPN4, OPTN, OR10A2, OR10A3, OR10A4, OR10A5, OR10A6, OR10A7, OR10AD1, OR10AG1, OR10G4, OR10G7, OR10G8, OR10G9, OR10P1, OR10Q1, OR10S1, OR10V1, OR10W1, OR13A1, OR1S1, OR1S2, OR2AG1, OR2AG2, OR2AP1, OR2AT4, OR2D2, OR2D3, OR4A15, OR4A16, OR4A47, OR4A5, OR4B1, OR4C11, OR4C12, OR4C13, OR4C15, OR4C16, OR4C3, OR4C45, OR4C46, OR4C6, OR4D10, OR4D11, OR4D5, OR4D6, OR4D9, OR4P4, OR4S1, OR4S2, OR4X1, OR4X2, OR51A2, OR51A4, OR51A7, OR51B2, OR51B4, OR51B5, OR51B6, OR51D1, OR51E1, OR51E2, OR51F1, OR51F2, OR51G1, OR51G2, OR51I1, OR51I2, OR51L1, OR51M1, OR51Q1, OR51S1, OR51T1, OR51V1, OR52A1, OR52A5, OR52B2, OR52B4, OR52B6, OR52D1, OR52E2, OR52E4, OR52E6, OR52E8, OR52H1, OR52I1, OR52I2, OR52J3, OR52K1, OR52K2, OR52L1, OR52M1, OR52N1, OR52N2, OR52N4, OR52N5, OR52R1, OR52W1, OR56A1, OR56A3, OR56A4, OR56A5, OR56B1, OR56B4, OR5A1, OR5A2, OR5AK2, OR5AN1, OR5AP2, OR5AR1, OR5AS1, OR5B12, OR5B17, OR5B2, OR5B21, OR5B3, OR5D13, OR5D14, OR5D16, OR5D18, OR5F1, OR5I1, OR5J2, OR5L1, OR5L2, OR5M1, OR5M10, OR5M11, OR5M3, OR5M8, OR5M9, OR5P2, OR5P3, OR5R1, OR5T1, OR5T2, OR5T3, OR5W2, OR6A2, OR6C1, OR6C2, OR6C3, OR6C4, OR6C6, OR6C65, OR6C68, OR6C70, OR6C74, OR6C75, OR6C76, OR6M1, OR6Q1, OR6T1, OR6X1, OR8A1, OR8B12, OR8B2, OR8B3, OR8B4, OR8B8, OR8D1, OR8D2, OR8D4, OR8G1, OR8G2, OR8G5, OR8H1, OR8H2, OR8H3, OR8I2, OR8J1, OR8J3, OR8K1, OR8K3, OR8K5, OR8S1, OR8U1, OR8U8, OR9G1, OR9G4, OR9G9, OR9I1, OR9K2, OR9Q1, OR9Q2, ORAI1, ORAOV1, ORMDL2, OS9, OSBP, OSBPL5, OSBPL8, OTOG, OTOGL, OTUB1, OTUD1, OVCH1, OVCH2, OVOL1, OXGR1, P2RX2, P2RX3, P2RX4, P2RX7, P2RY2, P2RY6, P4HA1, P4HA3, PA2G4, PAAF1, PABPC3, PACS1, PACSIN3, PAFAH1B2, PAH, PAK1, PALD1, PAMR1, PAN2, PAN3, PANK1, PANO1, PANX1, PANX3, PAOX, PAPSS2, PARD3, PARG, PARP11, PARP4, PARPBP, PARVA, PATE1, PATE2, PATE3, PATE4, PATL1, PAWR, PAX2, PAX6, PBLD, PC, PCBD1, PCBP2, PCCA, PCDH15, PCDH17, PCDH20, PCDH8, PCDH9, PCED1B, PCF11, PCGF5, PCGF6, PCID2, PCNXL3, PCSK7, PDCD11, PDCD4, PDDC1, PDE1B, PDE2A, PDE3A, PDE3B, PDE6C, PDE6H, PDGFD, PDHX, PDLIM1, PDS5B, PDSS1, PDX1, PDZD3, PDZD7, PDZD8, PDZRN4, PEBP1, PELI3, PEX16, PEX5, PFDN5, PFKB3, PFKM, PFKP, PGA3, PGA4, PGA5, PGAM1, PGAM5, PGAP2, PGBD3, PGM2L1, PGR, PHB2, PHC1, PHF11, PHF21A, PHLDA1, PHLDA2, PHLDB1, PHOX2A, PHRF1, PHYH, PHYHIPL, PI4K2A, PIANP, PIBF1, PICALM, PIDD1, PIH1D2, PIK3AP1, PIK3C2A, PIK3C2G, PIP4K2A, PIP4K2C, PITPNM1, PITPNM2, PITRM1, PITX3, PIWIL1, PIWIL4, PKD2L1, PKNOX2, PKP2, PKP3, PLA2G12B, PLA2G16, PLA2G1B, PLAC9, PLAU, PLBD1, PLBD2, PLCB3, PLCE1, PLCZ1, PLEKHA1, PLEKHA5, PLEKHA7, PLEKHB1, PLEKHG6, PLEKHG7, PLEKHS1, PLET1, PLXDC2, PLXNC1, PMCH, PMEL, PNLIP, PNLIPRP1, PNLIPRP2, PNLIPRP3, PNPLA2, POC1B, POC1B-GALNT4, POLA2, POLD3, POLD4, POLE, POLL, POLR1D, POLR2G, POLR2L, POLR3A, POLR3B, POMP, POP5, POSTN, POU2AF1, POU2F3, POU4F1, POU6F1, PPA1, PPAPDC1A, PPFIA1, PPFIA2, PPFIBP1, PPFIBP2, PPHLN1, PPIF, PPM1H, PPME1, PPP1CA, PPP1CC, PPP1R12A, PPP1R14B, PPP1R1A, PPP1R32, PPP1R3C, PPP2R1B, PPP2R2D, PPP2R5B, PPP3CB, PPP6R3, PPRC1, PPTC7, PRAP1, PRB1, PRB2, PRB3, PRB4, PRCP, PRDM10, PRDM11, PRDM4, PRDX3, PRDX5, PRF1, PRG2, PRG3, PRH1, PRH2, PRICKLE1, PRIM1, PRKAB1, PRKAG1, PRKCDBP, PRKCQ, PRKG1, PRKRIR, PRLHR, PRMT3, PRMT8, PROSER1, PROSER2, PROZ, PRPF18, PRPF19, PRPF40B, PRPH, PRR13, PRR20A, PRR20B, PRR20C, PRR20D, PRR20E, PRR4, PRR5L, PRRG4, PRSS23, PRTFDC1, PSAP, PSD, PSMA1, PSMC3, PSMD13, PSMD9, PSPC1, PSTK, PTCHD3, PTDSS2, PTEN, PTER, PTF1A, PTGDR2, PTGES3, PTH, PTHLH, PTMS, PTPLA, PTPMT1, PTPN11, PTPN20B, PTPN5, PTPN6, PTPRB, PTPRCAP, PTPRE, PTPRJ, PTPRO, PTPRQ, PTPRR, PTS, PUS1, PUS3, PUS7L, PVRL1, PWP1, PWWP2B, PXMP2, PXN, PYGM, PYROXD1, PYROXD2, PZP, QSER1, R3HCC1L, R3HDM2, RAB11FIP2, RAB18, RAB1B, RAB20, RAB21, RAB30, RAB35, RAB38, RAB39A, RAB3IL1, RAB3IP, RAB5B, RAB6A, RACGAP1, RAD51AP1, RAD52, RAD9A, RAD9B, RAG1, RAG2, RAN, RAP1B, RAP2A, RAPGEF3, RAPSN, RARG, RARRES3, RASA3, RASAL1, RASGEF1A, RASGRP2, RAL11A, RASSF10, RASSF3, RASSF4, RASSF7, RASSF8, RASSF9, RB1, RBM14, RBM14-RBM4, RBM17, RBM19, RBM20, RBM26, RBM4, RBM4B, RBM7, RBMS2, RBMXL2, RBP3, RBP4, RBP5, RCBTB1, RCBTB2, RCE1, RCN1, RCOR2, RDH16, RDH5, RDX, RECQL, REEP3, RELA, RELT, REP15, RERG, RERGL, RET, REXO2, RFC3, RFC5, RFX4, RFXAP, RGCC, RGR, RGS10, RHEBL1, RHNO1, RHOBTB1, RHOD, RHOF, RHOG, RIC3, RIC8A, RIC8B, RILPL1, RILPL2, RIMBP2, RIMKLB, RIN1, RITA1, RNASEH2B, RNASEH2C, RND1, RNF10, RNF113B, RNF121, RNF141, RNF169, RNF17, RNF214, RNF219, RNF26, RNF34, RNF41, RNF6, RNFT2, RNH1, RNLS, ROBO3, ROBO4, ROM1, RPAP3, RPEL1, RPH3A, RPL21, RPL27A, RPL41, RPL6, RPLP0, RPLP2, RPP30, RPP38, RPS13, RPS24, RPS25, RPS26, RPS3, RPS6KA4, RPS6KB2, RPUSD4, RRAS2, RRM1, RRP12, RRP8, RSF1, RSRC2, RSU1, RTKN2, RTN3, RTN4RL2, RUFY2, RXFP2, SAA1, SAA2, SAA2-SAA4, SAA4, SAAL1, SAC3D1, SACS, SAMD8, SAP18, SAR1A, SARNP, SART1, SART3, SBF2, SBNO1, SC5D, SCAF11, SCARB1, SCD, SCEL, SCGB1A1, SCGB1C1, SCGB1D1, SCGB1D2, SCGB1D4, SCGB2A1, SCGB2A2, SCN2B, SCN3B, SCN4B, SCN8A, SCNN1A, SCT, SCUBE2, SCYL1, SCYL2, SDHAF2, SDHD, SDR9C7, SDS, SDSL, SEC23IP, SEC24C, SEC31B, SEC61A2, SELPLG, SEMA4G, SENP1, SEPHS1, SERGEF, SERP2, SERPINE3, SERPING1, SERPINH1, SERTM1, SESN3, SETD1B, SETD8, SETDB2, SF1, SF3B2, SFMBT2, SFR1, SFRP5, SFSWAP, SFTPA1, SFTPA2, SFTPD, SFXN2, SFXN3, SFXN4, SGCG, SGMS1, SGPL1, SH2B3, SH2D4B, SH3PXD2A, SHANK2, SHISA2, SHMT2, SHOC2, SIAE, SIAH3, SIDT2, SIGIRR, SIK2, SIK3, SIPA1, SIRT1, SIRT3, SIRT4, SKA3, SKIDA1, SLAIN1, SLC10A2, SLC11A2, SLC15A1, SLC15A3, SLC15A4, SLC15A5, SLC16A12, SLC16A7, SLC16A9, SLC17A6, SLC17A8, SLC18A2, SLC18A3, SLC1A2, SLC22A10, SLC22A11, SLC22A12, SLC22A18, SLC22A18AS, SLC22A20, SLC22A24, SLC22A25, SLC22A6, SLC22A8, SLC22A9, SLC25A15, SLC25A16, SLC25A22, SLC25A28, SLC25A3, SLC25A30, SLC25A45, SLC26A10, SLC29A2, SLC29A3, SLC2A13, SLC2A14, SLC2A3, SLC35C1, SLC35E3, SLC35F2, SLC35G1, SLC36A4, SLC37A2, SLC37A4, SLC38A1, SLC38A2, SLC38A4, SLC39A12, SLC39A13, SLC39A5, SLC3A2, SLC41A2, SLC43A1, SLC43A3, SLC46A3, SLC48A1, SLC4A8, SLC5A12, SLC5A8, SLC6A12, SLC6A13, SLC6A15, SLC6A5, SLC7A1, SLC8B1, SLCO1A2, SLCO1B1, SLCO1B3, SLCO1B7, SLCO1C1, SLCO2B1, SLIT1, SLITRK1, SLITRK5, SLITRK6, SLK, SLN, SMAD9, SMAGP, SMARCC2, SMARCD1, SMC3, SMCO2, SMCO3, SMCO4, SMIM2, SMNDC1, SMPD1, SMTNL1, SMUG1, SNCG, SNRNP35, SNRPF, SNX15, SNX19, SNX32, SOAT2, SOCS2, SOHLH2, SORBS1, SORCS1, SORCS3, SORL1, SOX1, SOX21, SOX5, SOX6, SP1, SP7, SPA17, SPACA7, SPAG6, SPATA13, SPATA19, SPATS2, SPCS2, SPDYC, SPERT, SPG20, SPI1, SPIC, SPOCK2, SPON1, SPPL3, SPRN, SPRY2, SPRYD3, SPRYD4, SPRYD7, SPSB2, SPTBN2, SPTY2D1, SPX, SRGAP1, SRGN, SRPR, SRRM4, SRSF8, SRSF9, SSH1, SSH3, SSPN, SSRP1, SSSCA1, ST14, ST3GAL4, ST5, ST8SIA1, ST8SIA6, STAB2, STAC3, STAM, STAMBPL1, STARD10, STARD13, STAT2, STAT6, STIM1, STIP1, STK24, STK32C, STK33, STK38L, STOML3, STOX1, STRAP, STT3A, STX2, STX3, STX5, STYK1, SUCLA2, SUDS3, SUFU, SUGT1, SUOX, SUPT20H, SUPV3L1, SUV39H2, SUV420H1, SVIL, SVIP, SVOP, SWAP70, SYCE1, SYCP3, SYNPO2L, SYT1, SYT10, SYT12, SYT13, SYT15, SYT7, SYT8, SYT9, SYTL2, SYVN1, TAC3, TACC2, TACR2, TAF10, TAF1D, TAF3, TAF5, TAF6L, TAGLN, TALDO1, TAOK3, TAPBPL, TARBP2, TAS2R10, TAS2R13, TAS2R14, TAS2R19, TAS2R20, TAS2R30, TAS2R31, TAS2R42, TAS2R43, TAS2R46, TAS2R50, TAS2R7, TAS2R8, TAS2R9, TBATA, TBC1D10C, TBC1D12, TBC1D15, TBC1D30, TBC1D4, TBCEL, TBK1, TBRG1, TBX10, TBX3, TBX5, TCERG1L, TCF7L2, TCHP, TCIRG1, TCN1, TCP11L1, TCP11L2, TCTN1, TCTN2, TCTN3, TDG, TDRD1, TDRD3, TEAD1, TEAD4, TECTA, TECTB, TENC1, TENM4, TESC, TESPA1, TET1, TEX12, TEX26, TEX29, TEX30, TEX36, TEX40, TFAM, TFCP2, TFDP1, TGDS, TH, THAP2, THNSL1, THRSP, THSD1, THY1, THYN1, TIAL1, TIGD3, TIMELESS, TIMM10, TIMM10B, TIMM23, TIMM23B, TIMM8B, TIRAP, TLL2, TLX1, TLX1NB, TM7SF2, TM7SF3, TM9SF2, TM9SF3, TMBIM4, TMBIM6, TMCC3, TMCO3, TMED2, TMEM106C, TMEM109, TMEM116, TMEM117, TMEM119, TMEM120B, TMEM123, TMEM126A, TMEM126B, TMEM132A, TMEM132B, TMEM132C, TMEM132D, TMEM133, TMEM134, TMEM135, TMEM136, TMEM138, TMEM151A, TMEM179B, TMEM180, TMEM19, TMEM194A, TMEM216, TMEM218, TMEM223, TMEM225, TMEM233, TMEM236, TMEM25, TMEM254, TMEM255B, TMEM258, TMEM26, TMEM262, TMEM263, TMEM41B, TMEM45B, TMEM5, TMEM52B, TMEM72, TMEM80, TMEM86A, TMEM9B, TMPO, TMPRSS12, TMPRSS13, TMPRSS4, TMPRSS5, TMTC1, TMTC2, TMTC3, TMTC4, TMX2, TNFRSF19, TNFRSF1A, TNFSF11, TNFSF13B, TNKS1BP1, TNKS2, TNNI2, TNNT3, TOLLIP, TP53AIP1, TP53I11, TPBGL, TPCN1, TPCN2, TPH1, TPH2, TPI1, TPP1, TPP2, TPT1, TPTE2, TRAF6, TRAFD1, TRAPPC4, TRDMT1, TREH, TRHDE, TRIAP1, TRIM13, TRIM21, TRIM22, TRIM29, TRIM3, TRIM34, TRIM44, TRIM48, TRIM49, TRIM49B, TRIM49C, TRIM49D1, TRIM49D2P, TRIM5, TRIM51, TRIM6, TRIM64, TRIM64B, TRIM64C, TRIM66, TRIM68, TRIM6-TRIM34, TRIM77, TRIM8, TRMT112, TROAP, TRPC4, TRPC6, TRPM5, TRPT1, TRPV4, TRUB1, TSC22D1, TSFM, TSG101, TSGA10IP, TSKU, TSPAN11, TSPAN14, TSPAN15, TSPAN18, TSPAN19, TSPAN31, TSPAN32, TSPAN4, TSPAN8, TSPAN9, TSSC4, TTC12, TTC17, TTC36, TTC9C, TUB, TUBA1A, TUBA1B, TUBA1C, TUBA3C, TUBAL3, TUBB8, TUBGCP2, TUBGCP3, TULP3, TUT1, TWF1, TXNRD1, TYR, TYSND1, UBAC2, UBASH3B, UBC, UBE2D1, UBE2L6, UBE2N, UBE3B, UBE4A, UBL3, UBQLN3, UBQLNL, UBTD1, UBTFL1, UBXN1, UCHL3, UCMA, UCN3, UCP2, UCP3, UEVLD, UFM1, UGGT2, UHRF1BP1L, ULK1, UNC119B, UNC5B, UNC93B1, UNG, UPF2, UPF3A, UPK2, UQCC3, URAD, UROS, USH1C, USMG5, USP12, USP15, USP2, USP28, USP30, USP35, USP44, USP47, USP5, USP54, USP6NL, USPL1, UTF1, UTP14C, UTP20, UVRAG, VAMP1, VAX1, VCL, VDAC2, VDR, VEGFB, VENTX, VEZT, VIM, VPS11, VPS26A, VPS26B, VPS29, VPS33A, VPS36, VPS37B, VPS37C, VPS51, VSIG10, VSIG2, VSTM4, VSTM5, VTI1A, VWA2, VWA5A, VWA8, VWCE, WAC, WAPAL, WASF3, WBP11, WBP1L, WBP4, WDFY2, WDFY4, WDR11, WDR37, WDR66, WDR74, WEE1, WIBG, WIF1, WNK1, WNT1, WNT10B, WNT11, WNT5B, WNT8B, WSB2, WSCD2, WT1, XPNPEP1, XPO4, XPOT, XRCC6BP1, XRRA1, YAF2, YAP1, YARS2, YBX3, YEATS4, YIF1A, YPEL4, ZAR1L, ZBED5, ZBTB16, ZBTB3, ZBTB39, ZBTB44, ZC3H10, ZC3H12C, ZC3H13, ZCCHC24, ZCCHC8, ZCRB1, ZDHHC13, ZDHHC16, ZDHHC17, ZDHHC20, ZDHHC24, ZDHHC5, ZDHHC6, ZEB1, ZFAND4, ZFC3H1, ZFP91, ZFPL1, ZFYVE27, ZIC2, ZIC5, ZMIZ1, ZMYM2, ZMYM5, ZMYND11, ZNF10, ZNF140, ZNF143, ZNF195, ZNF202, ZNF214, ZNF215, ZNF22, ZNF239, ZNF248, ZNF25, ZNF26, ZNF268, ZNF32, ZNF33A, ZNF33B, ZNF365, ZNF37A, ZNF384, ZNF385A, ZNF408, ZNF438, ZNF485, ZNF488, ZNF503, ZNF511, ZNF518A, ZNF605, ZNF641, ZNF664, ZNF664-FAM101A, ZNF705A, ZNF705E, ZNF740, ZNF84, ZNF891, ZNHIT2, ZP1, ZPR1, ZRANB1, ZSWIM8, ZW10, and ZWINT; target genes located on chromosomes 14-18 including AAGAB, AANAT, AARS, AARSD1, AATF, AATK, ABAT, ABCA10, ABCA3, ABCA5, ABCA6, ABCA8, ABCA9, ABCC1, ABCC11, ABCC12, ABCC3, ABCC6, ABCD4, ABHD12B, ABHD15, ABHD17C, ABHD2, ABHD3, ABHD4, ABI3, ABR, ACAA2, ACACA, ACADVL, ACAN, ACAP1, ACBD4, ACD, ACE, ACIN1, ACLY, ACOT1, ACOT2, ACOT4, ACOT6, ACOX1, ACSBG1, ACSF2, ACSF3, ACSM1, ACSM2A, ACSM2B, ACSM3, ACSM5, ACTC1, ACTG1, ACTN1, ACTR10, ACYP1, ADAD2, ADAL, ADAM10, ADAM11, ADAM20, ADAM21, ADAMTS17, ADAMTS18, ADAMTS7, ADAMTSL3, ADAP2, ADAT1, ADCK1, ADCY4, ADCY7, ADCY, 9ADCYAP1, ADNP2, ADORA2B, ADPGK, ADPRM, ADSSL1, AEN, AFG3L2, AFMID, AGBL1, AGRP, AHNAK2, AHSA1, AHSP, AIPL1, AJUBA, AK7, AKAP1, AKAP10, AKAP13, AK AP5, AKAP6, AKT1, AKTIP, ALDH1A2, ALDH1A3, ALDH3A1, ALDH3A2, ALDH6A1, ALDOA, ALDOC, ALG1, ALKBH1, ALKBH5, ALOX12, ALOX12B, ALOX15, ALOX15B, ALOXE3, ALPK2, ALPK3, ALYREF, AMDHD2, AMFR, AMN, AMZ2, ANAPC11, ANG, ANGEL1, ANKDD1A, ANKFN1, ANKFY1, ANKRD11, ANKRD12, ANKRD13B, ANKRD29, ANKRD30B, ANKRD34C, ANKRD40, ANKRD62, ANKRD63, ANKRD9, ANKS3, ANKS4B, ANP32A, ANPEP, ANXA2, AOC2, AOC3, AP1G1, AP1G2, AP2B1, AP3B2, AP3S2, AP4E1, AP4S1, AP5M1, APBA2, APCDD1, APEX1, APH1B, APOBR, APOH, APOPT1, APPBP2, APRT, AQP4, AQP8, AQP9, AQR, AREL1, ARF6, ARG2 ARHGAP11A, ARHGAP11B, ARHGAP17, ARHGAP23, ARHGAP27, ARHGAP28, ARHGAP44, ARHGAP5, ARHGD1A, ARHGDIG, ARHGEF15, ARHGEF40, ARID3B, ARID4A, ARIH1, ARL16, ARL17A, ARL17B, ARL2BP, ARL4D, ARL5C, ARL6IP1, ARMC5, ARMC7, ARNT2, ARPIN, ARPP19, ARRB2, ARRDC4, ARSG, ASB16, ASB2, ASB7, ASGR1, ASGR2, ASIC2, ASPA, ASPG, ASPHD1, ASPSCR1, ASXL3, ATAD5, ATF7IP2, ATG14, ATG2B, ATL1, ATMIN, ATP10A, ATP1B2, ATP2A1, ATP2A3, ATP2C2, ATP5A1, ATP5G1, ATP5H, ATP5S, ATP6V0A1, ATP6V0C, ATP6V0D1, ATP6V1D, ATP8B1, ATP8B4, ATP9B, ATPAF2, ATXN1L, ATXN2L, ATXN3, ATXN7L3, AURKB, AVEN, AXIN1, AXIN2, B2M, B3GNT9, B3GNTL1, G4GALNT2, B4GALT6, B9D1, BAG5, BAHCC1, BAHD1, BAIAP2, BAIAP3, BANP, BATF, BAZ1A, BBS2, BBS4, BCAR1, BCAS3, BCKDK, BCL11B, BCL2, BCL2A1, BCL2L10, BCL2L2, BCL2L2-PABPN1, BCL6B, BCL7C, BCO1, BDKRB1, BDKRB2, BEAN1, BECN1, BEGAIN, BFAR, BHLHA9, BIRC5, BLM, BLMH, BLOC1S6, BMF, BMP4, BNC1, BNIP2, BOD1L2, BOLA2, BOLA2B, BPTF, BRCA1, BRD7, BRF1, BRICD5, BRIP1, BRMS1L, BTBD1, BTBD17, BTBD6, BTBD7, BUB1B, BZRAP1, C14orf1, C14orf105, C14orf119, C14orf132, C14orf142, C14orf159, C14orf166, C14orf169, C14orf177, C14orf178, C14orf180, C14orf182, C14orf183, C14orf2, C14orf28, C14orf37, C14orf39, C14orf79, C14orf80, C14orf93, C15orf26, C15orf27, C15orf32, C15orf38-AP3S2, C15orf39, C15orf40, C15orf41, C15orf43, C15orf48, C15orf52, C15orf53, C15orf54, C15orf56, C15orf57, C15orf59, C15orf61, C15orf62, C15orf65, C16orf13, C16orf45, C16orf46, C16orf47, C16orf52, C16orf54, C16orf58, C16orf59, C16orf62, C16orf70, C16orf71, C16orf72, C16orf74, C16orf78, C16orf82, C16orf86, C16orf87, C16orf89, C16orf90, C16orf91, C16orf92, C16orf93, C16orf95, C16orf96, C16orf97, C17orf100, C17orf102, C17orf104, C17orf105, C17orf107, C17orf112, C17orf47, C17orf49, C17orf50, C17orf51, C17orf53, C17orf58, C17orf59, C17orf62, C17orf64, C17orf67, C17orf70, C17orf74, C17orf75, C17orf77, C17orf78, C17orf80, C17orf82, C17orf85, C17orf89, C17orf96, C17orf97, C17orf98, C17orf99, C18orf21, C18orf25, C18orf32, C18orf42, C18orf54, C18orf63, C18orf65, C18orf8, C1QBP, C1QL1, C1QTNF1, C1QTNF8, C2CD4A, C2CD4B, CA10, CA12, CA4, CA5A, CA7, CABLES1, CABYR, CACNA1G, CACNA1H, CACNB1, CACNG1, CACNG3, CACNG4, CACNG5, CALB2, CALCOCO2, CALM1, CALML4, CAMKK1, CAMTA2, CANT1, CAPN15, CAPN3, CAPNS2, CARD14, CARHSP1, CASC3, CASC4, CASC5, CASKIN1, CASKIN2, CATSPER2, CATSPERB, CRFA2T3, CBFB, CBLN1, CBLN2, CBLN3, CBX1, CBX2, CBX4, CBX8, CCBE1, CCDC101, CCDC102A, CCDC102B, CCDC103, CCDC113, CCDC137, CCDC144A, CCDC144NL, CCDC154, CCDC175, CCDC176, CCDC177, CCDC178, CCDC182, CCDC33, CCDC40, CCDC42, CCDC43, CCDC47, CCDC57, CCDC64B, CCDC68, CCDC78, CCDC79, CCDC85C, CCDC88C, CCL1, CCL11, CCL13, CCL14, CCL15, CCL16, CCL17, CCL18, CCL2, CCL22, CCL23, CCL3, CCL3L1, CCL3L3, CCL4, CCL4L1, CCL4L2, CCL5, CCL7, CCL8, CCNB1IP1, CCNB2, CCNDBP1, CCNF, CCNK, CCP110, CCPG1, CCR10, CCR7, CCT6B, CD19, CD226, CD276, CD2BP2, CD300A, CD300C, CD300E, CD300LB, CD300LD, CD300LF, CD300LG, CD68, CD7, CD79B, CDAN1, CDC27, CDC42BPB, CDC42EP4, CDC6, CDCA4, CDH1, CDH11, CDH13, CDH15, CDH16, CDH19, CDH2, CDH20, CDH24, CDH3, CDH5, CDH7, CDH8, CDIP1, CDIPT, CDK10, CDK12, CDK3, CDK5R1, CDK5RAP3, CDKL1, CDKN3, CDR2, CDR2L, CDRT1, CDRT15, CDRT15L2, CDRT4, CDT1, CDYL2, CEBPE, CELF4, CELF6, CEMIP, CEMP1, CENPBD1, CENPN, CENPT, CENPV, CEP112, CEP128, CEP131, CEP152, CEP170B, CEP192, CEP76, CEP95, CERS3, CES1, CES2, CES3, CES4A, CES5A, CETN1, CETP, CFAP20, CFAP52, CFAP53, CFDP1, CFL2, CGNL1, CGRRF1, CHAC1, CHAD, CHD2, CHD3, CHD8, CHD9, CHGA, CHMP1A, CHMP1B, CHMP4A, CHMP6, CHP1, CHP2, CHRFAM7A, CHRM5, CHRNA3, CHRNA5, CHRNA7, CHRNB1, CHRNB4, CHRNE, CHST14, CHST4, CHST5, CHST6, CHST9, CHSY1, CHTF18, CHTF8, CHURC1, CHURC1-FNTB, CIAPIN1, CIB1, CIB2, CIDEA, CIDEB, CITTA, CILP, CINP, CIPC, CIRH1A, CISD3, CKB, CKLF, CKLF-CMTM1, CKMT1A, CKMT1B, CLCN7, CLDN6, CLDN7, CLDN9, CLEC10A, CLEC14A, CLEC16A, CLEC18A, CLEC18B, CLEC18C, CLEC19A, CLEC3A, CLK3, CLMN, CLN3, CLN6, CLPX, CLTC, CLUAP1, CLUH, CLUL1, CMA1, CMC2, CMIP, CMTM1, CMTM2, CMTM3, CMTM4, CMTM5, CMTR2, CNDP1, CNDP2, CNEP1R1, CNGB1, CNIH1, CNOT1, CNP, CNTD1, CNTNAP1, CNTNAP4, CNTROB, COA3, COASY, COCH, COG1, COG4, COG7, COG8, COIL, COL1A1, COLEC12, COMMD4, COPRS, COPS2, COPS3, COPZ2, COQ6, COQ7, COQ9, CORO1A, CORO2B, CORO6, CORO7, CORO7-PAM16, COTL1, COX1, COX11, COX16, COX4I1, COX5A, COX6A2, COX8C, CPD, CPEB1, CPLX3, CPLX4, CPNE2, CPNE6, CPNE7, CPPED1, CPSF2, CPSF4L, CRABP1, CRAMP1L, CREBBP, CRHR1, CRIP1, CRIP2, CRISPLD2, CRK, CRLF3, CRTC3, CRYBA1, CRYM, CSF3, CSH1, CSH2, CSHL1, CSK, CSNK1D, CSNK1G1, CSNK2A2, CSPG4, CT62, CTAGE1, CTAGE5, CTC1, CTCF, CTDNEP1, CTDP1, CTDSPL2, CTF1, CTIF, CTNS, CTRB1, CTRB2, CTRL, CTSG, CTSH, CTU2, CTXN2, CUEDC1, CWC25, CX3CL1, CXCL16, CXXC1, CYB561, CYB5A, CYB5B, CYB5D1, CYB5D2, CYBA, CYFIP1, CYGB, CPLD, CYP11A1, CYP19A1, CYP1A1, CYP1A2, CYP46A1, CYTH1, DAAM1, DACT1, DAD1, DAPK2, DBF4B, DBNDD1, DCAF11, DCAF4, DCAF5, DCAF7, DCAKD, DCC, DCTN5, DCTPP1, DCUN1D3, DCXR, DDHD1, DDX19A, DDX19B, DDX24, DDX28, DDX42, DDX5, DDX52, DECR2, DEF8, DEGS2, DENND4A, DERL2, DET1, DEXI, DGKE, DHODH, DHRS1, DHRS11, DHRS13, DHRS2, DHRS4, DHRS4L1, DHRS4L2, DHRS7, DHRS7B, DHRS7C, DHX33, DHX38, DHX40, DHX58, DHX8, DICER1, DIO2, DIO3, DIS3L, DISP2, DLG4, DLGAP1, DLGAP5, DLK1, DLL4, DLST, DLX3, DLX4, DMXL2, DNAAF1, DNAAF2, DNAH17, DNAH2, DNAH3, DNAH9, DNAI2, DNAJA2, DNAJA3, DNAJA4, DNAJC17, DNAJC7, DNAL1, DNASE1, DNASE1L2, DOC2A, DOC2B, DOK4, DOK6, DPEP1, DPEP2, DPEP3, DPF3, DPH1, DPH6, DPP8, DRC7, DRG2, DSC1, DSC2, DSC3, DSEL, DSG1, DSG2, DSG3, DSG4, DTD2, DTNA, DTWD1, DUOX1, DUOX2, DUOXA1, DUOXA2, DUS1L, DUS2, DUSP14, DUSP3, DUT, DVL2, DYM, DYNAP, DYNC1H1, DYNC1LI2, DYNLL2, DYNLRB2, DYX1C1, E2F4, E4F1, EAPP, EARS2, ECI1, EDC3, EDC4, EDDM3A, EDDM3B, EEF2K, EEF2KMT, EFCAB11, EFCAB13, EFCAB3, EFCAB5, EFNB3, EFS, EFTUD1, EFTUD2, EGLN3, EHD4, EID1, EIF1, EIF2AK4, EIF2B2, EIF2S1, EIF3C, EIF3CL, EIF3J, EIF4A1, E1F4A3, EIF5, EIF5A, ELAC1, ELAC2, ELL3, ELMO3, ELMSAN1, ELP2, ELP5, EMC4, EMC6, EMC7, EMC8, EMC9, EME1, EMF2, EMILIN2, EML1, EML5, EMP2, ENDOV, ENGASE, ENKD1, ENO3, ENOSF1, ENPP7, ENTHD2, ENTPD5, EPB41L3, EPB42, EPG5, EPN2, EPN3, EPX, ERAL1, ERBB2, ERCC4, ERH, ERI2, ERN1, ERN2, ERO1L, ESCO1, ESR2, ESRP2, ESRRB, ETFA, ETV4, EVI2A, EVI2B, EVL, EVPL, EVPLL, EXD1, EXD2, EXOC3L1, EXOC3L4, EXOC5, EXOC7, EXOSC6, EZH1, FA2H, FADS6, FAH, FAHD1, FAM101B, FAM103A1, FAM104A, FAM117A, FAM134C, FAM154B, FAM161B, FAM169B, FAM171A2, FAM173A, FAM174B, FAM177A1, FAM179B, FAM181A, FAM189A1, FAM192A, FAM195A, FAM195B, FAM20A, FAM210A, FAM214A, FAM219B, FAM222B, FAM227B, FAM57A, FAM57B, FAM63B, FAM64A, FAM65A, FAM69C, FAM71D, FAM81A, FAM83G, FAM92B, FAM96A, FAM96B, FAM98B, FAN1, FANCA, FANCI, FANCM, FASN, FBF1, FBLN5, FBN1, FBRS, FBXL16, FBXL19, FBXL20, FBXL22, FBXL8, FBXO15, FBXO22, FBXO31, FBXO33, FBXO34, FBXO39, FBXO47, FBXW10, FCF1, FDXR, FECH, FEM1B, FERMT2, FES, FGF11, FGF7, FHOD1, FHOD3, FITM1, FKBP10, FKBP3, FLCN, FLII, FLJ45513, FLOT2, FLRT2, FLVCR2, FLYWCH1, FLYWCH2, FMN1, FMNL1, FN3K, FN3KRP, FNDC8, FNTB, FOPNL, FOS, FOXA1, FOXB1, FOXC2, FOXF1, FOXG1, FOXJ1, FOXK2, FOXL1, FOXN1, FOXN3, FRMD5, FRMD6, FSCB, FSCN2, FSD2, FSTP1, FTO, FTSJ3, FUK, FURIN, FUS, FUT8, FXR2, FZD2, G2E3, G6PC, G6PC3, GAA, GABARAP, GABARAPL2, GABPB1, GABRA5, GABRB3, GABRG3, GALC, GALK1, GALK2, GALNS, GALNT1, GALNT16, GALR1, GALR2, GAN, GANC, GAREM, GAS2L2, GAS7, GAS8, GAST, GATA6, GATM, GCGR, GCH1, GCHFR, GCNT3, GCOM1, GCSH, GDE1, GDPD1, GDPD3, GDPGP1, GEMIN2, GEMIN4, GFAP, GFER, GFOD2, GGA2, GGA3, GGNBP2, GGT6, GH1, GH2, GHDC, GID4, GINS2, GINS3, GIP, GIT1, GJC1, GJD2, GJD3, GLCE, GLDN, GLG1, GLIS2, GLOD4, GLP2R, GLRX5, GLTPD2, GLYR1, GMFB, GMPR2, GNA13, GNAL, GNAO1, GNB5, GNG13, GNG2, GNGT2, GNPNAT1, GNPTG, GOLGA5, GOLGA6A, GOLGA6B, GOLGA6C, GOLGA6D, GOLGA6L1, GOLGA6L10, GOLGA6L22, GOLGA6L4, GOLGA6L6, GOLGA6L9, GOLGA8A, GOLGA8B, GOLGA8H, GOLGA8J, GOLGA8K, GOLGA8M, GOLGA8N, GOLGA8O, GOLGA8R, GOSR1, GOSR2, GOT2, GP1BA, GP2, GPATCH2L, GPATCH8, GPHB5, GPHN, GPR114, GPR132, GPR135, GPR137C, GPR139, GPR142, GPR176, GPR179, GPR33, GPR56, GPR65, GPR68, GPR97, GPRC5B, GPRC5C, GPS1, GPS2, GPT2, GPX2, GRAMD2, GRAP, GRAPL, GRB2, GRB7, GREB1L, GREM1, GRIN2A, GRIN2C, GRN, GRP, GSC, GSDMA, GSDMB, GSE1, GSG1L, GSG2, GSKIP, GSPT1, GSTZ1, GTF2A1, GTF2A2, GTF3C1, GTSCR1, GUCY2D, GZMB, GZMH, H3F3B, HAGH, HAGHL, HAP1, HAPLN3, HAS3, HAUS1, HAUS2, HAUS4, HBA1, HBA2, HBM, HBQ1, HBZ, HCFC1R1, HCN4, HCRT, HDAC5, HDC, HDDC3, HDGFRP3, HDHD2, HEATR3, HEATR4, HEATR5A, HEATR6, HEATR9, HECTD1, HELZ, HERC1, HERC2, HERPUD1, HES7, HEXA, HEXDC, HEXIM1, HEXIM2, HGS, HHIPL1, HIC1, HID1, HIF1A, HIGD1B, HIRIP3, HLF, HMG20A, HMOX2, HMSD, HN1, HN1L, HNF1B, HNRNPC, HOMER2, HOMEZ, HOXB1, HOXB13, HOXB2, HOXB3, HOXB4, HOXB5, HOXB6, HOXB7, HOXB8, HOXB9, HP, HPR, HRH4, HS3ST2, HS3ST3A1, HS3ST3B1, HS3ST4, HS3ST6, HSBP1, HSBP1L1, HSD11B2, HSD17B1, HSD17B2, HSD3B7, HDSL1, HSF4, HSF5, HSP90AA1, HSPA2, HSPB9, HYDIN, HYKK, HYPK, ICAM2, ICE2, ICT1, IDH2, IDH3A, IER3IP1, IFI27, IFI27L1, IFI27L2, IFI35, IFT140, IFT20, IFT43, IGDCC3, IGDCC4, IGF1R, IGF2BP1, IGFALS, IGFBP4, IGSF6, IKZF3, IL16, IL17C, IL21R, IL25, IL27, IL32, IL34, IL4R, IMP3, IMPA2, IMPACT, INAFM2, INCA1, INF2, INO80, INO80C, INO80E, INPP5K, INSM2, INTS2, IPO4, IQCH, IQCK, IQGAP1, IREB2, IRF2BPL, IRF8, IRF9, IRX3, IRX5, IRX6, ISCA2, ISG20, ISL2, ISLR, ISLR2, ISM2, IST1, ITFG1, ITFG3, ITGA11, ITGA2B, ITGA3, ITGAD, ITGAE, ITGAL, ITGAM, ITGAX, ITGB3, ITGB4, ITPK1, ITPKA, ITPR1PL2, IVD, JAG2, JDP2, JKAMP, JMJD6, JMJD7, JMJD7-PLA2G4B, JMJD8, JPH3, JPH4, JUP, KANSL1, KARS, KAT2A, KAT7, KAT8, KATNAL2, KATNB1, KATNBL1, KBTBD13, KCNAB3, KCNG2, KCNG4, KCNH4, KCNH5, KCNH16, KCNJ12, KCNJ16, KCNJ18, KCNJ2, KCNK10, KCNK13, KCTD1, KCTD11, KCTD13, KCTD19, KCTD2, KCTD5, KDM6B, KDM8, KDSR, KHNYN, KIAA0100, KIAA0101, KIAA0195, KIAA0391, KIAA0430, KIAA0513, KIAA0556, KIAA0586, KIAA0753, KIAA0895L, KIAA1024, KIAA1328, KIAA1468, KIAA1731NL, KIF18B, KIF19, KIF1C, KIF22, KIF23, KIF26A, KIF2B, KIF7, KIFC3, KLC1, KLF13, KLHDC1, KLHDC2, KLHDC4, KLHL10, KLHL11, KLHL14, KLHL25, KLHL28, KLHL33, KLHL36, KNOP1, KNSTRN, KPNA2, KPNB1, KRBA2, KREMEN2, KRT10, KRT12, KRT13, KRT14, KRT15, KRT16, KRT17, KRT19, KRT20, KRT222, KRT23, KRT24, KRT25, KRT26, KRT27, KRT28, KRT31, KRT32, KRT33A, KRT33B, KRT34, KRT35, KRT36, KRT37, KRT38, KRT39, KRT40, KRT9, KRTAP1-1, KRTAP1-3, KRTAP1-4, KRTAP1-5, KRTAP16-1, KRTAP17-1, KRTAP2-1, KRTAP2-2, KRTAP2-3, KRTAP2-4, KRTAP29-1, KRTAP3-1, KRTAP3-2, KRTAP3-3, KRTAP4-1, KRTAP4-11, KRTAP4-12, KRTAP4-2, KRTAP4-3, KRTAP4-4, KRTAP4-5, KRTAP4-6, KRTAP4-7, KRTAP4-8, KRTAP4-9, KRTAP9-1, KRTAP9-2, KRTAP9-3, KRTAP9-4, KRTAP9-6, KRTAP9-7, KRTAP9-8, KRTAP9-9, KSR1, KTN1, L2HGDH, L3HYPDH, L3MBTL4, LACTB, LAMA1, LAMA3, LARP6, LASP1, LAT, LCAT, LCMT1, LCMT2, LCTL, LDHAL6B, LDHD, LDLRAD4, LEO1, LEPREL4, LGALS3, LGALS3BP, LGALS9, LGALS9B, LGALS9C, LGMN, LHX1, LIG3, LIMD2, LIN52, LINGO1, LINS, LIPC, LIPG, LITAF, LLGL1, LLGL2, LMAN1, LMAN1L, LMAN1L, LOC100129697, LOC100130370, LOC100131303, LOC100134391, LOC100287036, LOC100505549, LOC100506388, LOC100862671, LOC101060321, LOC101060389, LOC101927322, LOC102723859, LOC102724862, LOC283710, LOC388282, LOC388436, LOC643802, LOC728392, LOC729159, LOC730183, LOC79999, LOC81691, LONP2, LOXHD1, LOXL1, LPCAT2, LPCAT4, LPIN2, LPO, LRFN5, LRP10, LRR1, LRRC16B, LRRC28, LRRC29, LRRC30, LRRC36, LARC37A, LRRC37A2, LRRC37A3, LRRC37B, LRRC3C, LRRC45, LRRC46, LRRC48, LRRC49, LRRC57, LRRC59, LRRC74A, LRRC75A, LRRK1, LSM12, LTB4R, LTB4R2, LTBP2, LTK, LUC7L, LUC7L3, LYRM1, LYRM9, LYSMD2, LYSMD4, LYZL6, MAF, MAFG, MAGEL2, MALT1, MAN2A2, MAN2C1, MAP1A, MAP1LC3B, MAP2K1, MAP2K3, MAP2K4, MAP2K5, MAP2K6, MAP3K14, MAP3K3, MAP3K9, MAP4K5, MAPK1IP1L, MAPK3, MAPK4, MAPK6, MAPK7, MAPK8IP3, MAPKBP1, MAPRE2, MAPT, MARCH10, MARK3, MARVELD3, MAX, MAZ, MBD1, MBD2, MBIP, MBP, MBTD1, MBTPS1, MC1R, MC2R, MC4R, MC5R, MCTP2, MDGA2, MDP1, ME2, MED1, MED11, MED13, MED24, MED31, MED6, MED9, MEF2A, MEFV, MEGF11, MEIOB, MEIS2, MEOX1, MEP1B, MESDC1, MESDC2, MESP1, MESP2, METRN, METRNL, METTL16, METTL17, METTL22, METTL23, METTL2A, METTL3, METTL4, METTL9, MEX3B, MEX3C, MFAP1, MFAP4, MFGE8, MFSD11, MFSD6L, MGA, MGAT2, MGAT5B, MGC57346-CRHR1, MGRN1, MIA2, MIB1, MIEF2, MIEN1, MIF4GD, MILR1, MINK1, MIPOL1, MIS12, MIS18BP1, MKL2, MKRN3, MKS1, MLH3, MLKL, MLLT6, MLST8, MLX, MLYCD, MMD, MMP14, MMP15, MMP2, MMP25, MMP28, MNAT1, MNS1, MNT, MOAP1, MOCOS, MOK, MON1B, MORF4L1, MPDU1, MPG, MPHOSPH6, MPI, MPO, MPP2, MPP3, MPP5, MPPE1, MPRIP, MPV17L, MRC2, MRM1, MRO, MRPL10, MRPL12, MRPL27, MRPL28, MRPL38, MRPL45, MRPL46, MRPL52, MRPS11, MRPS23, MRPS34, MRPS7, MSI2, MSL1, MSLN, MSRB1, MT1A, MT1B, MT1E, MT1F, MT1G, MT1H, MT1M, MT1X, MT2A, MT3, MT4, MTA1, MTCL1, MTFMT, MTHFD1, MTHFS, MTHFSD, MTMR10, MTMR4, MTRNR2L1, MTRNR2L4, MTSS1L, MVD, MVP, MXRA7, MYADML2, MYBBP1A, MYCBPAP, MYEF2, MYH1, MYH10, MYH11, MYH13, MYH2, MYH3, MYH4, MYH6, MYH7, MYH8, MYL12A, MYL12B, MYL4, MYLK3, MYLPF, MYO15A, MYO18A, MYO19, MYO1C, MYO1D, MYO1E, MYO5A, MYO5B, MYO5C, MYO9A, MYOCD, MYOM1, MYZAP, N4BP1, NAA30, NAA38, NAA60, NACA2, NAE1, NAGLU, NAGPA, NAGS, NAPG, NARF, NARFL, NARR, NARS, NAT9, NATD1, NBR1, NCOR1, NDC80, NDE1, NDEL1, NDN, NDNL2, NDRG2, NDRG4, NDUFAB1, NDUFAF1, NDUFB1, NDUFB10, NDUFV2, NECAB2, NEDD4, NEDD4L, NEDD8, NEDD8-MDP1, NEIL1, NEK8, NEK9, NEMF, NEO1, NETO1, NETO2, NEURL4, NEUROD2, NF1, NFAT5, NFATC1, NFATC2IP, NFATC3, NFATC4, NFE2L1, NFKBIA, NGB, NGDN, NGFR, NGRN, NHLRC4, NID2, NIN, NIP7, NIPA1, NIPA2, NKD1, NKIRAS2, NKX2-1, NKX2-8, NLE1, NLGN2, NLK, NLRC3, NLRC5, NLRP1, NMB, NME1, NME1-NME2, NME2, NME3, NME4, NMRAL1, NMT1, NOB1, NOD2, NOG, NOL11, NOL3, NOL4, NOMO1, NOMO2, NOMO3, NOP10, NOP9, NOS2, NOTUM, NOVA1, NOX5, NOXO1, NOXRED1, NPAP1, NPAS3, NPB, NPC1, NPC2, NPEPPS, NPIPA1, NPIPA2, NPIPA3, NPIPA5, NPIPA7, NPIPA8, NPIPB3, NPIPB5, NPIPB6, NPIPB9, NPLOC4, NPRL3, NPTN, NPTX1, NPW, NQO1, NR1D1, NR2E3, NR2F2, NRDE2, NRG4, NRL, NRN1L, NRXN3, NSF, NSMCE1, NSRP1, NT5C, NT5C3B, NT5M, NTAN1, NTHL1, NTN1, NTN3, NTRK3, NUBP1, NUBP2, NUBPL, NUDT14, NUDT16L1, NUDT21, NUDT7, NUFIP2, NUMB, NUP85, NUP88, NUP93, NUPR1, NUSAP1, NUTF2, NUTM1, NXN, NXPH3, NYNRIN, OAZ2, OCA2, ODF3L1, ODF4, OGFOD1, OGFOD3, OIP5, OMG, ONECUT1, ONECUT2, OR10G2, OR10G3, OR11G2, OR11H12, OR11H2, OR11H4, OR11H6, OR1A1, OR1A2, OR1D2, OR1D5, OR1E1, OR1E2, OR1F1, OR1G1, OR2C1, OR3A1, OR3A2, OR3A3, OR4D1, OR4D2, OR4E2, OR4F15, OR4F4, OR4F6, OR4K1, OR4K13, OR4K14, OR4K15, OR4K17, OR4K2, OR4K5, OR4L1, OR4M1, OR4M2, OR4N2, OR4N4, OR4N5, OR4Q3, OR5AU1, OR6S1, ORAI3, ORC6, ORMDL3, OSBPL1A, OSBPL7, OSGEP, OSGIN1, OTOA, OTOP2, OTOP3, OTUB2, OTUD7A, OTX2, OVCA2, OXA1L, OXLD1, P2RX1, P2RX5, P4HB, PABPN1, PABPN1L, PACS2, PAFAH1B1, PAGR1, PAK6, PALB2, PAM16, PAPD5, PAPLN, PAPOLA, PAQR4, PAQR5, PARD6A, PARD6G, PARN, PARP16, PARP2, PARP6, PATL2, PAX9, PCGF2, PCK2, PCNX, PCNXL4, PCSK6, PCTP, PCY2, PDCD7, PDE6G, PDE8A, PDF, PDIA2, PDIA3, PDILT, PDK2, PDP2, PDPK1, PDPR, PDXDC1, PDZD9, PEAK1, PECAM1, PELI2, PELP1, PEMT, PER1, PEX11A, PEX12, PFAS, PFN1, PGAP3, PGBD4, PGF, PGP, PGPEP1L, PGS1, PHB, PHF12, PHF23, PHGR1, PHKB, PHKG2, PHLPP1, PHLPP2, PHOSPHO1, PIAS1, PIAS2, PIEZO1, PIEZO2, PIF1, PIGB, PIGH, PIGL, PIGN, PIGQ, PIGS, PIGW, PIK3C3, PIK3R5, PIK3R6, PIP4K2B, PIPOX, PIRT, PITPNA, PITPNC1, PITPNM3, PKD1, PKD1L2, PKD1L3, PKM, PKMYT1, PLA2G10, PLA2G15, PLA2G4B, PLA2G4D, PLA2G4E, PLA2G4F, PLCB2, PLCD3, PLCG2, PLD2, PLD4, PLD6, PLEK2, PLEKHD1, PLEKHG3, PLEKHG4, PLEKHH1, PLEKHH3, PLEKHM1, PLEKHO2, PLIN1, PLK1, PLLP, PLSCR3, PLXDC1, PMAIP1, PMFBP1, PML, PMM2, PMP22, PNMA1, PNMT, PNN, PNP, PNPO, POLDIP2, POLE2, POLG, POLG2, POLI, POLR2A, POLR2C, POLR2M, POLR3E, POLR3K, POMT2, POTEB, POTEB2, POTEB3, POTEC, POTEG, POTEM, PPCDC, PPM, PPIP5K1, PPL, PPM1 A, PPM1D, PPM1E, PPP1R13B, PPP1R14D, PPP1R1B, PPP1R27, PPP1R36, PPP1R3E, PPP1R9B, PPP2R3C, PPP2R5C, PPP2R5E, PPP4C, PPP4R1, PPP4R4, PPY, PQLC1, PRAC1, PRAC2, PRC1, PRCD, PRDM7, PRIMA1, PRKAR1A, PRKCA, PRKCB, PRKCH, PRKD1, PRM1, PRM2, PRM3, PRMT5, PRMT7, PROCA1, PROX2, PRPF39, PRPF8, PRPSAP1, PRPSAP2, PRR15, PRR14, PRR15L, PRR25, PRR29, PRR35, PRRT2, PRSS21, PRSS22, PRSS27, PRSS33, PRSS36, PRSS41, PRSS53, PRSS54, PRSS8, PRTG, PSEN1, PSKH1, PSMA3, PSMA4, PSMA6, PSMA8, PSMB10, PSMB11, PSMB3, PSMB5, PSMB6, PSMC1, PSMC3IP, PSMC5, PSMC6, PSMD11, PSMD12, PSMD3, PSMD7, PSME1, PSME2, PSME3, PSMG2, PSTPIP1, PSTPIP2, PTGDR, PTGER2, PTGES3L, PTGES3L-AARSD1, PTGR2, PTPLAD1, PTPN2, PTPN21, PTPN9, PTPRM, PTRF, PTRH2, PTX4, PYCARD, PYCR1, PYDC1, PYGL, PYGO1, PYY, QPRT, QRICH2, RAB11A, RAB11FIP3, RAB11FIP4, RAB12, RAB15, RAB26, RAB27A, RAB27B, RAB2B, RAB31, RAB34, RAB37, RAB40B, RAB40C, RAB5C, RAB8B, RABEP1, RABEP2, RABGGTA, RAC3, RAD51, RAD51B, RAD51C, RAD51D, RA11, RALBP1, RALGAPA1, RAMP2, RANBP10, RANGRF, RAP1GAP2, RAPGEFL1, RARA, RASD1, RASGRF1, RASGRP1, RASL10B, RASL12, RAX, RBBP6, RBBP8, RBFA, RBFOX3, RBL2, RBM23, RBM25, RBPMS2, RCCD1, RCN2, RCOR1, RCVRN, RD3L, RDH11, RDH12, RDM1, REC114, REC8, RECQL5, REM2, RFFL, RFNG, RFWD3, RFX7, RGMA, RGS11, RGS6, RGS9, RHBDF1, RHBDF2, RHBDL1, RHBDL3, RHCG, RHOJ, RHOT1, RHOT2, RHOV, RILP, RIN3, RIOK3, RIPK3, RIT2, RLBP1, RLTPR, RMDN3, RMI12, RNASE1, RNASE10, RNASE11, RNASE12, RNASE13, RNASE2, RNASE3, RNASE4, RNASE6, RNASE7, RNASE8, RNASE9, RNASEK, RND2, RNF111, RNF112, RNF125, RNF135, RNF138, RNF151, RNF152, RNF157, RNF165, RNF166, RNF167, RNF212B, RNF213, RNF222, RNF31, RNF40, RNF43, RNFT1, RNMT, RNMTL1, RNPS1, ROCK1, ROGDI, RORA, RPA1, RPAIN, RPAP1, RPGRIP1, RPGRIP1L, RPH3AL, RPL10L, RPL13, RPL17, RPL17-C18orf32, RPL19, RPL23, RPL23A, RPL26, RPL27, RPL36AL, RPL38, RPL3L, RPL4, RPLP1, RPP25, RPRD1A, RPRML, RPS15A, RPS17, RPS2, RPS27L, RPS29, RPS6KA5, RPS6KB1, RPS6KL1, RPTOR, RPUSD1, RPUSD2, RRAD, RRN3, RSAD1, RSL1D1, RSL24D1, RSPRY1, RTF1, RTL1, RTN1, RTN4RL1, RTTN, RUNDC1, RUNDC3A, RYR3, SALL1, SALL2, SALL3, SAMD14, SAMD15, SAMD4A, SAP30BP, SARM1, SAT2, SAV1, SBK1, SCAMP2, SCAMP5, SCAPER, SCARF1, SCFD1, SCG3, SCG5, SCGB1C2, SCIMP, SCN4A, SCNN1B, SCNN1G, SCO1, SCPEP1, SCRN2, SDF2, SDK2, SDR39U1, SDR42E1, SEBOX, SEC11A, SEC11C, SEC14L1, SEC14L5, SEC23A, SECISBP2L, SECTM1, SEH1L, SEL1L, SEMA4B, SEMA6D, SEMA7A, SENP3, SENP8, SEPHS2, SEPT1, SEPT12, SEPT4, SEPT9, SERF2, SERINC4, SERPINA1, SERPINA10, SERPINA11, SERPINA12, SERPINA2, SERPINA3, SERPINA4, SERPINA5, SERPINA6, SERPINA9, SERPINB10, SERPINB11, SERPINB12, SERPINB13, SERPINB2, SERPINB3, SERPINB4, SERPINB5, SERPINB7, SERPINB8, SERPINF1, SERPINF2, SETBP1, SETD1A, SETD3, SETD6, SEZ6, SEZ6L2, SF3B3, SFTA3, SGCA, SGK494, SGPP1, SGSH, SGSM2, SH2B1, SH2D7, SH3GL3, SHBG, SHC4, SHCBP1, SHF, SHISA6, SHISA9, SHMT1, SHPK, SIAH1, SIGLEC15, SIN3A, SIPA1L1, SIRT7, SIVA1, SIX1, SIX4, SIX6, SKA1, SKA2, SKAP1, SKOR1, SKOR2, SLC10A1, SLC12A1, SLC12A3, SLC12A4, SLC12A6, SLC13A2, SLC13A5, SLC14A1, SLC14A2, SLC16A11, SLC16A13, SLC16A3, SLC16A5, SLC16A6, SLC22A17, SLC22A31, SLC24A1, SLC24A4, SLC24A5, SLC25A10, SLC25A11, SLC25A19, SLC25A21, SLC25A29, SLC25A35, SLC25A39, SLC25A47, SLC25A52, SLC26A11, SLC27A2, SLC28A1, SLC28A2, SLC2A4, SLC30A4, SLC35B1, SLC35F4, SLC35G3, SLC35G4, SLC35G6, SLC38A10, SLC38A6, SLC38A7, SLC38A8, SLC39A11, SLC39A2, SLC39A6, SLC39A9, SLC43A2, SLC46A1, SLC47A1, SLC47A2, SLC4A1, SLC51B, SLC52A1, SLC5A10, SLC5A11, SLC5A2, SLC6A2, SLC6A4, SLC7A5, SLC7A6, SLC7A6OS, SLC7A7, SLC7A8, SLC8A3, SLC9A3R1, SLC9A3R2, SLC9A5, SLCO3A1, SLFN11, SLFN12, SLFN12L, SLFN13, SLFN14, SLFN5, SLIRP, SLMO1, SLTM, SLX1A, SLX1B, SLX4, SMAD2, SMAD3, SMAD4, SMAD6, SMAD7, SMARCD2, SMARCE1, SMCHD1, SMCR8, SMEK1, SMG1, SMG6, SMG8, SMIM21, SMIM22, SMIM5, SMIM6, SMOC1, SMPD3, SMTNL2, SMURF2, SMYD4, SNAI3, SNAP23, SNAPC1, SNAPC5, SNF8, SNN, SNRNP25, SNRPA1, SNRPD1, SNRPN, SNTB2, SNUPN, SNURF, SNW1, SNX1, SNX11, SNX20, SNX22, SNX29, SNX33, SNX6, SOCS1, SOCS3, SOCS4, SOCS6, SOCS7, SORD, SOS2, SOST, SOX15, SOX8, SOX9, SP2, SP6, SPACA3, SPAG5, SPAG7, SPAG9, SPATA20, SPATA22, SPATA2L, SPATA32, SPATA33, SPATA5L1, SPATA7, SPATA8, SPDYE4, SPECC1, SPEM1, SPESP1, SPG11, SPG21, SPG7, SPHK1, SPINT1, SPIRE1, SPIRE2, SPN, SPNS1, SPNS2, SPNS3, SPOP, SPPL2A, SPPL2C, SPRED1, SPSB3, SPTB, SPTBN5, SPTLC2, SPTSSA, SQRDL, SRCAP, SRCIN1, SREBF1, SRL, SRP14, SRP54, SRP68, SRR, SRRM2, SRSF1, SRSF2, SRSF5, SS18, SSH2, SSTR1, SSTR2, SSTR5, ST20, ST20-MTHFS, ST3GAL2, ST6GALNAC1, ST6GALNAC2, ST8SIA2, ST8SIA3, ST8SIA5, STAC2, STARD3, STARD5, STARD6, STARD9, STAT3, STAT5A, STAT5B, STH, STOML1, STON2, STRA13, STRA6, STRADA, STRC, STRN3, STUB1, STX1B, STX4, STX8, STXBP4, STXBP6, STYX, SULT1A1, SULT1A2, SULT1A3, SULT1A4, SUMO2, SUPT16H, SUPT4H1, SUPT6H, SUSD6, SUZ12, SV13, SYCE1L, SYNDIG1L, SYNE2, SYNE3, SYNGR2, SYNGR3, SYNJ2BP, SYNJ2BP-COX16, SYNM, SYNRG, SYT16, SYT17, SYT4, TAC4, TACO1, TADA2A, TAF15, TAF1C, TAF4B, TANC2, TANGO6, TAOK1, TAOK2, TARSL2, TAT, TAX1BP3, TBC1D10B, TBC1D16, TBC1D21, TBC1D24, TBC1D26, TBC1D28, TBC1D29, TBC1D2B, TBC1D3, TBC1D3B, TBC1D3C, TBC1D3F, TBC1D3H, TBC1D3K, TBC1D3L, TBCD, TBKBP1, TBL3, TBPL2, TBX2, TBX21, TBX4, TBX6, TC2N, TCAP, TCEB2, TCEB3B, TCEB3C, TCEB3CL, TCEB3CL2, TCF12, TCF25, TCF4, TCL1A, TCL1B, TDP1, TDRD9, TECPR2, TEFM, TEKT1, TEKT3, TEKT5, TELO2, TEN1, TEP1, TEPP, TERF2, TERF2IP, TEX14, TEX19, TEX2, TEX22, TEX9, TEAP4, IGFB1I1, TGFB3, TGIF1, TGM5, TGM5, TGM7, THAP10, THAP11, THBS1, THOC1, THOC6, THRA, THSD4, THTPA, THUMPD1, TIAF1, TICRR, TIGD7, TIMM21, TIMM22, TIMM9, TIMP2, TINF2, TIPIN, TJP1, TK1, TK2, TLCD1, TLCD2, TLDC1, TLE3, TLK2, TLN2, TM2D3, TM4SF5, TM6SF1, TM9SF1, TMC3, TMC5, TMC6, TMC7, TMC8, TMCO5A, TMED10, TMED3, TMED6, TMED8, TMEM100, TMEM101, TMEM102, TMEM104, TMEM105, TMEM106A, TMEM107, TMEM11, TMEM114, TMEM121, TMEM132E, TMEM159, TMEM170A, TMEM179, TMEM186, TMEM199, TMEM200C, TMEM202, TMEM204, TMEM208, TMEM219, TMEM220, TMEM229B, TMEM231, TMEM235, TMEM241, TMEM251, TMEM253, TMEM256, TMEM260, TMEM30B, TMEM55B, TMEM62, TMEM63C, TMEM87A, TMEM88, TMEM8A, TMEM92, TMEM95, TMEM97, TMEM98, TMEM99, TMIGD1, TMOD2, TMOD3, TMUB2, TMX1, TMX3, TNFAIP1, TNFAIP2, TNFAIP8L3, TNFRSF11A, TNFRSF12A, TNFRSF13B, TNFRSF17, TNFSF12, TNFSF12-TNFSF13, TNFSF13, TNK1, TNP2, TNRC6A, TNRC6C, TNS4, TOB1, TOM1L1, TOM1L2, TOMM20L, TOP2A, TOP3A, TOX3, TOX4, TP53, TP53BP1, TP53I13, TP53TG3, TP53TG3B, TP53TG3C, TP53TG3D, TPGS2, TPM1, TPPP2, TPPP3, TPSAB1, TPSB2, TPSD1, TPSG1, TRADD, TRAF3, TRAF4, TRAF7, TRAP1, TRAPPC1, TRAPPC2L, TRAPPC6B, TRAPPC8, TRIM16, TRIM16L, TRIM25, TRIM37, TRIM47, TRIM65, TRIM69, TRIM72, TRIM9, TRIP11, TRIP4, TRMT5, TRMT61A, TRPM1, TRPM7, TRPV1, TRPV2, TRPV3, TSC2, TSEN54, TSHR, TSHZ1, TSNAXIP1, TSPAN10, TSPAN3, TSR1, TSR3, TSSK4, TTBK2, TTC19, TTC23, TTC25, TTC39C, TTC5, TTC7B, TTC8, TTC9, TTLL5, TTLL6, TTR, TTYH2, TUBB3, TUBB6, TUBD1, TUBG1, TUBG2, TUBGCP4, TUBGCP5, TUFM, TUSC5, TVP23A, TVP23B, TVP23C, TVP23C-CDRT4, TWSG1, TXNDC11, TXNDC16, TXNDC17, TXNDC2, TXNL1, TXNL4A, TXNL4B, TYMS, TYMSOS, TYRO3, UACA, UBALD1, UBALD2, UBAP1L, UBB, UBE2G1, UBE2I, UBE2O, UBE2Q2, UBE2Q2L, UBE2Z, UBE3A, UBFD1, UBL7, UBN1, UBR1, UBR7, UBTF, ULK2, ULK3, UMOD, UNC119, UNC13C, UNC13D, UNC45A, UNC45B, UNC79, UNK, UNKL, UQCRC2, USB1, USH1G, USP10, USP14, USP22, USP3, USP31, USP32, USP36, USP43, USP50, USP6, USP7, USP8, UTP18, UTP6, UTS2R, VAC14, VAMP2, VAPA, VASH1, VASN, VAT1, VAT1L, VCPKMT, VEZF1, VIMP, VIPAS39, VKORC1, VMO1, VMP1, VPS13C, VPS18, VPS25, VPS33B, VPS35, VPS39, VPS4A, VPS4B, VPS53, VPS9D1, VRK1, VRTN, VSX2, VTI1B, VTN, VWA3A, VWA9, WARS, WBP2, WDHD1, WDR20, WDR24, WDR25, WDR45B, WDR59, WDR61, WDR7, WDR72, WDR73, WDR76, WDR81, WDR89, WDR90, WDR93, WFDC1, WFIKKN1, WFIKKN2, WHAMM, WIPF2, WIPI1, WNK4, WNT3, WNT9B, WRAP53, WSB1, WSCD1, WWOX, WWP2, XAF1, XPO6, XRCC3, XYLT1, XYLT2, YBX2, YES1, YLPM1, YPEL2, YPEL3, YWHAE, YY1, ZACN, ZADH2, ZBTB1, ZBTB14, ZBTB25, ZBTB4, ZBTB42, ZBTB7C, ZC2HC1C, ZC3H14, ZC3H18, ZC3H7A, ZCCHC14, ZCCHC2, ZDHHC1, ZDHHC22, ZDHHC7, ZFAND6, ZFHX2, ZFHX3, ZFP1, ZFP3, ZFP36L1, ZFP90, ZFRM1, ZFYVE1, ZFYVE19, ZFYVE21, ZFYVE26, ZG16, ZG16B, ZKSCAN2, ZMYND15, ZNF106, ZNF174, ZNF19, ZNF200, ZNF205, ZNF207, ZNF213, ZNF219, ZNF23, ZNF232, ZNF236, ZNF24, ZNF263, ZNF267, ZNF276, ZNF280D, ZNF286A, ZNF286B, ZNF287, ZNF319, ZNF385C, ZNF396, ZNF397, ZNF407, ZNF410, ZNF423, ZNF469, ZNF48, ZNF500, ZNF516, ZNF519, ZNF521, ZNF532, ZNF592, ZNF594, ZNF597, ZNF598, ZNF609, ZNF624, ZNF629, ZNF646, ZNF652, ZNF668, ZNF688, ZNF689, ZNF710, ZNF720, ZNF747, ZNF750, ZNF75A, ZNF764, ZNF768, ZNF770, ZNF771, ZNF774, ZNF778, ZNF785, ZNF821, ZNF830, ZNF839, ZNF843, ZNHIT3, ZNRF1, ZP2, ZPBP2, ZSCAN10, ZSCAN2, ZSCAN29, ZSCAN30, ZSCAN32, ZSWIM7, ZWILCH and ZZEF1, target genes located on chromosomes 19, X or Y including A1BG, A4GALT, AAR2, ABCA7, ABCB7, ABCD1, ABCG1, ABHD12, ABHD16B, ABHD17A, ABHD8, ACE2, ACER1, ACO2, ACOT8, ACOT9, ACP5, ACPT, ACR, ACRC, ACSBG2, ACSL4, ACSS1, ACSS2, ACTL10, ACTL9, ACTN4, ACTR5, ACTRT1, ADA, ADAM33, ADAMTS1, ADAMTS10, ADAMTS5, ADAMTSL5, ADARB1, ADAT3, ADCK4, ADIG, ADM2, ADM5, ADNP, ADORA2A, ADRA1D, ADRBK2, ADRM1, ADSL, AES, AFF2, AGPAT3, AGTR2, AHCY, AIFM1, AIFM3, AIRE, AKAP14, AKAP17A, AKAP4, AKAP8, AKAP8L, AKT1S1, AKT2, ALAS2, ALDH16A1, ALG12, ALG13, ALKBH6, ALKBH7, AMELX, AMER1, AMH, AMMECR1, AMOT, ANGPT4, ANGPTL4, ANGPTL6, ANKEF1, ANKLE1, ANKRD24, ANKRD27, ANKRD54, ANO8, AP1B1, AP1M1, AP1M2, AP1S2, AP2A1, AP2S1, AP3D1, AP5S1, APBA3, APC2, APCDD1L, APEX2, APLN, APLP1, APMAP, APOBEC3A, APOBEC3A_B, APOBEC3B, APOBEC3C, APOBEC3D, APOBEC3F, APOBEC3G, APOBEC3H, APOC1, APOC2, APOC4, APOE, APOL1, APOL2, APOL3, APOL4, APOL5, APOL6, APOO, APOOL, APP, AR, ARAF, ARFGAP1, ARFGAP3, ARFGEF2, ARFRP1, ARHGAP33, ARHGAP35, ARHGAP36, ARHGAP4, ARHGAP40, ARHGAP6, ARHGAP8, ARHGEF1, ARHGEF18, ARHGEF6, ARHGEF9, ARID3 A, ARL13 A, ARMC6ARMCX1, ARMCX2, ARMCX3, ARMCX4, ARMCX5, ARMCX5-GPRASP2, ARMCX6ARR3, ARRDC2, ARRDC5, ARSA, ARSD, ARSE, ARSF, ARSH, ARVCF, ARX, ASB11, ASB12, ASB9, ASCC2, ASF1B, ASIP, ASMT, ASNMTL, ASNA1, ASPDH, ASPHD2, ASXL1, ATCAY, ATF4, ATF5, ATG4A, ATG4D, ATP11C, ATP13A1, ATP1A3, ATP1B4, ATP2B3, ATP4A, ATP5D, ATP5E, ATP5J, ATP5L2, ATP5O, ATP6AP1, ATP6AP2, ATP6V1E1, ATP7A, ATP8I3, ATP9A, ATRN, ATRX, ATXN10, ATXN3L, AURKA, AURKC, AVP, AVPR2, AWAT1, AWAT2, AXL, AZU1, B3GALT5, B3GNT3, B3GNT8, B4GALT5, B9D2, BABAM1, BACE2, BACH1, BAGE, BAGE2, BAGE3, BAGE4, BAGE5, BAIAP2L2, BANF2, BAX, BBC3, BCAM, BCAP31, BCAS1, BCAS4, BCAT2, BCKDHA, BCL2L1, BCL2L12, BCL2L13, BCL3, BCOR, BCORL1, BCR, BEND2, BEST2, BEX1, BEX2, BEX4, BEX5, BFSP1, BGN, BHLHB9, BHLHE23, BID, BIK, BIRC7, BIRC8, BLCAP, BLOC1S3, BLVRB, BMP15, BMP2, BMP7, BMX, BPI, BPIFA1, BPIFA2, BPIFA3, BPIFB1, BPIFB2, BPIFB3, BPIFB4, BPIFB6, BPIFC, BRCC3, BRD1, BRD4, BRS3, BRSK1, BRWD1, BRWD3, BSG, BSPH1, BST2, BTBD2, BTBD3, BTG3, BTK, C19orf10, C19orf12, C19orf18, C19orf24, C19orf25, C19orf26, C19orf33, C19orf35, C19orf38, C19orf40, C19orf43, C19orf44, C19orf45, C19orf47, C19orf48, C19orf52, C19orf53, C19orf54, C19orf57, C19orf60, C19orf66, C19orf67, C19orf68, C19orf70, C19orf71, C19orf73, C19orf80, C19orf81, C19orf83, C19orf84, C1GALT1C1, C1QTNF6, C20orf141, C20orf144, C20orf173, C20orf194, C20orf195, C20orf196, C20orf197, C20orf202, C20orf203, C20orf24, C20orf27, C20orf62, C20orf78, C20orf85, C20orf96, C21orf140, C21orf2, C21orf33, C21orf58, C21orf59, C21orf62, C21orf91, C22orf1 5, C22orf23, C22orf24, C22orf29, C22orf31, C22orf34, C22orf39, C22orf42, C22orf46, C2CD2, C2CD4C, C3, C5AR1, C5AR2, CA11, CA5B, CABIN1, CABLES2, CARP5, CABP7, CACNA1A, CACNA1F, CACNA1I, CACNG2, CACNG6, CACNG7, CACNG8, CACTIN, CADM4, CALM3, CALR, CALR3, CAMSAP3, CAPN12, CAPN6, CAPNS1, CAPS, CARD10, CARD8, CARM1, CASK, CASP14, CASS4, CATSPERD, CATSPERG, CBFA2T2, CBLC, CBLN4, CBR1, CBR3, CBS, CBX6, CBX7, CBY1, CC2D1A, CCDC105, CCDC106, CCDC114, CCDC116, CCDC117, CCDC120, CCDC124, CCDC130, CCDC134, CCDC151, CCDC155, CCDC157, CCDC159, CCDC160, CCDC22, CCDC61, CCDC8, CCDC9, CCDC94, CCDC97, CCER2, CCL25, CCM2L, CCNB3, CCNE1, CCT8, CCT8L2, CD177, CD209, CD22, CD320, CD33, CD37, CD3EAP, CD40, CD40LG, CD70, CD79A, CD93, CD97, CD99, CD99L2, CDC25B, CDC34, CDC37, CDC42EP1, CDC42EP5, CDC45, CDH22, CDH26, CDH4, CDK16, CDK5RAP1, CDKL5, CDKN2D, CDPF1, CDR1, CDS2, CDX4, CEACAM1, CEACAM16, CEACAM18, CEACAM19, CEACAM20, CEACAM21, CEACAM3, CEACAM4, CEACAM5, CEACAM6, CEACAM7, CEACAM8, CEBPB, CEBPG, CECR1, CECR2, CECR5, CECR6, CELF5, CELSR1, CENPB, CENPI, CENPM, CEP250, CEP89, CERK, CERS1, CERS4, CETN2, CFAP61, CFD, CFP, CGB, CGB1, CGB2, CGB5, CGB7, CGB8, CHADL, CHAF1A, CHAF1B, CHCHD10, CHD6, CHDC2, CHEK2, CHERP, CHGB, CHIC1, CHKB, CHM, CHMP2A, CHMP4B, CHODL, CHRDL1, CHRNA4, CHST7, CHST8, CIB3, CIC, CILP2, CIRBP, CITED1, CKM, CLASRP, CLC, CLCN4, CLCN5, CLDN14, CLDN17, CLDN2, CLDN5, CLDN8, CLDND2, CLEC11A, CLEC17A, CLEC4G, CLEC4M, CLIC2, CLIC6, CLIP3, CLPP, CLPTM1, CLTCL1, CMC4, CNBD2, CNFN, CNGA2, CNKSR2, CNN1, CNN2, CNOT3, CNTD2, COL18A1, COL20A1, COL4A5, COL4A6, COL5A3, COL6A1, COL6A2, COL9A3, COLGALT1, COMMD7, COMP, COMT, COPE, COX4I2, COX6B1, COX6B2, COX7A1, COX7B, CPAMD8, CPNE1, CPT1B, CPT1C, CPXCR1, CPXM1, CRB3, CREB3L3, CRELD2, CRKL, CRLF1, CRLF2, CRLS1, CRNKL1, CRTC1, CRX, CRYAA, GRYBA4, CRYBB1, CRYBB2, CRYBB3, CRYZL1, CSAG1, CSAG3, CSDC2, CSE1L, CSF2RA, CSF2RB, CSNK1E, CSNK1G2, CSNK2A1, CSRP2BP, CST1, CST11, CST2, CST3, CST4, CST5, CST7, CST8, CST9, CST9L, CSTB, CSTF1, CSTF2, CSTL1, CT45A1, CT45A10, CT45A2, CT45A3, CT45A4, CT45A5, CT45A6, CT45A7, CT45A8, CT45A9, CT47A1, CT47A10, CT47A11, CT47A12, CT47A2, CT47A3, CT47A4, CT47A5, CT47A6, CT47A7, CT47A8, CT47A9, CT47B1, CT55, CT83, CTAG1A, CTAG1B, CTAG2, CTCFL, CTNNB1, CTPS2, CTSZ, CTU1, CTXN1, CUL4B, CXADR, CXCL17, CXCR3, CXorf21, CXorf22, CXort23, CXorf30, CXorf36, CXorf38, CXorf40A, CXorf40B, CXorf49, CXorf49B, CXorf51A, CXorf51B, CXorf56, CXorf57, CXorf58, CXorf65, CXorf66, CXorf67, GYB5R3, CYBB, CYLC1, CYP24A1, CYP2A13, CYP2A6, CYP2A7, CYP2B6, CYP2D6, CYP2F1, CYP2S1, CYP4F11, CYP4F12, CYP4F2, CYP4F22, CYP4F3, CYP4F8, CYSLTR1, CYTH2, CYTH4, CYYR1, DACH2, DACT3, DANDS, DAPK3, DAZAP1, DBNDD2, DBP, DCAF12l1, DCAF12L2, DCAF15, DCAF8L1, DCAF8L2, DCX, DDA1, DDRGK1, DDT, DDTL, DDX17, DDX26B, DDX27, DDX39A, DDX3X, DDX49, DDX53, DEDD2, DEFB115, DEFB116, DEFB118, DEFB119, DEFB121, DEFB123, DEFB124, DEFB125, DEFB126, DEFB127, DEFB128, DEFB129, DEFB132, DENND1C, DENND6B, DEPDC5, DERL3, DESI1, DGAT2L6, DGCR14, DGCR2, DGCR6, DGCR6L, DGCR8, DGKK, DHDH, DHPS, DHRSX, DHX34, DHX35, DIAPH2, DIDO1, DIP2A, DIRAS1, DKC1, DKKL1, DLG3, DLGAP4, DLL3, DMC1, DMD, DMKN, DMPK, DMRTC1, DMRTC1B, DMRTC2, DMWD, DNAAF3, DNAJB1, DNAJB7, DNAJC28, DNAJC5, DNAL4, DNASE1L1, DNASE2, DNM2, DNMT1, DNMT3B, DNMT3L, DNTTIP1, DOCK11, DOCK6, DOHH, DOK5, DONSON, DOPEY2, DOT1L, DPFI, DPH3P1, DPM1, DPP9, DPP9-AS1, DPRX, DPY19L3, DRG1, DRICH1, DRP2, DSCAM, DSCR3, DSCR4, DSN1, DSTN, DTD1, DUS3L, DUSP15, DUSP18, DUSP21, DUSP9, DUXA, DYNLRB1, DYNLT3, DYRK1A, DYRK1B, DZANK1, E2F1, EBE4, EB3, EBP, ECH1, ECSIT, EDA, EDA2R, EDEM2, EDN3, EEF1A2, EEF2, EFCAB6, EFHC2, EFNA2, EFNB1, EGFL6, EGLN2, EHD2, EID2, EID2B, EIF1AX, EIF2S2, EIF2S3, EIF3D, EIF3G, EIF3K, EIF3L, EIF4ENIF1, EIF6, ELANE, ELAVL1, ELAVL3, ELF4, ELFN2, ELK1, ELL, ELMO2, ELOF1, ELSPBP1, ENC10, EMD, EMID1, EMILIN3, EML2, EMP3, EMR1, EMR2, EMR3, ENOX2, ENTHD1, ENTPD6, EP300, EPB41L1, EPHX3, EPN1, EPOR, EPPIN, EPPIN-WFDC6, EPS15L1, EPS8L1, ERAS, ERCC1, ERCC2, ERCC6L, ERF, ERG, ERGIC3, ERICH4, ERVV-1, ERVV-2, ESF1, ESX1, ETFB, ETHE1, ETS2, ETV2, EVA1C, EVI5L, EWSRI, EXOC3L2, EXOSC5, EYA2, F2RL3, F8, F8A1, F8A2, F8A3, F9, FAAH2, FAM104B, FAM109B, FAM110A, FAM118A, FAM120C, FAM122B, FAM122C, FAM127A, FAM127B, FAM127C, FAM129C, FAM133A, FAM155B, FAM156A, FAM156B, FAM187B, FAM199X, FAM19A5, FAM207A, FAM209A, FAM209B, FAM210B, FAM217B, FAM227A, FAM32A, FAM3A, FAM3B, FAM46D, FAM47A, FAM47B, FAM47C, FAM50A, FAM58A, FAN165C, FAM71E1, FAM71E2, FAM83C, FAM83D, FAM83E, FAM83F, FAM98C, FAM9A, FAM9B, FAM9C, FAM9C, FANCB, FARSA, FASTKD5, FATE1, FBL, FBLN1, FBN3, FBXL12, FBXO17, FBXO27, FBXO46, FBXO7, FBXW9, FCAR, FCER2, FCGBP, FCGRT, FCHO1, FDX1L, FEM1A, FERMT1, FFAR1, FFAR2, FFAR3, FGD1, FGF13, FGF16, FGF21, FGF22, FHL1, FIGF, FITM2, FIZ1, FKBP1A, FKBP8, FKRP, FLJ44635, FLNA, FLRT3, FLT3LG, FMR1, FMR1NB, FOSB, FOXA2, FOXA3, FOXO4, FOXP3, FOXR2, FOXRED2, FOXS1, FPR1, FPR2, FPR3, FRMD7, FRMPD3, FRMPD4, FSD1, FSTL3, FTCD, FTH1P18, FTHL17, FTL, FTSJ1, FUNDC1, FUNDC2, FUT1, FUT2, FUT3, FUT5, FUT6, FUZ, FXYD1, FXYD3, FXYD5, FXYD7, FZR1, G6PD, GAB3, GAB4, GABPA, GABRA3, GABRE, GABRQ, GADD45B, GADD45GIP1, GAGE1, GAGE10, GAGE12B, GAGE12C, GAGE12D, GAGE12E, GAGE12F, GAGE12G, GAGE12H, GAGE12I, GAGE12J, GAGE13, GAGE2A, GAGE2B, GAGE2C, GAGE2D, GAGE2E, GAGE4, GAGE5, GAGE6, GAGE7, GAGE8, GAL3ST1, GALP, GALR3, GAMT, GAPDHS, GART, GAS2L1, GATA1, GATA5, GATAD2A, GATSL3, GCAT, GCDH, GCN17, GDAP1L1, GDF1, GDF15, GDF5, GDI1, GDPD2, GEMIN7, GEMIN8, GFRA4, GFY, GGA1, GGN, GGT1, GGT5, GGT7, GGTLC1, GGLC2, GHRH, GID8, GINS1, GIPC1, GIPC3, GIPR, GJB1, GK, GLA, GLOD5, GLRA2, GLRA4, GLTSCR1, GLTSCR2, GLUD2, GMEB2, GMFG, GMIP, GNA11, GNA15, GNAS, GNAZ, GNB1L, GNG7, GNG8, G-NL3L, GNR2, GP1BB, GP6, GPATCH1, GPC3, GPC4, GPCPD1, GPI, GPKOW, GPM6B, GPR101, GPR108, GPR112, GPR119, GPR143, GPR173, GPR174, GPR32, GPR34, GPR4, GPR50, GPR64, GPR82, GPRASP1, GPRASP2, GPX4, GRAMD1A, GRAMD4, GRAP2, GRIA3, GRIK1, GRIK5, GRIN2D, GRIN3B, GRIPAPI, GRPR, GRWD1, GSC2, GSK3A, GSPT2, GSS, GSTT2, GSTT2B, GTF2F1, GTPBP1, GIPBP3, GTBP6, GTSE1, GTSF1L, GUCD1, GUCY2F, GYG2, GYS1, GZF1, GZMM, H1F0, H2AFB1, H2AFB2, H2AFB3, H2BFM, H2BFWT, HAMP, HAO1, HAPLN4, HAS1, HAUS5, HAUS7, HAUS8, HCCS, HCFC1, HCK, HCN2, HCST, HDAC10, HDAC6, HDAC8, HDGFRP2, HDHD1, HDX, HELZ2, HEPH, HIC2, HIF3A, HIPK4, HRA, HKR1, HLCS, HM13, HMG20B, HMGB3, HMGN1, HMGN5, HMGXB4, HMHA1, HMOX1, HNF4A, HNRNPH2, HNRNPL, HNRNPM, HNRNPUL1, HOMER3, HOOK2, HORMAD2, HPN, HPRT1, HPS4, HRC, HRH3, HS6ST2, HSCB, HSD11B1L, HSD17B10, HSD17B14, HSF2BP, HSFX1, HSFX2, HSH2D, HSPA12B, HSPA13, HSPB6, HSPBP1, HTATSF1, HTR2C, HUNK, HUWEI, HYPM, ICAM1, ICAM3, ICAM4, ICAM5, ICOSLG, ID1, IDH3B, IDH3G, IDS, IER2, IFI30, IFNAR1, IFNAR2, IFNGR2, IFNL1, IFNL2, IFNL3, IFT4, IFT27, IFT52, IGBP1, IGFL1, IGFL2, igFL3, IGFL4, IGFLR1, IGLL1, IGLL5, IGLON5, IGSF1, IGSF23, IGSF5, IKBKG, IL10RB, IL11, IL12RB1, IL13RA1, IL13RA2, IL17RA, IL17REL, IL1RAPL1, IL1RAPL2, IL27RA, IL2RB, IL2RG, IL3RA, IL4I1, ILF3, ILVBL, INAFM1, INPP5J, INSL3, INSR, INSR, IQSEC2, IRAK1, IRF2BP1, IRF3, IRGC, IRGQ, IRS4, ISM1, ISOC2, ISX, ISYNA1, ITCH, ITGB1BP2, ITGB2, ITIH6, ITM2A, ITPA, ITPKC, ITSN1, IZUMO1, IZUMO2, IZUMO4, JADE3, JAG1, JAK3, JAM2, JOSD1, JOSD2, JPH2, JSRP1, JUNB, JUND, KAL1, KANK2, KANK3, KCNA7, KCNB1, KCNC3, KCND1, KCNE1, KCNE1L, KCNE2, KCNG1, KCNJ14, KCNJ15, KCNJ4, KCMJ6, KCNK15, KCNK6, KCNN1, KCNN4, KCNQ2, KCNS1, KCTD15, KCTD17, KDELR1, KDELR3, KDM4B, KDM5C, KDM6A, KEAP1, KHSRP, KIAA0355, KIAA0930, KIAA1210, KIAA1644, KIAA1671, KIAA1683, KIAA1755, KIAA2022, KIF16B, KIF3B, KIF4A, KIR2DL1, KIR2DL2, KIR2DL3, KIR2DL4, KIR2DS1, KIR2DS2, KIR2DS3, KIR2DS4, KIR2DS5, KIR3DL1, KIR3DL2, KIR3DL3, KIR3DS1, KIRREL2, KISS1 R, KIZ, KLC3, KLF1, KLF16, KLF2, KLF8, KLHDC7B, KLHZL13, KLHL15, KLHL22, KLHL26, KLHL34, KLHL4, KLK1, KLK10, KLK11, KLK12, KLK13, KLK14, KLK15, KLK2, KLK3, KLK4, KLK5, KLK6, KLK7, KLK8, KLK9, KMT2B, KPTN, KRBOX4, KREMEN1, KRI1, KRTAP10-1, KRTAP10-10, KRTAP10-11, KRTAP10-12, KRTAP10-2, KRTAP10-3, KRTAP10-4, KRTAP10-5, KRTAP10-6, KRTAP10-7, KRTAP10-8, KRTAP10-9, KRTAP11-1, KRTAP12-1, KRTAP12-2, KRTAP12-3, KRTAP12-4, KRTAP13-1, KRTAP13-2, KRTAP13-3, KRTAP13-4, KRTAP15-1, KRTAP19-1, KRTAP19-2, KRTAP19-3, KRTAP19-4, KRIAP19-5, KRTAP19-6, KRTAP19-7, KRTAP19-8, KRTAP20-1, KRTAP20-2, KRTAP20-3, KRTAP21-1, KRTAP21-2, KRTAP21-3, KRTAP22-1, KRTAP22-2, KRTAP23-1, KRTAP24-1, KRTAP25-1, KRTAP26-1, KRTAP27-1, KRTAP6-1, KRTAP6-2, KRTAP6-3, KRTAP7-1, KRTAP8-1, KRTDAP, KXD1, L1CAM, L3MBTL1, L3MBTL2, LAGE3, LAIR1. LAIR2, LAMA5, LAMP2, LAMP5, LANCL3, LARGE, LAS1L, LBP, LCA5L, LDLR, LDOC1, LDOC1L, LENG1, LENG8, LENG9, LEUTX, LGALS1, LGALS13, LGALS14, LGALS16, LGALS2, LGALS4, LGALS7, LGALS7B, LGI4, LHB, LHFPL1, LIF, LIG1, LILRA1, LILRA2, , LILRA4, LILRA5, LILRA6, LILRB1, LILRB2, LILRB3, LILRB4, LILRB5, LIM2, LIME1, LIMK2, LIN37, LIN7B, LINC01272, LINGO3, LIPE, LIPI, LKAAEAR1, LMF2, LMNB2, LMTK3, LOC100129083, LOC100129520, LOC100288814, LOC101927572, LOC101929372, LOC102724279, LOC113230, LOC388780, LOC388813, LOC388849, LOC389895, LOC391322, LOC400863, LOC400927-CSNK1E, LOC728485, LONP1, LONRF3, LPAR2, LPAR4, LPHN1, LPIN3, LPPR2, LPPR3, LRCH2, LRFN1, LREN3, LRG1, LRP3, LRP5L, LRRC25, LRRC3, LRRC4B, LRRC74B, LRRC75B, LRRC8E, LRRN4, LSM14A, LSM14B, LSM4, LSM7, LSR, LSS, LTBP4, LTN1, LUZP4, LYL1, LYPD3, LYPD4, LYPD5, LZTR1, LZTS3, MACROD2, MADCAMI, MAFB, MAFF, MAG, MAGEA1, MAGEA10, MAGEA10-MACEA5, MAGEA11, MAGEA12, MAGEA2, MAGEA2B, MAGEA3, MAGEA4, MAGEA5, MAGEA6, MAGEA8, MAGEA9, MAGEA9B, MAGEB1, MAGEB10, MAGE16, MAGE17, MAGEB18, MAGEB2, MAGE3, MAGH4, MAGEB5, MAGEB6, MAGEC1, MAGEC2, MAGEC3, MAGED1, MAGED2, MAGED4, MAGED4B, MAGEE1, MAGEE2, MAGEH1, MAGIX, MAGT1, MAMLD1, MAMSTR, MAN2B1, MANBAL, MAOA, MAOB, MAP1LC3A, MAP1S, MAP2K2, MAP2K7, MAP3K10, MAP3K15, MAP3K7CL, MAP4K1, MAP7D2, MAP7D3, MAPK1, MAPK11, MAPK12, MAPK8IP2, MAPRE1, MARCH2, MARK4, MAST1, MAST3, MATK, MATN4, MAU2, MAVS, MB, MBD3, MBD3L1, MBD3L2, MBD3L3, MBD3L4, MBD3L5, MBNL3, MBOAT7, MBTPS2, MC3R, MCAT, MCEMP1, MCF2, MCHR1, MCM3 AP, MCM5, MCM8, MCOLN1, MCTS1, MECP2, MED12, MED14, MED14OS, MED15, MED16, MED25, MED26, MED29, MEF2B, MEF2BNB, MEF2BNB-MEF2B, MEGF8, MEI1, MEIS3, MEX3D, MFNG, MFSD12, MGAT3, MGME1, MIA, MICAL3, MICALL1, MID1, MID1IP1, MID2, MIDN, MIEF1, MIER2, MIF, MIOX, MIR1-1HG, MIS18A, MISP, MKKS, MKL1, MKNK2, MLC1, MLLT1, MMGT1, MMP11, MMP24, MMP9, MNI, MOB3A, MOC S3, MORC2, MARC3, MORC4, MORF4L2, MOSPD1, MOSPD2, MOV10L1, MPC1L, MPND, MPP1, MPPED1, MPST, MPV17L2, MRAP, MRGBP, MRI1, MROH8, MRPL34, MRPL39, MRPL4, MRPL40, MRPL54, MRPS12, MRPS26, MRPS6, MSL3, MSN, MTCP1, MTFP1, MTG2, MTM1, MTMR1, MTMT3, MTMR8, MTRNR2L10, MTRNR2L3, MUC16, MUM1, MUM1L1, MVB12A, MX1, MX2, MXRA5, MYADM, MYBL2, MYBPC2, MYH14, MYH7B, MYH9, MYL9, MYLK2, MYO18B, MYO1F, MYO9B, MYPOP, MYT1, MZF1, N6AMT1, NAA10, NAA20, NACC1, NAGA, NANOS2, NANOS3, NANP, NAP1L2, NAP1L3, NAPA, NAPB, NAPSA, NAT14, NCAM2, NCAN, NCAPH2, NCCRP1, NCF4, NCLN, NCOA3, NCOA5, NCOA6, NCR1, NDP, NDRG3, NDUFA1, NDUFA11, NDUFA13, NDUFA3, NDUFA6, NDUFA7, NDUFAF5, NDUFB11, NDUFB7, NDUFS7, NDUFV3, NECAB3, NEFH, NELFCD, NEURL2, NF2, NFAM1, NFATC2, NFIC, NFIX, NFBRIB, NFKBID, NFS1, NGFRAP1, NHP2L1, NHS, NHSL2, NINL, NIPSNAP1, NKAIN4, NKAP, NKG7, NKPD1, NKRF, NKX2-2, NKX2-4, NLGN3, NLGN4X, NLRP11, NLRP12, NLRP13, NLRP2, NLRP4, NLRP5, NLRP7, NLRP8, NLRP9, NMRK2, NNAT, NOL12, NOL4L, NONO, NOP56, NOSIP, NOTCH3, NOVA2, NOX1, NPAS1, NPBWR2, NPEPL1, NPHS1, NPTXR, NR0B1, NR1H2, NR2C2AP, NR2F6, NRIP1, NRK, NRSN2, NRTN, NSDHL, NSFL1C, NTF4, NTN5, NTSR1, NUCB1, NUDT10, NUDT11, NUDT19, NUMBL, NUP50, NUP62, NUP62CL, NWD1, NXF2, NXF2B, NXF3, NXF5, NXNL1, NXT1, NXT2, NYX, OAZ1, OCEL1, OCRL, OCSTAMP, ODF3B, ODEF3L2, OFD1, OGFR, OGT, OLFM2, OLIG1, OLIG2, ONECUT3, OPA3, OPHN1, OPN1LW, OPN1 MW, OPN1 MW2, OPRL1, OR10H1, OR10H2, OR10H3, OR10 H4, OR10H5, OR11H1, OR13H1, OR1I1, OR1M1, OR2Z1, OR4F17, OR7A10, OR7A17, OR7A5, OR7C1, OR7C2, OR7D2, OR7D4, OR7E24, OR7G1, OR7G2, OR7G3, OSBP2, OSBPL2, OSCAR, OSER1, OSM, OTC, OTOR, OTUD5, OTUD6A, OVOL2, OVOL3, OXT, P2RX6, P2RY10, P2RY11, P2RY4, P2RY8, PABPC1L, PABPC1L2A, PABPC1L2B, PABPC5, PACS-B 1-L N2, PAF1, PAFAH1B3, PAGE1, PAGE2, PAGE2B, PAGE4, PAGE5, PAK3, PAK4, PAK7, PALM, PALM3, PANK2, PANX2, PAPL, PARD6B, PARVB, PARVG, PASD1, PATZ1, PAX1, PAXBP1, PBDC1, PBX4, PCBP3, PCDH11 X, PCDH19, PCED1A, PCIF1, PCK1, PCMTD2, PCNA, PCNT, PCP2, PCP4, PCSK1N, PCSK2, PCSK4, PCYT1B, PDCD2L, PDCD5, PDE4A, PDE4C, PDE9A, PDGFB, PDHA1, PDK3, PDRG1, PDXK, PDXP, PDYN, PDZD11, PDZD4, PEG3, PEPD, PES1, PET100, PET117, PEX11G, PEX26, PFDN4, PFKFB1, PFKL, PGAM4, PGK1, PGLS, PGLYRP1, PGLYRP2, PGPEP1, PGRMC1, PHACTR3, PHEX, PHF20, PHF21B, PHF5A, PHF6, PHF8, PHKA1, PHKA2, PHLDB3, PI3, PI4KA, PIAS4, PICK1, PIGA, PIGP, PIGT, PIGU, PIH1D1, PIH1D3, PIK3IP1, PIK3R2, PIM2, PIM3, PIN1, PIN4, PINLYP, PIP5K1C, PIR, PISD, PITPNB, PIWIL3, PJA1, PKDREJ, PKIG, PKN1, PKNOX1, PLA2G3, PLA2G4C, PLA2G6, PLAC1, PLAC4, PLAGL2, PLAUR, PLCB1, PLCB4, PLCG1, PKCXD1, PLD3, PLEKHA4, PLEKHF1, PLEKHG2, PLEKHJ1, PLIN3, PLIN4, PLIN5, PLK5, PLP1, PLP2, PLS3, PLTP, PLVAP, PLXNA3, PLXNB2, PLXN3, PMEPA1, PMM1, PNCK, PNKP, PNMA3, PNMA5, PNMA6A, PNMAL1, PNMAL2, PNPLA3, PNPLA4, PNPLA5, PNPLA6, PODNL1, POF1B, POFUT1, POFU2, POLA1, POLD1, POLDIP3, POLR2E, POLR2F, POLR2I, POLR3F, POLR3H, POLRMT, POP4, PORCN, POTED, POTEH, POU2F2, POU3F4, PPAN, PPAN-P2RY11, PPAP2C, PPARA, PPDPF, PPEF1, PPFIA3, PPIL2, PPM1F, PPM1N, PPP1R12C, PPP1R13L, PPP1R14A, PPP1R15A, PPP1R16B, PPP1R37, PPP1R3D, PPP1R3F, PPP2R1A, PPP2R3B , PPP5C, PPP5D1, PPP6R1, PPP6R2, PQBP1, PRAF2, PRAM1, PRAME, PRDM15, PRDX2, PRDX4, PREX1, PRICKLE3, PRKACA, PRKCG, PRKCSH, PRKD2, PRKX, PRMT1, PRMT1, PRND, PRNP, PROCR, PRODH, PRODH2, PROKR2, PROSER3, PRPF31, PRPF6, PRPS1, PRPS2, PRR12, PRR14L, PRR19, PRR22, PRR32, PRR34, PRR36, PRR5, PRR5-ARHGAP8, PRRG1, PRRG2, PRRG3, PRSS57, PRTN3, PRX, PSENEN, PSG1, PSG11, PSG2, PSG3, PSG4, PSG5, PSG6, PSG7, PSG8, PSG9, PSMA7, PSMC4, PSMD10, PSMD8, PSMF1, PSMG1, PSPN, PTBP1, PTCHD1, PTGER1, PTGIR, PTGIS, PTH2, PTK6, PTOV1, PTPN1, PTPRA, PTPRI1, PTPRS, PTPRT, PTTG1IP, PVALB, PVR, PVRL2, PWP2, PXMP4, PYGB, QPCTL, QTRT1, R3HDM4, R3HDML, RAB1IB, RAB22A, RAB33A, RAB36, RAB39B, RAB3A, RAB3D, RAB40A, RAB40AL, RAB41, RAB4B, RAB8A, RAB9A, RAB9B, RABAC1, RABL2B, RAC2, RAD21L1, RAD23A, RAE1, RAI2, RALGAPA2, RALGAPB, RALY, RANBP1, RANBP3, RANGAP1, RAP2C, RASAL3, RASD2, RASGRP4, RASIP1, RASL10A, RASSF2, RAVER1, RAX2, RBBP7, RBBP8NL, RBBP9, RBCK1, RBFOX2, RBL1, RBM10, RBM11, RBM12, RBM3, RBM38, RBM39, RBM41, RBM42, RBMX, RBMX2, RBMXL3, RBPJL, RBX1, RCAN1, RCN3, RDH13, RDH8, REEP6, RELB, REM1, RENBP, REPS2, RETN, REXO1, RFPL1, RFPL2, , RFPL3, RFPL4A, RFPL4AL1, RFX1, RIFX2, RFXANK, RGAG1, RGAG4, RGL3, RGL4, RGN, RGS19, RGS9BP, RHBDD3, RHOXF1, RHOXF2, RHOXF2B, RHPN2, RIBC1, RIBC2, RIMBP3, RIMBP3B, RIMBP3C, RIMS4, RIN2, RINL, RIPK4, RIPPLY1, RIPPLY3, RLIM, RLN3, RNASEH2A, RNT113A, RNF114, RNF126, RNF128, RNF185, RNF215, RNF225, RNF24, ROMO1, RP2, RPA4, RPGR, RPL10, RPL13 A, RPL18, RPL18A, RPL28, RPL3, RPL36, RPL36A, RPL36A-HNRNPH2, RPL39, RPN2, RPRD1B, RPS11, RPS15, RPS16, RPS19, RPS19BP1, RPS21, RPS28, RPS4X, RPS5, RPS6KA3, RPS6KA6, RPS9, RRAGB, RRAS, RRBP1, RRP1, RRP1B, RRP7A, RS1, RSPH1, RSPH14, RSPH6A, RSPO4, RTBDN, RTCB, RTEL1, RTFDC1, RTN2, RTN4R, RUNX1, RUVBL2, RWDD2B, RYR1, S100B, S100G, S1PR2, S1PR4, S1PR5, SAE1, SAFB, SAFB2, SAGE1, SALL4, SAMD1, SAMD10, SAMD4B, SAMHD1, SAMM50, SAMSN1, SARS2, SASH3, SAT1, SATL1, SBF1, SBK2, SBK3, SBNO2, SBSN, SCAF1, SCAF4, SCAMP4, SCAND1, SCARF2, SCGB2B2, SCML1, SCML2, SCN1B, SCO2, SCP2D1, SCRT2, SCUBE1, SDC4, SDCBP2, SDF2L1, SDHAF1, SEC14L2, SEC14L3, SEC14L4, SEC14L6, SEC23B, SEL1L2, SELM, SELO, SELV, SEMA6B, SEMG1, SEMG2, SEPT3, SEPT5, SEPT6, SEPW1, SERHL2, SERINC3, SERPINA7, SERPIND1, SERTAD1, SERTAD3, SETD4, SEZ6L, SF3A1, SF3A2, SFI1, SGK2, SGSM1, SGSM3, SGTA, SH2D1A, SH2D3A, SH3BGR, SH3BGRL, SH3BP1, SH3GL1, SH3KBP1, SHANK1, SHANK3, SHC2, SHD, SHISA7, SHISA8, SHKBP1, SHOX, SHROOM2, SHROOM4, SIGLEC1, SIGLEC10, SIGLEC11, SIGLEC12, SIGLEC14, SIGLEC5, SIGLEC6, SIGLEC7, SIGLEC8, SIGLEC9, SIGLECL1, SIK1, SIM2, SIN3B, SIPA1L3, SIRPA, SIRPB1, SIRPB2, SIRPD, SIRPG, SIRT2, SIRT6, S1X5, SLA2, SLC10A3, SLC12A5, SLC13A3, SLC16A2, SLC16A8, SLC17A7, SLC17A9, SLC19A1, SLC1A5, SLC1A6, SLC23A2, SLC24A3, SLC25A1, SLC25A14, SLC25A17, SLC25A18, SLC25A23, SLC25A41, SLC25A42, SLC25A43, SLC25A5, SLC25A53, SLC25A6, SLC27A1, SLC27A5, SLC2A10, SLC2A11, SLC2A4RG, SLC32A1, SLC35A2, SLC35C2, SLC35E1, SLC35E4, SLC37A1, SLC38A5, SLC39A3, SLC44A2, SLC4A11, SLC52A3, SLC5A1, SLC5A3, SLC5A4, SLC5A5, SLC6A14, SLC6A16, SLC6A8, SLC7A10, SLC7A3, SLC7A4, SLC7A9, SLC8A2, SLC9A6, SLC9A7, SLC9A8, SLCO4A1, SLITRK2, SLITRK4, SLMO2, SLP1, SLX4IP, SMARCA1, SMARCA4, SMARCB1, SMC1A, SMC1B, SMDT1, SMG9, SMIM10, SMIM11, SMIM17, SMIM24, SMIM7, SMIM9, SMOX, SMPX, SMS, SMTN, SNAI1, SNAP25, SNAP29, SNAPC2, SNPH, SNRNP70, SNRPA, SNRPB, SNRPB2, SNRPD2, SNRPD3, SNTA1, SNXT12, SNX21, SNX5, SOD1, SOGA1, SON, SOWAHD, SOX10, SOX12, SOX18, SOX3, SPACA4, SPACA5, SPACA5B, SPAG4, SPANXA1, SPANXA2, SPANXB1, SPANXC, SPANXD, SPANXN1, SPANXN2, SPANXN3, SPANXN4, SPANXN5, SPATA2, SPATA25, SPATC1L, SPC24, SPECC1L, SPEF1, SPHK2, SPIB, SPIN2A, SPIN2B, SPIN3, SPIN4, SPINT2, SPINT3, SPINT4, SPO11, SPPL2B, SPRED3, SPRY3, SPTBN4, SPTLC3, SRC, SREBF2, SRMS, SRPK3, SRPX, SRPX2, SRRD, SRRM5, SRSF6, SRXN1, SS18L1, SSBP4, SSC5D, SSR4, SSTR3, SSTR4, SSX1, SSX2, SSX2B, SSX3, SSX4, SSX4B, SSX5, SSX7, ST13, STAG2, STAP2, STARD8, STAU1, STK11, STK26, STK35, STK4, STMN3, STRN4, STS, STX10, STX16, STXBP2, SUGP1, SUGP2, SULF2, SULT2A1, SULT2B1, SULT4A1, SUMO3, SUN2, SUN5, SUPT20HL1, SUPT20HL2, SUPT5H, SUSD2, SUV39H1, SUV420H2, SWSAP1, SYAP1, SYCE2, SYCE3, SYCN, SYCP2, SYDE1, SYMPK, SYN1, SYN3, SYNDIG1, SYNE4, SYNGR1, SYNGR4, SYNJ1, SYP, SYS1, SYT3, SYT5, SYTL4, SYTL5, TAB1, TAB3, TAF1, TAF4, TAF7L, TAF9B, TANGO2, TARM1, TASPI, TAZ, TBC1D10A, TBC1D17, TBC1D20, TBC1D22 A, TBC1D25, TBC1D8B, TBCB, TBL1X, TBX1, TBX22, TBXA2R, TCEA2, TCEAL1, TCEAL2, TCEAL3, TCEAL4, TCEAL5, TCEAL6, TCEAL7, TCEAL8, TCEANC, TCF15, TCF20, TCF3, TCFL5, TCN2, TCP10L, TCP11X2, TDRD12, TEAD2, TECR, TEF, TENM1, TEX101, TEX11, TEX13A, TEX13B, TEX28, TEX33, TFAP2C, TFDP3, TFE3, TEE1, TFF2, TFF3, TFIP11, TFPT, TGFB1, TGFBR3L, TGIF2, TGIF2-C20orf24, TGIF2LX, TGM2, TGM3, TGM6, THAP7, THAP8, THBD, THEG, THEG5, THOC2, THOC5, THOP1, TIAM1, TICAM1, TIMM13, TIMM17B, TIMM44, TIMM50, TIMM8A, TIMP1, TIMP3, TJP3, TKTL1, TLDC2, TLE2, TLE6, TLR7, TLR8, TM6SF2, TM9SF4, TMC2, TMC4, TMED1, TMEM143, TMEM145, TMEM147, TMEM150B, TMEM160, TMEM161A, TMEM164, TMEM184B, TMEM185A, TMEM187, TMEM189, TMEM189-UBE2V1, TMEM190, TMEM191B, TMEM191C, TMEM205, TMEM211, TMEM221, TMEM230, TMEM238, TMEM239, TMEM255A, TMEM257, TMEM259, TMEM27, TMEM31, TMEM35, TMEM38A, TMEM47, TMEM50B, TMEM59L, TMEM74B, TMEM86B, TMEM91, TMIGD2, TMLHE, TMPRSS15, TMPRSS2, TMPRSS3, TMPRSS6, TMPRSS9, TMSB15A, TMSB15B, TMSB4X, TMX4, TNFAIP8L1, TNFRSF13C, TNFRSF6B, TNFSF14, TNFSF9, TNMD, TNNC2, TNNI3, TNNT1, TNPO2, TNRC6B, TOB2, TOM1, TOMM22, TOMM34, TOMM40, TOP1, TOP3B, TOX2, TP53INP2, TP53RK, TP53TG5, TPD52L2, TPGS1, TPM4, TPRX1, TPST2, TPTE, TPX2, TRABD, TRAPPC10, TRAPPC2, TRAPPC5, TRAPPC6A, TREX2, TRIB3, TRIM28, TRIOBP, TRIP10, TRMT1, TRMT2A, TRMT2B, TRMT6, TRMU, TRO, TRPC4AP, TRPC5, TRPC5OS, TRPM2, TRPM4, TSC22D3, TSEN34, TSHZ2, TSHZ3, TSKS, TSPAN16, TSPAN6, TSPAN7, TSPEAR, TSPO, TSPYL2, TSR2, TSSK2, TSSK6, TST, TTC28, TTC3, TTC38, TTC9B, TTI1, TTLL1, TTLL12, TTLL9, TTPAL, TTYH1, TUBA8, TUBB1, TUBB4A, TUBGCP6, TULP2, TXLNG, TXN2, TXNRD2, TYK2, TYMP, TYROBP, U2AF1, U2AF1L4, U2AF2, UBA1, UBA2, UBA52, UBASH3A, UBE2A, UBE2C, UBE2G2, UBE2L3, UBE2M, UBE2NL, UBE2S, UBE2V1, UBL4A, UBL5, UBOX5, UBQLN2, UBXN6, UCKL1, UFD1L, UHRF1, UMODL1, UNC13A, UPB1, UPF1, UPF3B, UPK1A, UPK3A, UPRT, UQCC1, UQCR10, UQCR11, UQCRFS1, URB1, URI1, USE1, USF2, USHBP1, USP11, USP16, USP18, USP25, USP26, USP27X, USP29, USP51, USP9X, UTP14A, UXT, VAMP7, VAPB, VASP, VAV1, VBP1, VCX, VCX2, VCX3A, VCX3B, VGLL1, VMA21, VMAC, VN1R1, VN1R2, VN1R4, VPREB1, VPREb3, VPS16, VRK3, VSIG1, VSIG10L, VSIG4, VSTM1, VSTM2B, VSTM2L, VSX1, WAS, WBP2NL, WBP5, WDR13, WDR18, WDR4, WDR44, WDR45, WDR62, WDR83, WDR83OS, WDR87, WDR88, WFDC10A, WFDC10B, WFDC11, WFDC12, WFDC13, WFDC2, WFDC3, WFDC5, WFDC6, WFDC8, WFDC9, WISP2, WIZ, WNK3, WNT7B, WRB, WTIP, WWC3, XAB2, XAGE1B, XAGE1E, XAGE2, XAGE3, XAGE5, XBP1, XG, XIAP, XK, XKR3, XKR7, XKRX, XPNPEP2, XPNPEP3, XRCC1, XRCC6, XRN2, YBEY, YDJC, YIF1B, YIPF2, YIPF6, YJEFN3, YPEL1, YTHDF1, YWHAB, YWHAH, YY2, ZBED1, ZBED4, ZBP1, ZBTB21, ZBTB32, ZBTB33, ZBTB45, ZBTB46, ZBTB7A, ZC3H12B, ZC3H4, ZC3H7B, ZC4H2, ZCCHC12, ZCCHC13, ZCCHC16, ZCCHC18, ZCCHC3, ZCCHC5, ZDHHC15, ZDHHC8, ZDHHC9, ZFP14, ZFP28, ZFP30, ZFP36, ZFP64, ZFP82, ZFP92, ZFR2, ZFX, ZGLP1, ZGPAT, ZHX3, ZIC3, ZIK1, ZIM2, ZIM3, ZMAT1, ZMAT5, ZMYM3, ZMYND8, ZNF100, ZNF101, ZNF112, ZNF114, ZNF121, ZNF132, ZNF133, ZNF134, ZNF135, ZNF136, ZNF14, ZNF146, ZNF154, ZNF155, ZNF157, ZNF160, ZNF17, ZNF175, ZNF177, ZNF180, ZNF181, ZNF182, ZNF185, ZNF20, ZNF208, ZNF211, ZNF217, ZNF221, ZNF222, ZNF223, ZNF224, ZNF225, ZNF226, ZNF227, ZNF229, ZNF230, ZNF233, ZNF234, ZNF235, ZNF253, ZNF254, ZNF256, ZNF257, ZNF260, ZNF264, ZNF266, ZNF274, ZNF275, ZNF28, ZNF280A, ZNF280B, ZNF280C, ZNF283, ZNF284, ZNF285, ZNF296, ZNF30, ZNF302, ZNF304, ZNF317, ZNF320, ZNF324, ZNF324B, ZNF329, ZNF331, ZNF333, ZNF334, ZNF335, ZNF337, ZNF341, ZNF343, ZNF345, ZNF347, ZNF350, ZNF358, ZNF382, ZNF383, ZNF404, ZNF41, ZNF414, ZNF415, ZNF416, ZNF417, ZNF418, ZNF419, ZNF420, ZNF426, ZNF428, ZNF429, ZNF43, ZNF430, ZNF431, ZNF432, ZNF433, ZNF439, ZNF44, ZNF440, ZNF441, ZNF442, ZNF443, ZNF444, ZNF446, ZNF449, ZNF45, ZNF460, ZNF461, ZNF468, ZNF470, ZNF471, ZNF473, ZNF480, ZNF486, ZNF490, ZNF491, ZNF492, ZNF493, ZNF497, ZNF506, ZNF507, ZNF512B, ZNF524, ZNF526, ZNF527, ZNF528, ZNF529, ZNF530, ZNF534, ZNF536, ZNF540, ZNF541, ZNF543, ZNF544, ZNF546, ZNF547, ZNF548, ZNF549, ZNF550, ZNF551, ZNF552, ZNF554, ZNF555, ZNF556, ZNF557, ZNF558, ZNF559, ZNF559-ZNF177, ZNF560, ZNF561, ZNF562, ZNF563, ZNF564, ZNF565, ZNF566, ZNF567, ZNF568, ZNF569, ZNF57, ZNF570, ZNF571, ZNF573, ZNF574, ZNF575, ZNF576, ZNF577, ZNF578, ZNF579, ZNF580, ZNF581, ZNF582, ZNF583, ZNF584, ZNF585A, ZNF585B, ZNF586, ZNF587, ZNF587B, ZNF599, ZNF600, ZNF606, ZNF607, ZNF610, ZNF611, ZNF613, ZNF614, ZNF615, ZNF616, ZNF625, ZNF626, ZNF627, ZNF628, ZNF630, ZNF645, ZNF649, ZNF653, ZNF665, ZNF667, ZNF671, ZNF674, ZNF675, ZNF676, ZNF677, ZNF681, ZNF682, ZNF69, ZNF699, ZNF70, ZNF700, ZNF701, ZNF708, ZNF709, ZNF71, ZNF711, ZNF714, ZNF726, ZNF728, ZNF729, ZNF730, ZNF737, ZNF74, ZNF749, ZNF75D, ZNF761, ZNF763, ZNF765, ZNF766, ZNF77, ZNF772, ZNF773, ZNF776, ZNF780A, ZNF780B, ZNF781, ZNF784, ZNF787, ZNF790, ZNF791, ZNF792, ZNF793, ZNF799, ZNF8, ZNF805, ZNF808, ZNF81, ZNF812, ZNF813, ZNF814, ZNF816, ZNF816-ZNF321P, ZNF823, ZNF829, ZNF83, ZNF831, ZNF835, ZNF836, ZNF837, ZNF841, ZNF844, ZNF845, ZNF846, ZNF85, ZNF850, ZNF865, ZNF878, ZNF880, ZNF90, ZNF91, ZNF93, ZNF98, ZNF99, ZNFX1, ZNRF3, ZNRF4, ZRSR2, ZSCAN1, ZSCAN18, ZSCAN22, ZSCAN4, ZSCAN5A, ZSCAN5B, ZSWIM1, ZSWIM3, ZSWIM4, ZXDA, and ZXDB.

[0101] In some other embodiments, non-limiting examples of target genes which can be modulated by the saRNA of the present invention may be non-coding genes, including the target genes described in Lengthy Table 2, such as A1BG, A1BG-AS1, A1CF, A2M, A2M-AS1, A2ML1, A2MP1, A3GALT2, A4GALT, A4GNT, AA06, AAAS, AACS, AACSP1, AADAC, AADACL2, AADACL2-AS1, AADACL3, AADACL4, AADAP1, AADAT, AAED1, AAGAB, AAK1, AAMDC, AAMP, AANAT, AAR2, AARD, AARS, AARS2, AARSD1, AASDH, AASDHPPT, AASS, AATF, AATK, AATK-AS1, ABAT, ABCA1, ABCA10, ABCA11P, ABCA12, ABCA13, ABCA17P, ABCA2, ABCA3, ABCA4, ABCA5, ABCA6, ABCA7, ABCA8, ABCA9, ABCA9-AS1, ABCB1, ABCB10ABCB11, ABCB4, ABCB5, ABCB6, ABCB7, ABCB8, ABCB9, ABCC1, ABCC10, ABCC11, ABCC12, ABCC13, ABCC2, ABCC3, ABCC4, ABCC5, ABCC5-AS1, ABCC6, ABCC6P1, ABCC6P2, ABCC8, ABCC9, ABCD1, ABCD2, ABCD3, ABCD4, ABCE1, ABCF1, ABCF2, ABCF3, ABCG1, ABCG2, ABCG4, ABCG5, ABCG8, ABHD1, ABHD10, ABHD11, ABHD11-AS1, ABHD12, ABHD12B, ABHD13, ABHD14A, ABHD14A-ACY1, ABHD14B, ABHD15, ABHD16A, ABHD16B, ABHD17A, ABHD17B, ABHD17C, ABHD2, ABHD3, ABHD4, ABHD5, ABHD6, ABHD8, ABI1, ABI2, ABI3, ABI3BP, ABL1, ABL2, ABLIM1, ABLIM2, ABLIM3, ABO, ABR, ABRA, ABRACL, ABT1, ABTB1, ABTB2, ACAA1, ACAA2, ACACA, ACACB, ACAD10, ACAD11, ACAD8, ACAD9, ACADL, ACADM, ACADS, ACADSB, ACADVL, ACAN, ACAP1, ACAP2, ACAP3, ACAT1, ACAT2, ACBD3, ACBD4, ACBD5, ACBD6, ACBD7, ACCS, ACCSL, ACD, ACE, ACE2, ACER1, ACER2, ACER3, ACHE, ACIN1, ACKR1, ACKR2, ACKR3, ACKR4, ACLY, ACMSD, ACN9, ACO1, ACO2, ACOT1, ACOT11, ACOT12, ACOT13, ACOT2, ACOT4, ACOT6, ACOT7, ACOT8, ACOT9, ACOX1, ACOX2, ACOX3, ACOXL, ACP1, ACP2, ACP5, ACP6, ACPP, ACPT ACR, ACRBP, ACRC, ACRV1, ACSBG1, ACSBG2, ACSF2, ACSF3, ACSL1, ACSL3, ACSL4, ACSL5, ACSL6, ACSM1, ACSM2A, ACSM2B, ACSM3, ACSM4, ACSM5, ACSM6, ACSS1, ACSS2, ACSS3, ACTA1, ACTA2, ACTA2-AS1, ACTB, ACTBL2, ACTC1, ACTG1, ACTG1P4, ACTG2, ACTL10, ACTL6A, ACTL6B, ACTL7A, ACTL7B, ACTL9, ACTL9, ACTN1, ACTN1-AS1, ACTN2, ACTN3, ACTN4, ACTR10, ACTR1A, ACTR1B, ACTR2, ACTR3, ACTR3B, ACTR3BP2, ACTR3BP5, ACTR3C, ACTR5, ACTR6, ACTR8, ACTRT1, ACTRT2, ACTRT3, ACVR1, ACVR1B, ACVR1C, ACVR2A, ACVR2B, ACVR2B-AS1, ACNVRL1, ACY1, ACY3, ACYP1, ACYP2, ADA, ADAD1, ADAD2, ADAL, ADAM10, ADAM11, ADAM12, ADAM15, ADAM17, ADAM18, ADAM19, ADAM1A, ADAM2, ADAM20, ADAM20P1, ADAM21, ADAM21P1, ADAM22, ADAM23, ADAM28, ADAM29, ADAM30, ADAM32, ADAM33, ADAM3A, ADAM5, ADAM6, ADAM7, ADAM8, ADAM9, ADAMDEC1, ADAMTS1, ADAMTS10, ADAMTS12, ADAMTS13, ADAMTS14, ADAMTS15, ADAMTS16, ADAMTS17, ADAMTS18, ADAMTS19, ADAMTS19-AS1, ADAMTS2, ADAMTS20, ADAMTS3, ADAMTS4, ADAMTS5, ADAMTS6, ADAMTS7, ADAMTS-7P1, ADAMTS8, ADAMTS9, ADAMTS9-AS1, ADAMTS9-AS2, ADAMTSL1, ADAMTSL2, ADAMTSL3, ADAMTSL4, ADAMTSL4-AS1, ADAMTSL5, ADAP1, ADAP2, ADAR, ADARB1, ADARB2, ADARB2-AS1, ADAT1, ADAT2, ADAT3, ADCK1, ADCK2, ADCK3, ADCK4, ADCK5, ADCY1, ADCY10, ADCY10P1, ADCY2, ADCY3, ADCY4, ADCY5, ADCY6, ADCY7, ADCY8, ADCY9, ADCYAP1, ADCYAP1R1, ADD1, ADD2, ADD3, ADD3-AS1, ADGB, ADH1A, ADH1B, ADH1C, ADH4, ADH5, ADH6, ADH7, ADHFE1, ADI1, ADIG, ADIPOQ, ADIPOQ-AS1, ADIPOR1, ADIPOR2, ADIRF, ADK, ADM, ADM2, ADM5, ADNP, ADNP2, ADNP-AS1, ADO, ADORA1, ADORA2A, ADORA2A-AS1, ADORA2B, ADORA3, ADPGK, ADPGK-AS1, ADPRH, ADPRHL1, ADPRHL2, ADPRM, ADRA1A, ADRA1B, ADRA1D, ADRA2A, ADRA2B, ADRA2C, ADRB1, ADRB2, ADRB3, ADRBK1, ADRBK2, ADRM1, ADSL, ADSS, ADSSL1, ADTRP, AEBP1, AEBP2, AEN, AES, AFAP1, AFAP1-AS1, AFAP1L1, AFAP1L2, AFF1, AFF2, AFF3, AFF4, AFG3L1P, AFG3L2, AFM, AFMID, AFP, AFTPH, AGA, AGAP1, AGAP11, AGAP2, AGAP2-AS1, AGAP3, AGAP4, AGAP5, AGAP6, AGAP7P, AGAP9, AGBL1, AGBL1-AS1, AGBL2, AGBL3, AGBL4, AGBL4-IT1, AGBL5, AGBL5-AS1, AGER, AGFG1, AGFG2, AGGF1, AGK, AGL, AGMAT, AGMO, AGO1, AGO2, AGO3, AGO4, AGPAT1, AGPAT2, AGPAT3, AGPAT4, AGPAT4-IT1, AGPAT5, AGPAT6, AGPAT9, AGPS, AGR2, AGR3, AGRN, AGRP, AGT, AGTPBP1, AGTR1, AGT2, AGTRAP, AGXT, AGXT2, AHCTF1, AHCTF1P1, AHCY, AHCYL1, AHCYL2, AHDC1, AHI1, AHNAK, AHNAK2, AHK, AHRR, AHSA1, AHSA2, AHSG, AHSP, AJCDA, AIDA, AIF1, AIF1L, AIFM1, AIFM2, AIFM3, AIG1, AIM1, AIM1L, AIM2, AIMP1, AIMP2, AIP, AIPL1, AIRE, AIRN, AJAP1, AJUBA, AK1, AK2, AK3, AK4, AK5, AK6, AK7, AK8, AK9, AKAP1, AKAP10, AKAP11, AKAP12, AKAP13, AKAP14, AKAP17A, AKAP2, AKAP3, AKAP4, AKAP5, AKAP6, AKAP7, AKAP8, AKAP8L, AKAP9, AKIP1, AKIRIN1, AKIRIN2, AKNA, AKNAD1, AKR1A1, AKR1B1, AKR1B10, AKR1B15, AKR1C1, AKR1C2, AKR1C3, AKR1C4, AKR1C6P, AKR1C8P, AKR1D1, AKR1E2, AKR7A2, AKR7A2P1, AKR7A3, AKR7L, AKT1, AKT1S1, AKT2, AKT3, AKTIP, ALAD, ALAS1, ALAS2, ALB, ALCAM, ALDH16A1, ALDH18A1, ALDH1A1, ALDH1A2, ALDH1A3, ALD1B1, ALDH1L1, ALDH1L1-AS1, ALDH1L1-AS2, ALDH1L2, ALDH12, ALDH3 A1, ALDH3A2, ALDH3B1, ALDH3B2, ALDH4A1, ALDH5A1, ALDH6A1, ALDH7A1, ALDH8A1, ALDH9A1, ALDOA, ALDOB, ALDOC, ALGI, ALG1, ALG10, ALG10B, ALG11, ALG12, ALG13, ALG14, ALG1L, ALG1L2, ALG1L9P, ALG2, ALG3, ALG5, ALG6, ALG8, ALG9, ALK, ALKBH1, ALKBH2, ALKBH3, ALKBH3-AS1, ALKBH4, ALKBH5, ALKBH6, ALKBH7, ALKBH8, ALLC, ALMS1, ALMS1-IT1, ALMS1P, ALOX12, ALOX12-AS1ALOX12B, ALOX12P2, ALOX15, ALOX15B, ALOX15P1, ALOX5, ALOX5AP, ALOXE3, ALPI, ALPK1, ALPK2, ALPK3, ALPL, ALPP, ALPPL2, ALS2, ALS2CL, ALS2CR11, ALS2CR12, ALX1, ALX3, ALX4, ALYREF, AMACR, AMBN, AMBP, AMBRA1, AMD1, AMDHD1, AMDHD2, AMELX, AMER1, AMER2, AMER3, AMFR, AMH, AMHR2, AMICA1, AMIGO1, AMIGO2, AMIGO3, AMMECRI, AMMECR1L, AMN, AMN1, AMOT, AMOTL1, AMOTL2, AMPD1, AMPD2, AMPD3, AMPH, AMT, AMTN, AMY1A, AMY1B, AMY1C, AMY2A, AMY2B, AMZ1, AMZ2, AMZ2P1, ANAPC1, ANAPC10, ANAPC11, ANAPC13, ANAPC15, ANAPC16, ANAPC1P1, ANAPC2, ANAPC4, ANAPC5, ANAPC7, ANG, ANGEL1, ANGEL2, ANGPT1, ANGPT2, ANGPT4, ANGPTL1, ANGPTL2, ANGPTL3, ANGPTL4, ANGPTL5, ANGPTL6, ANGPTL7, ANHX, ANK1, ANK2, ANK3, ANKAR, ANKDD1A, ANKDD1B, ANKEF1, ANKFN1, ANKFY1, ANKH, ANKHD1, ANKHD1-EIF4EBP3, ANKIB1, ANKK1, ANKLE1, ANKLE2, ANKMY1, ANKMY2, ANKRA2, ANKRD1, ANKRD10, ANIKRD11, ANKRD12, ANKRD13A, ANKRD13B, ANKRD13C, ANKRD13D, ANKRD16, ANKRD17, ANKRD18A, ANKRD18B, ANKRD18DP, ANKRD19P, ANKRD2, ANKRD20A1, ANKRD20A11P, ANKRD20A19P, ANKRD20A2, ANKRD20A3, ANKRD20A4, ANKRD20A5P, ANKRD20A8P, ANKR20A9P, ANKRD22, ANKRD23, ANKRD24, ANKRD26, ANKRD26P1, ANKRD26P3, ANKRD27, ANKRD28, ANKRD29, ANKRD30A, ANKRD30B, ANKRD30BL, ANKRD30BP2, ANKRD30BP3, ANKRD31, ANKRD32, ANKRD33, ANKRD33B, ANKRD34A, ANKRD34B, ANKRD34C, ANKRD34C-AS1, ANKRD35, ANKRD36, ANKRD36B, ANKRD36BP1, ANKRD36BP2, ANKRD37, ANKRD39, ANKRD40, ANKRD42, ANKRD44, ANKRD44-IT1, ANKRD45, ANKRD46, ANKRD49, ANKRD50, ANKRD52, ANKRD53, ANKRD54, ANKRD55, ANKRD6, ANKRD61, ANKRD62, ANKRD62P1-PARP4P3, ANKRD63, ANKRD65, ANKRD66, ANKRD7, ANKRD9, ANKS1A, ANKS1B, ANKS3, ANKS4B, ANKS6, ANKUB1, ANKZF1, ANLN, ANO10, ANO1-AS2, ANO2, ANO3, ANO4, ANO5, ANO6, ANO7, ANO8, ANO9, ANP32A, ANP32A-1T1, ANP32AP1, ANP32B, ANP32C, ANP32D, ANP32E, ANPEP, ANTX1, ANTXR2, ANTXRL, ANTXRLP1, ANXA1, ANXA10, ANXA11, ANXA13, ANXA2, ANXA2P1, ANXA2P2, ANXA2P3, ANXA2R, ANXA3, ANXA4, ANXA5, ANXA6, ANXA7, ANXA8, ANXA8L1, ANXA9, AOAH, AOAH-IT1, AOC1, AOC2, AOC3, AOC4P, AOX1, AOX2P, AP1AR, AP1B1, AP1B1P1, AP1G1, AP1G2, AP1M1, AP1M2, AP1S1, AP1S2, AP1S3, AP2A1, AP2A2, AP2B1, AP2M1, AP2, AP3B1, AP3B2, AP3D1, AP3M1, AP3M2, AP3S1, AP3S2, AP4B1, AP4B-AS1, AP4E1, AP4M1, AP4S1, AP5B1, AP5M1, AP5S1, AP5Z1, APAF1, APBA1, APBA2, APBA3, APBB1, APBB1IP, APBB2, APBB3, APC, APC2, APCDD1, APCDD1L, APCDD1L-AS1, APCS, APEH, APELA, APEX1, APEX2, APH1A, APH1B, API-B15, APIP, APITD1, APITD1-CORT, APLF, APLN, APLNR, APLP1, APLP2, APMAP, APOA1, APOA1-AS, APOA1BP, APOA2, APOA4, APOA5, APOB, APOBEC1, APOBEC2, APOBEC3A, APOBEC3A_B, APOBEC3B, APOBEC3B-AS1, APOBEC3C, APOBEC3D, APOBEC3F, APOBEC3G, APOBEC3H, APOBEC4, APOBR, APOC1, APOC1P1, APOC2, APOC3, APOC4, APOC4-APOC2, APOD, APOE, APOF, APOH, APOL1, APOL2, APOL3, APOL4, APOL5, APOL6, APOLD1, APOM, APOO, APOOL, APOOP5, APOPT1, APP, APPBP2, APPL1, APPL2, APRT, APTR, APTX, AQP1, AQP10, AQP11, AQP12A, AQP12B, AQP2, AQP3, AQP4, AQP4-AS1, AQP5, AQP6, AQP7, AQP7P1, AQP7P3, AQP8, AQP9, AQPEP, AQR, AR, ARAF, ARAP1, ARAP2, ARAP3, ARC, ARCN1, AREG, AREL1, ARF1, ARF3, ARF4, ARF5, ARF6, ARFGAP1, ARFGAP2, ARFGAP3, ARFGEF1, ARFGEF2, ARFIP1, ARFIP2, ARFRP1, ARG1, ARG2, ARGFX, ARGFXP2, ARGLU1, ARHGAP1, ARHGAP10, ARHGAP11A, ARHGAP11B, ARHGAP12, ARHGAP15, ARHGAP17, ARHGAP18, ARHGAP19, ARHGAP19-SLIT1, ARHGAP20, ARHGAP21, ARHGAP22, ARHGAP23, ARHGAP24, ARHGAP25, ARHGAP26, ARHGAP26-AS1, ARHGAP27, ARHGAP28, ARHGAP29, ARHGAP30, ARHGAP31, ARHGAP31-AS1, ARHGAP32, ARHGAP33, ARHGAP35, ARHGAP36, ARHGAP39, ARHGAP4, ARHGAP40, ARHGAP42, ARHGAP44, ARHGAP5, ARHGAP5-AS1, ARHGAP6, ARHGAP8, ARHGAP9, ARHGDIA, ARHGD1B , ARHGDIG, ARHGEF1, ARHGEF10, ARHGEF10L, ARHGEF11, ARHGEF12, ARHGEF15, ARHGEF16, ARHGEF17, ARHGEF18, ARHGEF19, ARHGEF2, ARHGEF25, ARHGEF26, ARHGEF26-AS1, ARHGEF28, ARHGEF3, ARHGEF33, ARHGEF34P, ARHGEF35, ARHGEF37, ARHGEF38, ARHGEF38-IT1, ARHGEF39, ARHGEF39-AS1, ARHGEF4, ARHGEF40, ARHGEF5, ARHGEF6, ARHGEF7, ARHGEF7-AS1, ARHGEF9, ARHGEF9-IT1, ARID1A, ARID1B, ARID2, ARID3A, ARID3B, ARID3C, ARID4A, ARID4B, ARID5A, ARID5B, ARIH1, ARIH2, ARIH2OS, ARL1, ARL10, ARL11, ARL13A, ARL13B, ARL14, ARL14EP, ARL14EPL, ARL15, ARL16, ARL17A, ARL17B, ARL2, ARL2BP, ARL2-SNX15, ARL3, ARL4A, ARL4C, ARL4D, ARL5A, ARL5B, ARL5C, ARL6, ARL6IP1, ARL6IP4, ARL6IP5, ARL6IP6, ARL8A, ARL8B, ARL9, ARMC1, ARMC10, ARMC12, ARMC2, ARMC2-AS1, ARMC3, ARMC4, ARMC5, ARMC6, ARMC7, ARMC8, ARMC9, ARMCX1, ARMCX2, ARMCX3, ARMCX4, ARMCX5, ARMCX5-GPRASP2, ARMCX6, ARMS2, ARNT, ARNT2, ARNTL, ARNTL2, ARNTL2-AS1, ARPC1A, ARPC1B, ARPC2, ARPC3, ARPC4, ARPC4-TTLL3, ARPC5, ARPC5L, ARPIN, ARPP19, ARPP21, ARR3, ARRB1, ARRB2, ARRDC1, ARRDC1-AS1, ARRDC2, ARRDC3, ARRDC3-AS1, ARRDC4, ARRDC5, ARSA, ARSB, ARSD, ARSE, ARSF, ARSG, ARSH, ARSI, ARSJ, ARSK, ART1, ART3, ART4, ART5, ARTN, ARV1, ARVCF, ARX, AS3MT, ASAH1, ASAH2, ASAH2B, ASAP1, ASAP1-IT1, ASAP1-IT2, ASAP2, ASAP3, ASB1, ASB10, ASB11, ASB12, ASB13, ASB14, ASB15, ASB16, ASB16-AS1, ASB17, ASB18, ASB2, ASB3, ASB4, ASB5, ASB6, ASB7, ASB8, ASB9, ASB9P1, ASCC1, ASCC2, ASCC3, ASCL1, ASCL2, ASCL3, ASCL4, ASCL5, ASF1A, ASF1B, ASGR1, ASGR2, ASH1L, ASH1L-AS1, ASH2L, ASIC1, ASIC2, ASIC3, ASIC4, ASIC5, ASIP, ASL, ASMT, ASMTL, ASMTL-AS1, ASNA1, ASNS, ASNSD1, ASPA, ASPDH, ASPG, ASPH, ASPHD1, ASPHD2, ASPM, ASPN, ASPRV1, ASPSCR1, ASRGL1, ASS1, ASTE1, ASTL, ASTN1, ASTN2, ASTN2-AS1, ASUN, ASXL1, ASXL2, ASXL3, ASZ1, ATAD1, ATAD2, ATAD2B, ATAD3A, ATAD3B, ATAD3C, ATAD5, ATAT1, ATCAY, ATE1, ATE1-AS1, ATF1, ATF2, ATF3, ATF4, ATF5, ATF6, ATF6B, ATF7, ATF7IP, ATF71P2, ATG10, ATG101, ATG12, ATG13, ATG14, ATG16L1, ATG16L2, ATG2A, ATG2B, ATG3, ATG4A, ATG4B, ATG4C, ATG4D, ATG5, ATG7, ATG9A, ATG9B, ATHL1, ATIC, ATL1, ATL2, ATL3, ATM, ATMIN, ATN1, ATOH1, ATOH7, ATOH8, ATOX1, ATP10A, ATP10B, ATP10D, ATP11A, ATP11A-AS1, ATP11AUN, ATP11B, ATP11C, ATP12A, ATP13A1, ATP13A2, ATP13A3, ATP13A4, ATP13A4-AS1, ATP13A5, ATP13A5-AS1, ATP1A1, ATP1A1-AS1, ATP1A2, ATP1A3, ATP1A4, ATP1B1, ATP1B2, ATP1B3, ATP1B4, ATP2A1, ATP2A1-AS1, ATP2A2, ATP2A3, ATP2B1, ATP2B2, ATP2B2-IT2, ATP2B3, ATP2B4, ATP2C1, ATP2C2, ATP4A, ATP4B, ATP5A1, ATP5B, ATP5C1, ATP5D, ATP5E, ATP5EP2, ATP5F1, ATP5G1, ATP5G2, ATP5G3, ATP5H, ATP5I, ATP5J, ATP5J2, ATP5J2-PTCD1, ATP5L, ATP5L2, ATP5O, ATP5S, ATP5SL, ATP6AP1, ATP6AP1L, ATP6AP2, ATP6V0A1, ATP6V0A2, ATP6V0A4, ATP6V0B, ATP6V0C, ATP6V0CP3, ATP6V0D1, ATP6V0D2, ATP6V0E1, ATP6V0E2, ATP6V0E2-AS1, ATP6V1A, ATP6V1B1, ATP6V1B1-AS1, ATP6V1B2, ATP6V1C1, ATP6V1C2, ATP6V1D, ATP6V1E1, ATP6V1E2, ATP6V1F, ATP6V1G1, ATP6V1G2, ATP6V1G2-DDX39B, ATP6V1G3, ATP6V1H, ATP7A, ATP7B, ATP8A1, ATP8A2, ATP8B1, ATP8B2, ATP8B3, ATP8B4, ATP8B5P, ATP9A, ATP9B, ATPAF1, ATPAF2, ATP1F1, ATR, ATRAID, ATRIP, ATRN, ATRNL1, ATRX, ATXN1, ATXN10, ATXN1L, ATXN2, ATXN2L, ATXN3, ATXN3L, ATXN7, ATXN7L1, ATXN7L2, ATXN7L3, ATXN7L3B, ATXN8OS, AUH, AUNIP, AUP1, AURKA, AURKAIP1, AURKAPS1, AURKB, AURKC, AUTS2, AVEN, AVIL, AVL9, AVP, AVPI1, AVPR1A, AVPR1B, AVPR2, AWAT1, AWAT2, AXDND1, AXIN1, AXIN2, AXL, AZGP1, AZGP1P1, AZI2, AZIN1, AZIN2, AZU1, B2M, B3GALNT1, B3GALNT2, B3GALT1, B3GALT2, B3GALT4, B3GALT5, B3GALT5-AS1, B3GALT6, B3GALTL, B3GAT1, B3GAT2, B3GAT3, B3GNT1, B3GNT2, B3GNT3, B3GNT4, B3GNT5, B3GNT6, B3GNT7, B3GNT8, B3GNT9, B3GNTL1, B4GALNT1, B4GALNT2, B4GALNT3, B4GALNT4, B4GALT1, B4GALT1-AS1, B4GALT2, B4GALT3, B4GALT4, B4GALT4-AS1, B4GALT5, B4GALT6, B4GALT7, B9D1, B9D2, BAALC, BAALC-AS1, BAALC-AS2, BAAT, BABAM1, BACE1, BACE1-AS, BACE2, BACH1, BACH1-IT2, BACH2, BAD, BAG-1, BAG2, BAG3, BAG4, BAG-5, BAG6, BAGE, BAGE2, BAGE3, BAGE4, BAGE5, BAGCC1, BAHD1, BAI1, BAI2, BAI3, BAIAP2, BAIAP2-AS1, BAIAP2L1, BAIAP2L2, BAIAP3, BAK1, BAMBI, BANCR, BANFI1, BANF2, BANK1, BANP, BAP1, BARD1, BARHL1, BARHL2, BARX1, BARX2, BASP1, BASP1P1, BATF, BATF2, BATF3, BAX, BAZ1A, BAZ1B, BAZ2A, BAZ2B, BBC3, BBIP1, BBOX1, BBOX1-AS1, BBS1, BBS10, BBS12, BBS2, BBS4, BBS5, BBS7, BBS9, BBX, BCAM, BCAN, BCAP29, BCAP31, BCAR1, BCAR3, BCAR4, BCAS1, BCAS2, BCAS3, BCAS4, BCAT1, BCAT2, BCCIP, BCDIN3D, BCDIN3D-AS1, BCHE, BCKDHA, BCKDHB, BCKDK, BCL10, BCL11A, BCL11B, BCL2, BCL2A1, BCL2L1, BCL2L10, BCL2L11, BCL2L12, BCL2L13, BCL2L14, BCL2L15, BCL2L2, BCL2L2-PABPN1, BCL3, BCL6, BCL6B, BCL7A, BCL7B, BCL7C, BCL9, BCL9L, BCLAF1, BCO1, BCO2, BCOR, BCORL1, BCORL1, BCORP1, BCR, BCRP2, BCRP3, BCS1L, BCYRN1, BDH1, BDH2, BDKRB1, BDKR2, BDNF, BDNF-AS, BDP1, BEAN1, BEAN1-AS1, BECN1, BECN1P1, BEGAIN, BEND2, BEND3, BEND3P3, BEND4, BEND5, BEND6, BEND7, BEST1, BEST2, BEST3, BEST4, BET1, BET1L, BEX1, BEX2, BEX4, BEX5, BFAR, BFSP1, BFSP2, BGLAP, BGLT3, BGN, BHLHA15, BHLHA9, BHLHB9, BHLHE22, BHLHE23, BHLHE40, BHLHE40-AS1, BHLHE41, BHMT, BHMT2, BICC1, BICD1, BICD2, BID, BIK, BIN1, BIN2, BIN3, BIN3-IT1, BIRC2, BIRC3, BIRC5, BIRC6, BIRC6-AS2, BIRC7, BIRC8, BIVM, BIVM-ERCC5, BLACAT1, BLACE, BLCAP, BLID, BLK, BLM, BLMH, BLNK, BLOC1S1, BLOC1S1-RDH5, BLOC1S2, BLOC1S3, BLOC1S4, BLOC1S5, BLOC1S5-TXNDC5, BLOC1S6, BLVRA, BLVRB, BLZF1, BMF, BMI1, BMP1, BMP10, BMP15, BMP2, BMP2K, BMP3, BMP4, BMP5, BMP6, BMP7, BMP7-AS1, BMP8A, BMP8B, BMPER, BMPR1A, BMPR1B, BMPR1B-AS1, BMPR2, BMS1, BMS1P17, BMS1P18, BMS1P20, BMS1P4, BMS1P5, BMS1P6, BMX, BNC1, BNC2, BNIP1, BNIP2, BNIP3, BNIP3L, BNIPL, BOC, BOD1, BOD1L1, BOD1L2, BOK, BOK-AS1, BOLA1, BOLA2, BOLA2B, BOLA3, BOLA3-AS1, BOLL, BOP1, BORA, BPESC1, BPGM, BPHL, BPI, BPIFA1, BPIFA2, BPIFA3, BPIFA4P, BPIFB1, BPIFB2, BPIFB3, BPIFB4, BPIFB6, BPIFC, BPNT1, BPTF, BRAF, BRAP, BRAT1, BRCA1, BRCA2, BRCC3, BRD1, BRD2, BRD3, BRD4, BRD7, BRD7P3, BRD8, BRD9, BRDT, BRDTP1, BRE, BRE2, BREA2, BRE-AS1, BRF1, BRF2, BRI3, BRI3BP, BR1CD5, BRINP1, BRINP2, BRINP3, BRIP1, BRIX1, BRK1, BRMS1, BRMS1L, BROX, BRPF1, BRPF3, BRS3, BRSK1, BRSK2, BRWD1, BRWD1-AS1, BRWD1-IT2, BRWD3, BSCL2, BSDC1, BSG, BSN, BSN-AS2, BSND, BSPH1, BSPRY, BST1, BST2, BSX, BTAF1, BTBD1, BTBD10, BTBD11, BTBD16, BTBD17, BTBD18, BTBD19, BTBD2, BTBD3, BTBD6, BTBD7, BTBD8, BTBD9, BTC, BTD, BTF3, BTF3L4, BTF3P11, BTG1, BTG2, BTG3, BTG4, BTK, BTLA, BTN1A1, BTN2A1, BTN2A2, BTN2A3P, BTN3A1, BTN3A2, BTN3A3, BTNL10, BTNL2, BTNL3, BTNL8, BTNL9, BTRC, BUB1, BUB1B, BUB3, BUD13, BUD31, BVES, BVES-AS1, BYSL, BZRAP1, BZRAP1-AS1, BZW1, BZW2, C10orf10, C10orf105, C10orf107, C10orf11, C10orf111, C10orf113, C10orf12, C10orf120, C10orf126, C10orf128, C10orf131, C10orf2, C10orf25, C10orf32, C10orf32-ASMT, C10orf35, C10orf53, C10orf54, C10orf55, C10orf62, C10orf67, C10orf71, C10orf71-AS1, C10orf76, C10orf82, C10orf88, C10orf90, C10orf91, C10orf95, C10orf99, C11orf1, C11orf16, C11orf21, C11orf24, C11orf30, C11orf31, C11orf39, C11orf40, C11orf42, C11orf44, C11orf45, C11orf49, C11orf52, C11orf53, C11orf54, C11orf57, C11orf58, C11orf63, C11orf65, C11orf68, C11orf70, C11orf71, C11orf73, C11orf74, C11orf80, C11orf84, C11orf85, C11orf86, C11orf87, C11orf88, C11orf91, C11orf94, C11orf95, C11orf96, C11orf97, C11orf98, C12orf10, C12orf29, C12orf4, C12orf40, C12orf42, C12orf43, C12orf45, C12orf49, C12orf5, C12orf50, C12orf54, C12orf56, C12orf57, C12orf60, C12orf65, C12orf66, C12orf71, C12orf73, C12orf74, C12orf75, C12orf76, C12orf77, C12orf79, C12orf80, C14orf1, C14orf105, C14orf119, C14orf132, C14orf142, C14orf159, C14orf166, C14orf169, C14orf177, C14orf178, C14orf180, C14orf182, C14orf183, C14orf2, C14orf28, C14orf37, C14orf39, C14orf79, C14orf80, C14orf93, C15orf26, C15orf27, C15orf32, C15orf38-AP3S2, C15orf39, C15orf40, C15orf41, C15orf43, C15orf48, C15orf52, C15orf53, C15orf54, C15orf56, C15orf57, C15orf59, C15orf59-AS1, C15orf61, C15orf62, C15orf65, C16orf13, C16orf45, C16orf46, C16orf47, C16orf52, C16orf54, C16orf58, C16orf59, C16orf62, C16orf70, C16orf71, C16orf72, C16orf74, C16orf78, C16orf82, C16orf86, C16orf87, C16orf89, C16orf90, C16orf91, C16orf92, C16orf93, C16orf95, C16orf96, C16orf97, C17orf100, C17orf102, C17orf104, C17orf105, C17orf107, C17orf112, C17orf47, C17orf49, C17orf50, C17orf51, C17orf53, C17orf58, C17orf59, C17orf62, C17orf64, C17orf67, C17orf70, C17orf74, C17orf75, C17orf77, C17orf78, C17orf80, C17orf82, C17orf85, C17orf89, C17orf96, C17orf97, C17orf198, C7orf99, C18orf21, C18orf25, C18orf32, C18orf42, C18orf54, C18orf61, C18orf63, C18orf65, C18orf8, C19orf10, C19orf12, C19orf18, C19orf24, C19orf25, C19orf26, C19orf33, C19orf35, C19orf38, C19orf40, C19orf43, C19orf44, C19orf45, C19orf47, C19orf48, C19orf52, C19orf53, C19orf54, C19orf57, C19orf60, C19orf66, C19orf67, C19orf68, C19orf70, C19orf71, C19orf73, C19orf80, C19orf81, C19orf83, C19orf84, C1D, C1GALT1, C1GALT1C1, C1orf100, C1orf101, C1orf105, C1orf106, C1orf109, C1orf110, C1orf111, C1orf112, C1orf115, C1orf116, C1orf122, C1orf123, C1orf127, C1orf131, C1orf137, C1orf140, C1orf141, C1orf145, C1orf146, C1orf158, C1orf159, C1orf162, C1orf167, C1orf168, C1orf174, C1orf177, C1orf185, C1orf186, C1orf189, C1orf194, C1orf195, C1orf198, C1orf204, C1orf21, C1orf210, C1orf216, C1orf220, C1orf226, C1orf228, C1orf229, C1orf233, C1orf234, C1orf27, C1orf35, C1orf43, C1orf50, C1orf52, C1orf53, C1orf54, C1orf56, C1orf61, C1orf64, C1orf68, C1orf74, C1orf85, C1orf86, C1orf87, C1orf94, C1orf95, C1QA, C1QB, C1QBP, C1QC, C1QL1, C1QL2, C1QL3, C1QL4, C1QTNF1, C1QTNF1-AS1, C1QTNF2, C1QTNF3, C1QTNF3-AMACR, C1QTNF4, C1QTNF5, C1QTNF6, C1QTNF7, C1QTNF8, C1QTNF9, C1QTNF9B, C1QTNF9B-AS1, C1R, C1RL, C1RL-AS1, C1S, C2, C20orf141, C20orf144, C20orf166-AS1, C20orf173, C20orf194, C20orf195, C20orf196, C20orf197, C20orf202, C20orf203, C20orf24, C20orf27, C20orf62, C20orf78, C20orf85, C20orf96, C21orf140, C21orf2, C21orf33, C21orf58, C21orf59, C21orf62, C21orf62-AS1, C21orf91, C21orf91-OT1, C22orf15, C22orf23, C22orf24, C22orf29, C22orf31, C22orf34, C22orf39, C22orf42, C22orf46, C2-AS1, C2CD2, C2CD2L, C2CD3, C2CD4A, C2CD4B, C2CD4C, C2CD4D, C2CD5, C2orf15, C2orf16, C2orf27A, C2orf27B, C2orf40, C2orf42, C2orf43, C2orf44, C2orf47, C2orf48, C2orf49, C2orf50, C2orf54, C2orf57, C2orf61, C2orf66, C2orf68, C2orf69, C2orf70, C2orf71, C2orf72, C2orf73, C2orf74, C2orf76, C2orf78, C2orf80, C2orf81, C2orf82, C2orf83, C2orf88, C2orf91, C3, C3AR1, C3orf14, C3orf17, C3orf18, C3orf20, C3orf22, C3orf30, C3orf33, C3orf35, C3orf36, C3orf38, C3orf49, C3orf52, C3orf56, C3orf58, C3orf62, C3orf67, C3orf67-AS1, C3orf70, C3orf79, C3orf80, C3orf84, C3P1, C4A C4B, C4_2, C4BPA, C4BPB, C4orf17, C4orf19, C4orf22, C4orf26, C4orf27, C4orf29, C4orf3, C4orf32, C4orf33, C4orf36, C4orf45, C4orf46, C4orf47, C4orf48, C4orf51, C4orf6, C5, C5AR1, C5AR2, C5orf15, C5orf22, C5orf24, C5orf28, C5orf30, C5orf34, C5orf38, C5orf42, C5orf45, C5orf46, C5orf47, C5orf49, C5orf51, C5orf52, C5orf55, C5orf56, C5orf58, C5orf60, C5orf63, C5orf64, C5orf66, C5orf66-AS1, C5orf66-AS2, C6, C6orf1, C6orf10, C6orf106, C6orf118, C6orf120, C6orf132, C6orf136, C6orf141, C6orf15, C6orf163, C6orf164, C6orf165, C6orf195, C6orf201, C6orf203, C6orf211, C6orf222, C6orf223, C6orf226, C6orf229, C6orf25, C6orf47, C6orf48, C6orf52, C6orf57, C6orf58, C6orf62, C6orf7, C6orf89, C6orf99, C7, C7orf13, C7orf25, C7orf26, C7orf31, C7orf33, C7orf34, C7orf43, C7orf49, C7orf50, C7orf55, C7orf55-LUC7L2, C7orf57, C7orf60, C7orf61, C7orf62, C7orf65, C7orf66, C7orf69, C7orf71, C7orf72, C7orf73, C7orf76, C8A, C8B, C8G, C8orf22, C8orf31, C8orf33, C8orf34, C8orf37, C8orf37-AS1, C8orf4, C8orf44, C8orf44-SGK3, C8orf46, C8orf48, C8orf49, C8orf58, C8orf59, C8orf74, C8orf76, C8orf82, C8orf86, C8orf87, C8orf88, C8orf89, C9, C9orf106, C9orf114, C9orf116, C9orf117, C9orf129, C9orf131, C9orf135, C9orf135-AS1, C9orf139, C9orf142, C9orf152, C9orf153, C9orf156, C9orf16, C9orf163, C9orf170, C9orf171, C9orf172, C9orf173, C9orf173-AS1, C9orf24, C9orf3, C9orf40, C9orf41, C9orf41-AS1, C9orf43, C9orf47, C9orf50, C9orf57, C9orf62, C9orf64, C9orf66, C9orf69, C9orf72, C9orf78, C9orf84, C9orf85, C9orf89, C9or9, C9orf91, C9orf92, CA1, CA10, CA11, CA12, CA13, CA14, CA2, CA3, CA4, CA5A, CA5B, CA5BP1, CA6, CA7, CA8, CA9, CAAP1 , CAB39, CAB39L, CAMN1, CABLES1, CABLES2, CABP1, CABP2, CABP4, CABP5, CABP7, CABS1, CABYR, CACFD1, CACHD1, CACNA1A, CACNA1B, CACNA1C, CACNA1C-AS1, CACNA1C-AS2, CACNA1C-AS4, CACNA1C-IT2, CACNA1C-IT3, CACNA1D, CACNA1E, CACNA1F, CACNA1G, CACNA1G-AS1, CACNA1H, CACNA1I, CACNA1S, CACNA2D1, CACNA2D2, CACNA2D3, CACNA2D3-AS1, CACNA2D4, CACNB1, CACNB2, CACNB3, CACNB4, CACNG1, CACNG2, CACNG3, CACNG4, CACNG5, CACNG6, CACNG7, CACNG8, CACTIN, CACTIN-AS1, CACUL1, CACYBP, CAD, CADM1, CADM2, CADM2-AS2, CADM3, CADM3-AS1, CADM4, CARPS, CADPS2, CAGE1, CAHM, CALB1, CALB2, CALCA, CALCB, CALCOCO1, CALCOC02, CALCR, CALCRL, CALD1, CALHM1, CALHM2, CALHM3, CALM1, CALM2, CALM3, CALML3, CALML3-AS1, CALML4, CALML5, CALML6, CALN1, CALR, CALR3, CALU, CALY, CAMK1, CAMK1D, CAMK1G, CAMK2A, CAMK2B, CAMK2D, CAMK2G, CAMK2N1, CAMK2N2, CAMK4, CAMKK1, CAMKK2, CAMKMT, CAMKV, CAMLG, CAMP, CAMSAP1, CAMSAP2, CAMSAP3, CAMTA1, CAMTA2, CAND1, CAND1.11, CAND2, CANT1, CANX, CAP1, CAP2, CAPG, CAPN1, CAPN10, CAPN10-AS1, CAPN11, CAPN12, CAPN13, CAPN14, CAPN15, CAPN2, CAPN3, CAPN5, CAPN6, CAPN7, CAPN8, CAPN9, CAPNS1, CAPNS2, CAPRIN1, CAPRIN2, CAPS, CAPS2, CAPSL, CAPZA1, CAPZA2, CAPZA3, CAPZB, CARD10, CARD11, CARD14, CARD16, CARD17, CARD18, CARD6, CARD8, CARD8-AS1, CARD9, CARF, CARHSP-B 1-L , CARKD, CARM1, CARNS1, CARS, CARS2, CARTPT, CASC1, CASC10, CASC11, CASC15, CASC16, CASC17, CASC18, CASC19, CASC2, CASC20, CASC21, CASC23, CASC3, CASC4, CASC5, CASC6, CASC8, CASC9, CASD1, CASK, CASKIN1, CASKIN2, CASP1, CASP10, CASP12, CASP14, CASP2, CASP3, CASP4, CASP5, CASP6, CASP7, CASP8, CASP8AP2, CASP9, CASQ1, CASQ2, CASR, CASS4, CAST, CASZ1, CAT, CATIP, CATIP-AS1, CATIP-AS2, CATSPER1, CATSPER2, CATSPER2P1, CATSPER3, CATSPER4, CATSPERB, CATSPERD, CATSPERG, CAV1, CAV2, CAV3, CBFA2T2, CBFA2T3, CBFB, CBL, CBLB, CBLC, CBLL1, CBLN1, CBLN2, CBLN2, CBLN3, CBLN4, CBR1, CBR3, CBR3-AS1, CBR4, CBS, CBWD1, CBWD2, CBWD3, CBWD5, CBWD6, CBX1, CBX2, CBX3, CBX3P2, CRX4, CBX5, CBX6, CBX7, CBX8, CBY1, CRY3, CC2D1A, CC2D1B, CC2D2A, CC2D2B, CCAR1, CCAR2, CCAT1, CCAT2, CCBE1, CCBL1, CCBL2, CCDC101, CCDC102A, CCDC102B, CCDC103, CCDC105, CCDC106, CCDC107, CCDC108, CCDC109B, CCDC110, CCDC112, CCDC113, CCDC114, CCDC115, CCDC116, CCDC117, CCDC12, CCDC120, CCDC121, CCDC122, CCDC124, CCDC125, CCDC126, CCDC127, CCDC129, CCDC13, CCDC130, CCDC132, CCDC134, CCDC136, CCDC137, CCDC138, CCDC13-AS1, CCDC14, CCDC140, CCDC141, CCDC142, CCDC144A, CCDC144B, CCDC144CP, CCDC144NL, CCDC144NL-AS1, CCDC146, CCDC147-AS1, CCDC148, CCDC148-AS1, CCDC149, CCDC15, CCDC150, CCDC151, CCDC152, CCDC153, CCDC154, CCDC155, CCDC157, CCDC158, CCDC159, CCDC160, CCDC162P, CCDC163P, CCDC166, CCDC167, CCDC168, CCDC169, CCDC169-SOHLH2, CCDC17, CCDC170, CCDC171, CCDC172, CCDC173, CCDC174, CCDC175, CCDC176, CCDC177, CCDC178, CCDC179, CCDC18, CCDC180, CCDC181 CCDC182, CCDC183, CCDC183-AS1, CCDC184, CCDC185, CCDC186, CCDC22, CCDC23, CCDC24, CCDC25, CCDC27, CCDC28A, CCDC28B, CCDC3, CCDC30, CCDC33, CCDC34, CCDC36, CCDC37, CCDC37-AS1, CCDC38, CCDC39, CCDC40, CCDC42, CCDC42B, CCDC43, CCDC47, CCDC50, CCDC51, CCDC53, CCDC54, CCDC57, CCDC58, CCDC59, CCDC6, CCDC60, CCDC61, CCDC62, CCDC63, CCDC64, CCDC64B, CCDC65, CCDC66, CCDC67, CCDC68, CCDC69, CCDC7, CCDC70, CCDC71, CCDC7IL, CCDC73, CCDC74A, CCDC74B, CCDC77, CCDC78, CCDC79, CCDC8, CCDC80, CCDC81, CCDC82, CCDC83, CCDC84, CCDC85A, CCDC85B, CCDC85C, CCDC86, CCDC87, CCDC88A, CCDC88B, CCDC88C, CCDC89, CCDC9, CCDC90B, CCDC91, CCDC92, CCDC93, CCDC94, CCDC96, CCDC97, CCER1, CCER2, CCHCR1, CCIN, CCK, CCKAR, CCKBR, CCL1, CCL11, CCL13, CCL14, CCL15, CCL15-CCL14, CCL16, CCL17, CCL18, CCL19, CCL2, CCL20, CCL21, CCL22, CCL23, CCL24, CCL25, CCL26, CCL27, CCL28, CCL3, CCL3L1, CCL3L3, CCL4, CCL4L1, CCL4L2, CCL5, CCL7, CCL8, CCM2, CCM2L, CCNA1, CCNA2, CCNB1, CCNB1IP1, CCNB2, CCNB3, CCNC, CCND1, CCND2, CCND2-AS1, CCND3, CCNDBP1, CCNE1, CCNE2, CCNF, CCNG1, CCNG2, CCNH, CCNI, CCNI2, CCNJ, CCNJL, CCNK, CCNL1, CCNL2, CCNO, CCNT1, CCNT2, CCNT2-AS1, CCNY, CCNYL1, CCNYL2, CCP110, CCPG1, CCR1, CCR10, CCR2, CCR3, CCR4, CCR5, CCR6, CCR7, CCR8, CCR9, CCRL2, CCRN4L, CCS, CCSAP, CCSER1, CCSER2, CCT3, CCT4, CCT5, CCT6A, CCT6B, CCT6P1, CCT6P3, CCT7, CCT8, CCT8L2, CCZ1, CCZ1B, CD10I, CD109, CD14, CD151, CD160, CD163, CD163L1, CD164, CD164L2, CD177, CD180, CD19, CD1A, CD1B, CD1C, CD1D, CD1E, CD2, CD200, CD200R1, CD200R1L, CD207, CD209, (1)22, CD226, CD24, CD244, CD247, CD248, CD27, CD274, CD276, CD27-AS1, CD28, CD2AP, CD2BP2, CD300A, CD300C, CD300E, CD300LB, CD300LD, CD300LF, CD300LG, CD302, CD320, CD33, CD34, CD36, CD37, CD38, CD3D, CD3E, CD3EAP, CD3G, CD4, CD40, CD40LG, CD44, CD46, CD47, CD48, CD5, CD52, CD53, CD55, CD58, CD59, CD5L, CD6, CD63, CD68, CD69, CD7, CD70, CD72, CD74, CD79A, CD79B, CD80, CD81, CD81-AS1, C82, CD83, CD84, CD86, CD8A, CD8B, CD9, CD93, CD96, CD97, CD99, CD99L2, CD99P1, CDA, CDADC1, CDAN1, CDC123, CDC14A, CDC14B, CDC14C, CDC16, CDC20, CDC20B, CDC23, CDC25A, CDC25B, CDC25C, CDC26, CDC27, CDC34, CDC37, CDC37L1, CDC37L1-AS1, CDC40, CDC42, CDC42BPA, CDC42BPB, CDC42BPG, CDC42EP1, CDC42EP2, CDC42EP3, CDC42EP4, CDC42EP5, CDC42P3, CDC42SE1, CDC42SE2, CDC45, CDC5L, CDC6, CDC7, CDC73, CDCA2, CDCA3, CDCA4, CDCA5, CDCA7, CDCA7L, CDCA8, CDCP1, CDCP2, CDH1, CDH10, CDH11, CDH12, CDH13, CDH15, CDH16, CDH17, CDH18, CDH19, CDH2, CDH20, CDH22, CDH23, CDH24, CDH26, CDH3, CDH4, CDE5, CD6, CDH7, CDH8, CDH9, CDHR1, CDHR2, CDHR3, CDHR4, CDHR5, CDIP1, CDIPT, CDIPT-AS1, CDK1, CDK10, CDK11A, CDK11B, CDK12, CDK13, CDK14, CDK15, CDK16, CDK17, CDK18, CDK19, CDK2, CDK20, CDK2AP1, CDK2AP2, CDK3, CDK4, CDK5, CDK5R1, CDK5R2, CDK5RAP1, CDK5RAP2, CDK5RAP3, CDK6, CDK7, CDK8, CDK9, CDKAL1, CDKL1, CDKL2, CDKL3, CDKL4, CDKL5, CDKN1A, CDKN1B, CDKN1C, CDKN2A, CDKN2A-AS1, CDKN2AIP, CDKN2AIPNL, CDKN2B, CDKN2B-AS1, CDKN2C, CDKN2D, CDKN3, CDNF, CDO1, CDON, CDPF1, CDR1, CDR2, CDR2L, CDRT1, CDRT15, CDRT15L2, CDRT15P1, CDRT15P2, CDRT4, CDRT7, CDRI8, CDS1, CDS2, CDSN, CDT1, CDV3, CDX1, CDX2, CDX4, CDYL, CDYL2, CEACAM1, CEACAM16, CEACAM18, CEACAM19, CEACAM20, CEACAM21, CEACAM22P, CEACAM3, CEACAM4, CEACAM5, CEACAM6, CEACAM7, CEACAM8, CEBPA-AS1, CEBPB, CEBPB-AS1, CEBPD, CEBPE, CEBPG, CEBPZ, CEBPZOS, CECR1, CECR2, CECR3, CECR5, CECR5-AS1, CECR6, CECR7, CEL, CELA1, CELA2A, CELA2B, CELA3A, CELA3B, CELF1, CELF2, CELF2-AS1, CELF2-AS2, CELF3, CELF4, CELF5, CELF6, CELP, CELSR1, CELSR2, CELSR3, CELSR3-AS1, CEMIP, CEMP1, CEND1, CENPA, CENPB, CENPBD1, CENPBD1P1, CENPC, CENPE, CENPF, CENPH, CENPI, CENRE, CENPK, CENPL, CENPM, CENPN, CENPO, CENPP, CENPQ, CENPT, CENPU, CENPV, CENPVP1, CENPVP2, CENPW, CEP104, CEP112, CEP120, CEP128, CEP131, CEP135, CEP152, CEP162, CEP164, CEP170, CEP170B, CEP170P1, CEP19, CEP192, CEP250, CEP290, CEP295, CEP350, CEP41, CEP44, CEP55, CEP57, CEP57L1, CEP63, CEP68, CEP70, CEP72, CEP76, CEP78, CEP83, CEP83-AS1, CEP85, CEP85L, CEP89, CEP95, CEP97, CEPT1, CER1, CERCAM, CERK, CERKL, CERS1, CERS1, CERS2, CERS3, CERS3-AS1, CERS4, CERS5, CERS6, CERS6-AS1, CES1, CES1P1, CES1P2, CES2, CES3, CES4A, CES5A, CES5AP1, CETN1, CETN2, CETN3, CETN4P, CETP, CFAP126, CFAP20, CFAP221, CFAP36, CFAP43, CFAP44, CFAP44-AS1, CFAP45, CFAP46, CFAP52, CFAP53, CFAP57, CFAP58, CFAP61, CFAP69, CFAP70, CFAP74, CFAP97, CFAP99, CFB, CFC1, CFC1B, CFD, CFDP1, CFH, CFHR1, CFHR2, CFHR3, CFHR4, CFHR5, CF1, CFL1, CFL1P1, CFL,2, CFLAR, CFLAR-AS1, CFP, CFTR, CGA, CGB, CGB1, CGB2, CGB5, CGB7, CGB8, CGGBP1, CGN, CGNL1, CGREF1, CGRRF1, CH25H, CHAC1, CHAC2, CHAD, CHADL, CHAF1A, CHAF1B, CHAMP1, CHAT, CHCHD1, CHCHD10, CHCHD2, CHCHD3, CHCHD4, CHCHD5, CHCHD6, CHCHD7, CHD1, CHD1L, CHD2, CHD3, CHD4, CHD5, CHD6, CHD7, CHD8, CHD9, CHDC2, CHDH, CHEK1, CHEK2, CHEK2P2, CHERP, CHFR, CHGA, CHGB, CHI3L1, CHI3L2, CHIA, CHIAP2, CHIC1, CHIC2, CHID1, CHIT1, CHKA, CHKB, CHKB-AS1, CHKB-CPT1B, CHL1, CHL1-AS1, CHM, CHML, CHMP1A, CHMP1B, CHMP1B2P, CHMP2A, CHMP2B, CHMP3, CHMP4A, CHMP4B, CHMP4C, CHMP5, CHMP6, CHMP7, CHN1, CHN2, CHODL, CHODL-AS1, CHORDC1, CHP1, CHP2, CHPF, CHPF2, CHPT1, CHRAC1, CHRD, CHRDL1, CHRDL2, CHRFAM7A, CHRM1, CHRM2, CHRM3, CHRM3-AS1, CHRM3-AS2, CHRM4, CHRM5, CHRNA1, CHRNA10, CHRNA2, CHRNA3, CHRNA4, CHRNA5, CHRNA6, CHRNA7, CHRNA9, CHRNB1, CHRNB2, CHRNB3, CHRNB4, CHRND, CHRNE, CHRNG, CHST1, CHST10, CHST11, CHST12, CHST13, CHST14, CHST15, CHST2, CHST3, CHST4, CHST5, CHST6, CHST7, CHST8, CHST9, CHSY1, CHSY3, CHTF18, CHTF8, CHTOP, CHUK, CHURC1, CHURC1-FNTB, CIAO1, CIAPIN1, CIART, CIB1, CIB2, CIB3, CIB4, CIC, CIDEA, CIDEB, CIDEC, CIDECP, CIITA, CILP, CILP2, CINP, CIPC, CIR1, CIRBP, CIRBP-AS1, CIRH1A, CISD1, CISD2, CISD3, CISH, CISTR, CIT, CITED1, CITED2, CITED4, CIZ1, CKAP2, CKAP2L, CKAP4, CKAP5, CKB, CKLF, CKLF-CMTM1, CKM, CKMT1A, CKMT1B, CKMT2, CKMT2-AS1, CKS1B, CKS2, CLASP1, CLASP2, CLASRP, CLC, CLCA1, CLCA2, CLCA3P, CLCA4, CLCC1, CLCF1, CLCN1, CLCN2, CLCN3, CLCN4, CLCN5, CLCN6, CLCN7, CLCNKA, CLCNKB, CLDN1, CLDN10, CLDN10-AS1, CLDN11, CLDN12, CLDN14, CLDN15, CLDN16, CLDN17, CLDN18, CLDN19, CLDN2, CLDN20, CLDN22, CLDN23, CLDN24, CLDN25, CLDN3, CLDN4, CLDN5, CLDN6, CLDN7, CLDN8, CLDN9, CLDND1, CLDND2, CLEC10A, CLEC11A, CLEC12A, CLEC12B, CLEC14A, CLEC16A, CLEC17A, CLEC18A, CLEC18B, CLEC18C, CLEC19A, CLEC1A, CLEC1B, CLEC2A, CLEC2B, CLEC2D, CLEC2L, CLEC3A, CLEC3B, CLEC4A, CLEC4C, CLEC4D, CLEC4E, CLEC4F, CLEC4G, CLEC4GP1, CLEC4M, CLEC5A, CLEC6A, CLEC7A, CLEC9A, CLECL1, CLGN, CLHC1, CLIC1, CLIC2, CLIC3, CLIC4, CLIC5, CLIC6, CLINT1, CLIP1, CLIP1-AS1, CLIP2, CLIP3, CLIP4, CLK1, CLK2, CLK2P, CLK3, CLK4, CLLU1, CLLU1OS, CLMN, CLMP, CLN3, CLN5, CLN6, CLN8, CLNK, CLNS1A, CLOCK, CLP1, CLPB, CLPP, CLPS, CLPSL1, CLPSL2, CLPTM1, CLPTM1L, CLPX, CLRN1, CLRN1-AS1, CLRN2, CLRN3, CLSPN, CLSTN1, CLSTN2, CLSTN2-AS1, CLSTN3, CLTA, CLTB, CLTC, CLTCL1, CLU, CLUAP1, CLUH, CLUHP3, CLUL1, CLVS1, CLVS2, CLYBL, CLYBL-AS1, CLYBL-AS2, CMA1, CMAHP, CMAS, CMBL, CMC1, CMC2, CMC4, CMIP, CMKLR1, CMPK1, CMPK2, CMSS1, CMTM1, CMTM2, CMTM3, CMTM4, CMTM5, CMTM6, CMTM7, CMTM8, CMTR1, CMTR2, CMYA5, CNBD1, CNBD2, CNBP, CNDP1, CNDP2, CNEP1R1, CNFN, CNGA1, CNGA2, CNGA3, CNGA4, CNGB1, CNGB3, CN1H1, CNIH2, CNIH3, CNIH4, CNKSR1, CNKSR2, CNKSR3, CNN1, CNN2, CNN3, CNNM1, CNNM2, CNNM3, CNNM4, CNOT1, CNOT10, CNOT11, CNOT2, CNOT3, CNOT4, CNOT6, CNOT6L, CNOT7, CNOT8, CNP, CNPPD1, CNPY1, CNPY2, CNPY3, CNPY4, CNR1, CNR2, CNRIP1, CNST, CNTD1, CNTD2, CNTF, CNTFR, CNTFR-AS1, CNTLN, CNTN1, CNTN2, CNTN3, CNTN4, CNTN4-AS1, CNTN4-AS2, CNTN5, CNTN6, CNTNAP1, CNTNAP2, CNTNAP3, CNTNAP3B, CNTNAP3P2, CNTNAP4, CNTNAP5, CNTRL, CNTROB, COA1, COA3, COA4, COA5, COA6, COA7, COASY, COBL, COBLL1, COCH, COGH1, COG2, COG3, COC4, COG5, COG6, COG7, COG8, COIL, COL10A1, COL11A1, COL11A2, COL12A1, COLI3A1, COL14A1, COL15A1, COL16A1, COL17A1, COL18A1, COL18A1-AS1, COL18A1-AS2, COL19A1, COL1A1, COL1A2, COL20A1, COL21A1, COL22A1, COL23A1, COL24A1, COL25A1, COL26A1, COL27A1, COL28A1, COL2A1, COL3A1, COL4A1, COL4A2, COL4A2-AS1, COL4A3, COL4A3BP, COL4A4, COL4A5, COL4A6, COL5A1, COL5A2, COL5A3, COL6A1, COL6A2, COL6A3, COL6A4P1, COL6A4P2, COL6A5, COL6A6, COL7A1, COL8A1, COL8A2, COL9A1, COL9A2, COL9A3, COLCA1, COLCA2, COLEC10, COLEC11, COLEC12, COLGALT1, COLGALT2, COLQ, COMMD1, CONIMD10, COMMD2, COMMD3, COMMD3-BMI1, COMMD4, COMMD5, COMMD6, COMMD7, COMMD8, COMMD9, COMP, COMT, COMTD1, COPA, COPB1, COPB2, COPE, COPG1, COPG2, COPG2IT1, COPRS, COPS2, COPS3, COPS4, COPS5, COPS6, COPS7A, COPS7B, COPS8, COPZ1, COPZ2, COQ10A, COQ10B, COQ2, COQ3, COQ4, COQ5, COQ6, COQ7, COQ9, CORIN, CORO1A, CORO1B, CORO1C, CORO2A, CORO2B, CORO6, CORO7, CORO7-PAM16, CORT, COTL1, COX10, COX10-AS1, COX11, COX14, COX15, COX16, COX17, COX18, COX19, COX20, COX4I1, COX412, COX5A, COX5B, COX6A1, COX6A2, COX6B1, COX6B2, COX6C, COX7A1, COX7A2, COX7A2L, COX7B, COX7B2, COX7C, COX8A, COX8C, CP, CPA1, CPA2, CPA3, CPA4, CPA5, CPA6, CPAMD8, CPB1, CPB2, CPB2-AS1, CPD, CPE, CPEB1, CPEB1-AS1, CPEB2, CPEB2-AS1, CPEB3, CPEB4, CPED1, CPLX1, CPLX2, CPLX3, CPLX4, CPM, CPN1, CPN2, CPNE1, CPNE2, CPNE3, CPNE4, CPNE5, CPNE6, CPNE7, CPNE8, CPNE9, CPO, CPDX, CPPED1, CPQ, CPS1, CPS1-IT1, CPSF1, CPSF2, CPSF3, CPSF3L, CPSF4, CPSF4L, CPSF6, CPSF7, CPT1A, CPT1B, CPT1C, CPT2, CPTP, CPVL, CPXCR1, CPXM1, CPXM2, CPZ, CR1, CR1L, CR2, CRABP1, CRABP2, CRACR2A, CRACR2B, CRADD, CRAMP1L, CRAT, CRB1, CRB2, CRB3, CRBN, CRCP, CRCT1, CREB1, CREB3, CREB3L1, CREB3L2, CREB3L3, CREB3L4, CREB5, CREBBP, CREBL2, CREBRF, CREBZF, CREG1, CREG2, CRELD1, CRELD2, CREM, CRH, CRHBP, CRHRI, CRHR1-IT1, CRHR2, CRIM1, CRIP1, CRIP2, CRIP3, CRIPAK, CREPT, CRISP1, CRISP2, CRISP3, CRISPLD1, CRISPLD2, CRK, CRKL, CRLF1, CRLF2, CRLF3, CRLS1, CRMP1, CRNDE, CRNKL1, CRNN, CROCC, CROCCP2, CROCCP3, CBOT, CRP, CRSP8P, CRTAC1, CRTAM, CRTAP, CRTC1, CRTC2, CRTC3, CRTC3-AS1, CRX, CRY1, CRY2, CRYAA, CRYAB, CRYBA1, CRYBA2, CRYBA4, CRYBB1, CRYBB2, CRYBB2P1, CRYBB3, CRYBG3, CRYGA, CRYGB, CPYGC, CRYGC, CRYGD, CRYGN, CRYGS, CRYL1, CRYM, CRYM-AS1, CRYZ, CRYZL1, CS, CSAD, CSAG1, CSAG3, CSAG4, CSDC2, CSDE1, CSE1L, CSEIL-AS1, CSF1, CSF2, CSF2RA, CSF2RB, CSF3, CSF3R, CSGALNACT1, CSGALNACT2, CSH1, CSH2, CSHL1, CSK, CSMD1, CSMD2, CSMD2-AS1, CSMD3, CSN1S1, CSN1S2AP, CSN1S2BP, CSN2, CSN3, CSNK1A1, CSNK1A1L, CSNK1A1P1, CSNK-1D, CSNK1E, CSNK1G1, CSNK1G2, CSNK1G2-AS1, CSNK1G3, CSNK2A1, CSNK2A2, CSNK2A3, CSNK2B, CSPG4, CSPG4P-B 1-L Y, CSPG5, CSPP1, CSRNP1, CSRNP2, CSRNP3, CSRP1, CSRP2, CSRP2BP, CSRP3, CST1, CST11, CST13P, CST2, CST3, CST4, CST5, CST6, CST7, CST8, CST9, CST9L, CSTA, CSTB, CSTF1, CSTF2, CSTF2T, CSTF3, CSTF3-AS1, CSTL1, CT45A1, CT45A10, CT45A2, CT45A3, CT45A4, CT45A5, CT45A6, CT45A7, CT45A8, CT45A9, CT47A1, CT47A10, CT47A11, CT47A12, CT47A2, CT47A3, CT47A4, CT47A5, CT47A6, CT47A7, CT47A8, CT47A9, CT47B1, CT55, CT62, CT83, CTAG1A, CTAG1B, CTAG2, CTAGE1, CTAGE10P, CTAGE11P, CTAGE15, CTAGE4, CTAGE5, CTAGE6, CTAGE7P, CTAGE8, CTAGE9, CTB-113P19.1, CTB-174D11.1, CTB-178M22.2, CTB-7E3.1, CTBP1, CTBP1-AS, CTBP1-AS2, CTBP2, CTBS, CTC1, CTC-338M12.4, CTC-436P18.1, CTCF, CTCFL, CTD-2151A2.1, CTD-2194D22.4, CTD-2201E9.1, CTD-2201I18.1, CTD-2270F17.1, CTD-2297D10.2, CTD-2350J17.1, CTD-3080P12.3, CTDNEP1, CTDP1, CTDSP1, CTDSP2, CTDSPL, CTDSPL2, CTF1, CTGF, CTGLF12P, CTH, CTHRC1, CTIF, CTLA4, CTNNA1, CTNNA2, CTNNA3, CTNNAL1, CTNNB1, CTNNBIP1, CTNNBL1, CTNND1, CTNND2, CTNS, CTPS1, CTPS2, CTR9, CTRB1, CTRB2, CTRC, CTRL, CTSA, CTSB, CTSC, CTSD, CTSE, CTSF, CTSG, CTSH, CTSK, CTSL, CTSL3P, CTSLP2, CTSLP8, CTSO, CTSS, CTSV, CTSW, CTSZ, CTTN, CTTNBP2, CTTNBP2NL, CTU1, CTU2, CTXN1, CTXN2, CTXN3, CUBN, CUEDC1, CUEDC2, CUL1, CUL2, CUL3, CUL4A, CUL4B, CUL5, CUL7, CUL9, CUTA, CUTC, CUX1, CUX2, CUZD1, CWC15, CWC22, CWC25, CWC27, CWF19L1, CWF19L2, CWH43, CX3CL1, CX3CR1, CXADR, CXADRP2, CXADRP3, CXCL1, CXCL10, CXCL11, CXCL12, CXCL13, CXCL14, CXCL16, CXCL17, CXCL2, CXCL3, CXCL5, CXCL6, CXCL8, CXCL9, CXCR1, CXCR2, CXCR2P1, CXCR3, CXCR4, CXCR5, CXCR6, CXorf21, CXorf22, CXorf23, CXorf30, CXorf36, CXorf38, CXorf40A, CXorf40B, CXorf49, CXorf49B, CXorf51A, CXorf51B, CXorf56, CXorf57, CXorf58, CXorf65, CXorf66, CXorf67, CXXC1, CXXC1P1, CXXC4, CXXC5, CYB561, CYB561A3, CYB561D1, CYB561D2, CYB5A, CYB5B, CYB5D I, CYB5D2, CYB5R1, CYB5R2, CYB5R3, CYB5R4, CYB5RL, CYBA, CYBB, CYBRD1, CYC1, CYCS, CYCSP52, CYFIP1, CYFIP2, CYGB, CYHR1, CYLC1, CYLC2, CYLD, CYMP, CYP11A1, CYP11B1, CYP11B2, CYP17A1, CYP19A1, CYP1A1, CYP1A2, CYP1B1, CYP1B1-AS1, CYP20A1, CYP21A1P, CYP21, A2, CYP24A1, CYP26A1, CYP26B1, CYP26C1, CYP27A1, CYP27B1, CYP27C1, CYP2A13, CYP2A6, CYP2A7, CYP2B6, CYP2B7P, CYP2C18, CYP2C19, CYP2C8, CYP2C9, CYP2D6, CYP2D7, CYP2E1, CYP2F1, CYP2G1P, CYP2J2, CYP2R1, CYP2S1, CYP2U1, CYP2W1, CYP39A1, CYP3A4, CYP3A43, CYP3A5, CYP3A7, CYP3A7-CYP3AP1, CYP46A1, CYP4A11, CYP4A22, CYP4B1, CYP4F11, CYP4F12, CYP4F2, CYP4F22, CYP4F24P, CYP4F29P, CYP4F3, CYP4F30P, CYP4F35P, CYP4F62P, CYP4F8, CYP4V2, CYP4X1, CYP4Z1, CYP4Z2P, CYP51A1, CYP51A1-AS1, CYP7A1, CYP7B1, CYP8B1, CYR61, CYS1, CYSLTR1, CYSLTR2, CYSRT1, CYSTM1, CYTH1, CYTH2, CYTH3, CYTH4, CYT1P, CYTIP, CYTL1, CYYR1, D21S2088E, D2HGDH, DAAM1, DAAM2, DAB1, DABI-AS1, DAB2, DAB2IP, DACH1, DACE2, DACT1, DACT2, DACT3, DACT3-AS1, DAD1, DAG1, DAGLA, DAGLB, DAK, DALRD3, DANCR, DAND5, DAO, DAOA, DAOA-AS1, DAP, DAP3, DAPK1, DAPK2, DAPK3, DAPL1, DAPP1, DARS, DARS2, DARS-AS1, DAW1, DAXX, DAZAN, DAZAP2, DAZL, DBET, DBF4, DBF4B, DBH, DBH-AS1, DBI, DBIL5P, DBIL5P2, DBN1, DBNDD1, DBNDD2, DBNL, DBP, DBR1, DBT, DBX1, DBX2, DCAF10, DCAF11, DCAF12, DCAF12L1, DCAF12L2, DCAF13, DCAF13P3, DCAF15, DCAF16, DCAF17, DCAF4, DCAF4L1, DCAF4L2, DCAF5, DCAF6, DCAF7, DCAF8, DCAF8L1, DCAF8L2, DCAKD, DCANP1, DCBLD1, DCBLD2, DCC, DCD, DCDC1, DCDC2, DCDC2B, DCDC2C, DCDC5, DCHS1, DCHS2, DCK, DCLK1, DCLK2, DCLK3, DCLRE1A, DCLRE1B, DCLRE1C, DCN, DCP1A, DCP1B, DCP2, DCPS, DCST1, DCST2, DCSTAMP, DCT, DCTD, DCTN1, DCTN1-AS1, DCTN2, DCTN3, DCTN4, DCTN5, DCTN6, DCTPP1, DCUN1D1, DCUN1D2, DCUN1D3, DCUN1D4, DCUN1D5, DCX, DCXR, DDA1, DDAH1, DDAH2, DDB1, DDB2, DDC, DDC-AS1, DDHD1, DDHD2, DDI1, DDI2, DDIAS, DDIT3, DDIT4, DDIT4L, DUN, DDO, DDOST, DDR1, DDR2, DDRGK1, DDT, DDTL, DDX1, DDX1, DDX10, DDX11, DDX11-AS 1, DDX11L1, DDX11L10, DDX11L16, DDX11L2, DDX11L5, DDX11L9, DDX12P, DDX17, DDX18, DDX19A, DDX19B, DDX20, DDX21, DDX23, DDX24, DDX25, DDX26B, DDX26B-AS1, DDX27, DDX28, DDX31, DDX39A, DDX39B, DDX3X, DDX4, DDX41, DDX42, DDX43, DDX46, DDX47, DUX49, DUX5, DDX50, DDX51 , DDX52, DDX53, DDX54, DDX55, DDX56, DDX58, DDX59, DDX6, DDX60, DDX60, DEAF1, DEAR, DEC1, DECR1, DECR2, DEDD, DEDD2, DEF6, DEF8, DEFA1, DEFA10P, DEFA11P, DEFA1B, DEFA3, DEFA4, DEFA5, DEFA6, DEFA8P, DEFA9P, DEFB1, DEFB103A, DEFB103B, DEFB104A, DEFB104B, DEFB105A, DEFB105B, DEFB106A, DEFB106B, DEFB107A, DEFB107B, DEFB108B, DEFB109P1, DEFB109P1B, DEFB110, DEFB112, DEFB113, DEFB114, DEFB115, DEFB116, DEFB118, DEFB119, DEFB121, DEFB122, DEFB123, DEFB124, DEFB125, DEFB126, DEFB127, DEFB128, DEFB129, DEFB130, DEFB131, DEFB132, DEFB133, DEFB134, DEFB135, DEFB136, DEFB4A, DEFB4B, DEFT1P, DEFT1P2, DEGS1, DEGS2, DEK, DENND1A, DENND1B, DENND1C, DENND2A, DENND2C, DENND2D, DENND3, DENND4A, DENND4B, DENND4C, DENND5A, DENND5B, DENND5B-AS1, DENND6A, DENND6B, DENR, DEPDC1, DEPDC1-AS1, DEPDC1B, DEPDC4, DEPDC5, DEPDC7, DEPTOR, DERA, DERL1, DERL2, DERL3, DES, DESI1, DESI2, DET1, DEX1, DFFA, DFFB, DFNA5, DFNB31, DFNB59, DGAT1, DGAT2, DGAT2L6, DGCR10, DGCR11, DGCR14, DGCR2, DGCR5, DGCR6, DGCR6L, DGCR8, DGCR9, DGKA, DGKB, DGKD, DGKE, DGKG, DGKH, DGKI, DGKK, DGKQ, DGKZ, DGUOK, DGUOK-AS1, DHCR24, DHCR7, DHDDS, DHDH, DHFR, DHFRL1, DHH, DHODH, DHPS, DHRS1, DHRS11, DHRS12, DHRS13, DHRS2, DHRS3, DHRS4, DHRS4-AS1, DHRS4L1, DHRS4L2, DHRS7, DHRS7B, DHRS7C, DHRS9, DHRSX, DHTKD1, DHX15, DHX16, DHX29, DHX30, DHX32, DHX33, DHX34, DHX35, DHX36, DHX37, DHX38, DHX40, DHX57, DHX58, DHX8, DHX9, DIABLO, DIAPHI, DIAPH2, DIAPH2-AS1, DIAPH3, DIAPH3-AS1, DIAPH3-AS2, DICER1, DICER1-AS1, DIDO1, DIEXF, DIMT1, DIO1, DIO2, DIO2-AS1, DIO3, DIO3OS, DIP2A, DIP2A-IT1, DIP2B, DIP2C, DIRAS1, DIRAS2, DIRAS3, DIRC1, DIRC2, DIRC3, DIS3, DIS3L, DISC1, DISC1FP1, DISC1-IT1, DISC2, DISP1, DISP2, DIXDC1, DKC1, DKFZP434A062, DKFZP434H168, DKFZP434I0714, DKFZp434J0226, DKFZP434K028, DKFZP434L187, DKFZP434L192, DKFZp451B082, DKFZP586I1420, DKFZp686K1684, DKFZp779M0652, DKK1, DKK2, DKK3, DKK4, DKKL1, DLAT, DLC1, DLD, DLEC1, DLEU1, DLEU1-AS1, DLEU2, DLEU2L, DLEU7, DLEU7-AS1, DLG1, DLG1-AS1, DLG2, DLG3, DLG3-AS1, DLG4, DLG5, DLG5-AS1, DLGAP1, DLGAP1-AS1, DLGAP1-AS2, DLGAP1-AS3, DLGAP1-AS4, DLGAP1-AS5, DLGAP2, DLGAP2-AS1, DLGAP3, DLGAP4, DLGAP4-AS1, DLGAP5, DLK1, DLK2, DLL1, DLL3, DLL4, DLST, DLX1, DLX2, DLX2-AS1, DLX3, DLX4, DLX5, DLX6, DLX6-AS1, DMAP1, DMBT1, DMBT1T1P1, DMBX1, DMC1, DMD, DMGDH, DMKN, DMP1, DMPK, DMRT1, DMRT2, DMRT3, DMRTA1, DMRTA2, DMRTB1, DMRTC1, DMRTC1B, DMRTC2, DMTF1, DMTN, DMWD, DMXL1, DMXL2, DNA2, DNAAF1, DNAAF2, DNAAF3, DNAAF5, DNAH1, DNAH10, DNAH11, DNAH12, DNAH14, DNAH17, DNAH17-AS1, DNAH2, DNAH3, DNAH5, DNAH6, DNAH7, DNAH8, DNAH9, DNAI1, DNAI2, DNAJA1, DNAJA1 P5, DNAJA2, DNAJA3, DNAJA4, DNAJB1, DNAJB11, DNAJB12, DNAJB13, DNAJ14, DNAJB2, DNAJB3, DNAJB4, DNAJB5, DNAJB5-AS1, DNAJB6, DNAJB7, DNAJB8, DNAJB8-AS1, DNAJB9, DNAJC1, DNAJC10, DNAJC11, DNAJC12, DNAJC13, DNAJC14, DNAJC15, DNAJC16, DNAJC17, DNAJC18, DNAJC19, DNAJC2, DNAJC21, DNAJC22, DNAJC24, DNAJC25, DNAJC25-GNG10, DNAJC27, DNAJC27-AS1, DNAJC28, DNAJC3, DNAJC30, DNAJC4, DNAJC5, DNAJC5B, DNAJC5G, DNAJC6, DNAJC7, DNAJC8, DNAJC9, DNAJC9-.AS1, DNAL1, DNAL4, DNAL1, DNASE1, DNASEIL1, DNASEIL2, DNASEIL3, DNASE2, DNASE2B, DND1, DNER, DNHD1, DNLZ, DNM1, DNM1L, DNM1P35, DNM1P41, DNM1P46, DINM2, DNM3, DNM3OS, DNMBP, DNMBP-AS1, DNMT1, DNMT3A, DNMT3B, DNMT3L, DNPEP, DNPH1, DNTT, DNTTIP1, DNTTIP2, DOC2A, DOC2B, DOC2GP, DOCK1, DOCK10, DOCK11, DOCK2, DOCK3, DOCK4, DOCK4-AS1, DOCK5, DOCK6, DOCK7, DOCK8, DOCK9, DOCK9-AS1, DOCK9-AS2, DOHH, DOK1, DOK2, DOK3, DOK4, DOK5, DOK6, DOK7, DOLK, DOLPP1, DONSON, DOPEY1, DOPEY2, DOT1L, DPAGT1, DPCD, DPCR1, DPEP1, DPEP2, DPEP3, DPF1, DPF2, DPF3, DPH1, DPH2, DPH3, DPH3P1, DPH5, DPH6, DPH6-AS1, DPH7, DPM1, DPM2, DPM3, DPP10, DPP10-AS1, DPP3, DPP4, DPP6, DPP7, DPP8, DPP9, DPP9-AS1, DPPA2, DPPA2P3, DPPA3, DPPA4, DPPA5, DPRX, DPRXP4, DPT, DPY19L1, DPY19L1P1, DPY19L2, DPY19L2P1, DPY19L2P2, DPY19L2P3, DPY19L2P4, DPY19L3, DPY19L4, DPY30, DPYD, DPYD-AS1, DPYD-AS2, DPYS, DPYSL2, DPYSL3, DPYSL4, DPYSL5, DQX1, DR1, DRAM1, DRAM2, DRAP1, DRAXIN, DRC1, DRC7, DRD1, DRD2, DRD3, DRD4, DRD5, DRD5P2, DRG1, DRG2, DRGX, DRICH1, DROSHA, DRP2, DSC1, DSC2, DSC3, DSCAM, DSCAM-AS1, DSCAM-IT1, DSCAML1, DSCAS, DSCC1, DSCR10, DSCR3, DSCR4, DSCR8, DSCR9, DSE, DSEL, DSG1, DSG1-AS1, DSG2, DSG2-AS1, DSG3, DSG4, DSN1, DSP, DSPP, DST, DSTN, DSTNP2, DSTYK, DTD1, DTD2, DTHD1, DTL, DTNA, DTNB, DTNBP1, DTWD1, DTWD2, DTX1, DTX2, DTX2P1-UPK3BP1-PMS2P11, DTX3, DTX3L, DTX4, DTYMK, DUOX1, DUOX2, DUOXA1, DUOXA2, DUPD1, DUS1L, DUS2, DUS3L, DUS4L, DUSP1, DUSP10, DUSP11, DUSP12, DUSP13, DUSP14, DUSP15, DUSP16, DUSP18, DUSP19, DUSP2, DUSP21, DUSP22, DUSP23, DUSP26, DUSP27, DUSP28, DUSP3, DUSP4, DUSP5, DUSP5P1, DUSP6, DUSP7, DUSP8, DUSP9, DUT, DUX4, DUXA, DUXAP10, DUXAP8, DVL1, DVL2, DVL3, DXO, DYDC1, DYDC2, DYM, DYNAP, DYNC1H1, DYNCH1, DYNCH2, DYNC1LI1, DYNC1LI2, DYNC2H1, DYNC2LH, DYNLL1, DYNLL1-AS1, DYNLL2, DYNLRB1, DYNLRB2, DYNLT1, DYNLT3, DYRK1A, DYRK1B, DYRK2, DYRK3, DYRK4, DYSF, DYTN, DYX1C1, DYX1C1-CCPG1, DZANK1, DZIP1, DZIP1L, DZIP3, E2F1, E2F2, E2F3, E2F4, E2F5, E2F6, E2F7, E2F8, E4F1, EAF1, EAF2, EAPP, EARS2, EBAG-9, ERF1, EBF2, EBF3, EBF4, EBI3, EBLN1, EBLN2, EBLN3, EBNA1BP2, EBP, EBPL, ECD, ECE1, ECE2, ECEL1, ECEL1P2, ECH1, ECHDC1, ECHDC2, ECHDC3, ECHS1, ECI1, ECI2, ECM1, ECM2, ECRP, ECSCR, ECSIT, ECT2, ECT2L, EDA, EDA2R, EDAR, EDARADD, EDC3, EDC4, EDDM3A, EDDM3B, EDEM1, EDEM2, EDEM3, EDF1, EDF3, EDN1, EDN2, EDN3, EDNRA, EDNRB, EDNRB-AS1, EDRIF1, EDRF1-AS1, EEA1, EED, EEF1A1, EEF1A2, EEF1B2, EEF1D, EEF1DP3, EEF1E1, EEF1E1-BLOC1S5, EEF1G, EEF2, EEF2K, EEF2KMT, EEFSEC, EEPD1, EFCAB1, EFCAB10, EFCAB11, EFCAB12, EFCAB13, EFCAB14, EFCAB14-AS1, EFCAB2, EFCAB3, EFCAB5, EFCAB6, EFCAB6-AS1, EFCAB7, EFCAB9, EFCC1, EFEMP1, EFEMP2, EFHB, EFHC1, EFHC2, EFHD1, EFHD2, EFNA1, EFNA2, EFNA3, EFNA4, EFNA5, EFNB1, EFNB2, EFNB3, EFR3A, EFR3B, EFS, EFTUD1, EFTUD1P1, EFTUD2, EGF, EGFEM1P, EGFL6, EGFL7, EGFL8, EGFLAM, EGFLAM-AS2, EGFLAM-AS4, EGFR, EGFR-AS1, EGLN1, EGLN2, EGLN3, EGOT, EGR1, EGR2, EGR3, EGR4, EHBP1, EHBP1L1, EHD1, EHD2, EHD3, EHD4, EHD4-AS1, EHF, EHHADH, EHHADH-AS1, EHMT1, EHMT1-IT1, EHMT2, EI24, EID1, EID2, EID2B, EID3, EIF1, EIF1AD, EIF1AX, EIF1AX-AS1, EIF1B, EIF1B-AS1, EIF2A, EIF2AK1, EIF2AK2, EIF2AK3, EIF2AK4, EIF2B1, EIF2B2, EIF2B3, EIF2B4, EIF2B5, EIF2D, EIF2S1, EIF2S2, EIF2S3, EIF3A, EIF3B, EIF3C, EIF3CL, EIF3D, EIF3E, EIF3F, EIF3G, EIF3H, EIF3I, EIF3IP1, EIF3J, EIF3J-AS1, EIF3K, EIF3L, EIF3M, EIF4A1, EIF4A2, EIF4A3, EIF4B, EIF4E, EIF4E1B, EIF4E2, EIF4E3, EIF4EBP1, EIF4EBP2, EIF4EBP3, EIF4ENIF1, EIF4G1, EIF4G2, EIF4G3, EIF4H, EIF5, EIF5A, EIF5A2, EIF5AL1, EIF5B, EIF6, ELAC1, ELAC2, ELANE, ELAVL1, ELAVL2, ELAVL3, ELAVL4, ELDR, ELF1, ELF2, ELF3, ELF4, ELF5, ELFN1, ELFN1-AS1, ELFN2, ELK1, ELK2AP, ELK3, ELK4, ELL, ELL2, ELL3, ELMO1, ELMO1-AS1, ELMO2, ELMO3, ELMOD1, ELMOD2, ELMOD3, ELMSAN1, ELN, ELOF1, ELOVL1, ELOVL2, ELOVL2-AS1, ELVL3, ELOVL4, ELOVL5, ELOVL6, ELOVL7, ELP2, ELP3, ELP4, ELP5, ELP6, ELSPBP1, ELTD1, EMB, EMBP1, EMC1, EMC10, EMC2, EMC3, EMC3-AS1, EMC4, EMC6, EMC7, EMC8, EMC9, EMCN, EMD, EME1, EME2, EMG1, EMID1, EMILIN1, EMILIN2, EMILIN3, EML1, EML2, EML3, EML4, EML5, EML6, EMP1, EMP2, EMP3, EMR1, EMR2, EMR3, EMR4P, EMX1, EMX2, EMX2OS, EN1, EN2, ENAH, ENAM, ENC1, ENDOD1, ENDOG, ENDOU, ENDOV, ENG, ENGASE, ENHO, ENKD1, ENKUR, ENO1, ENO1-AS1, ENO2, ENO3, ENO4, ENOPH1, ENOSF1, ENOX1, ENOX1-AS2, ENOX2, ENPEP, ENPP1, ENPP2, ENPP3, ENPP4, ENPP5, ENPP6, ENPP7, ENSA, ENTD1, ENTHD2, ENTPD1, ENTPD1-AS1, ENTPD2, ENTPD3, ENTPD3-AS1, ENTPD4, ENTPD5, ENTPD6, ENTPD7, ENTPD8, ENY2, EOGT, EOMES, EP300, EP300-AS1, EP400, EP400NL, EPAS1, EPB41, EPB41L1, EPB41L2, EPB41L3, EPB41L4A, EPB41L4A-AS1, EPB41L4A-AS2, EPB41L4B, EPB41L5, EPB42, EPC1, EPC2, EPCAM, EPDR1, EPG5, EPGN, EPHA1, EPHA10, EPHA1-AS1, EPHA2, EPHA3, EPHA4, EPHA5, EPHA5-AS1, EPHA6, EPHA7, EPHA8, EPHB1, EPHB2, EPHB3, EPHB4, EPHB6, EPHX1, EPHX2, EPHX3, EPHX4, EPM2A, EPM2AIP1, EPN1, EPN2, EPN2-AS1, EPN2-IT1, EPN3, EPO, EPOR, EPPIN, EPPIN-WFDC6, EPPK1, EPRS, EPS15, EPS15L1, EPS8, EPS8L1, EPS8L2, EPS8L3, EPSTI1, EPT1, EPX, EPYC, EQTN, ERAL1, ERAP1, ERAP2, ERAS, ERBB2, ERBB2IP, ERBB3, ERBB4, ERC1, ERC2, ERC2-IT1, ERCC1, ERCC2, ERCC3, ERCC4, ERCC5, ERCC6, ERCC6L, ERCC6L2, ERCC6-PGBD3, ERCC8, EREG, ERF, ERG, ERGIC1, ERGIC2, ERGIC3, ERH, ERI1, ERI2, ERD, ERI3, ER13-IT1, ERICH1, ERICH1-AS1, ERICH2, ERICH3, ERICH3-AS1, ERICH4, ERICH5, ERICH6, ERICH6-AS1, ERICH6B, ERLEC1, ERLIN1, ERLIN2, ERMAP, ERMARD, ERMN, ERMP1, ERN1, ERN2, ERO1L, ERO1LB, ERP27, ERP29, ERP44, ERRFI1, ERV3-1, ERVFRD-1, ERVK13-1, ERVMER34-1, ERVV-1, ERVV-2, ERVW-1, ESAM, ESCO1, ESCO2, ESD, ESF1, ESM1, ESPL1, ESPN, ESPNL, ESPNP, ESR1, ESR2, ESRG, ESRP1, ESRP2, ESRRA, ESRRB, ESRRG, ESX1, ESYT1, ESYT2, ESYT3, ETAA1, ETF1, ETFA, ETFB, ETFDH, ETHE1, ETNK1, ETNK2, ETNPPL, ETS1, ETS2, ETV1, ETV2, ETV3, ETV3L, ETV4, ETV5, ETV6, ETV7, EVA1A, EVA1B, EVA1C, EVC, EVC2, EVI2A, EVI2B, EVI5, EVI5, EVL, EVPL, EVPLL, EVX1, EVX1-AS, EVX2, EWSAT1, EWSR1, EXD1, EXD2, EXD3, EXO1, EXO5, EXOC1, EXOC2, EXOC3, EXOC3-AS1, EXOC3L1, EXOC3L2, EXOC3L4, EXOC4, EXOC5, EXOC6, EXOC6B, EXOC7, EXOC8, EXOG, EXOSC1, EXOSC10, EXOSC2, EXOSC3, EXOSC4, EXOSC5, EXOSC6, EXOSC7, EXOSC8, EXOSC9, EXPH5, EXT1, EXT2, EXTL1, EXTL2, EXTL3, EXTL3-AS1, EYA1, EYA2, EYA3, EYA4, EYS, EZH1, EZH2, EZR, EZR-AS1, F10, F10-AS1, F11, F11-AS1, F11R, F12, F13A1, F13B, F2, F2R, F2RL1, F2RL2, F2RL3, F3, F5, F7, F8, F8A1, F8A2, F8A3, F9, FA2H, FAAH, FAAH2, FAAHP1, FABP1, FABP12, FABP2, FABP3, FABP4, FABP5, FABP5P3, FABP6, FABP7, FABP9, FADD, FADS1, FADS2, FADS3, FADS6, FAF1, FAF2, FAH, FAHD1, FAHD2A, FAHD2B, FAHD2CP, FAIM, FAIM2, FAIM3, FALEC, FAM101A, FAM101B, FAM102A, FAM102B, FAM103A1, FAM104A, FAM104B, FAM105A, FAM106A, FAM106B, FAM106CP, FAM107A, FAM107B, FAM109A, FAM109B, FAM110A, FAM110B, FAM110C, FAM110D, FAM111A, FAM111B, FAM114A1, FAM114A2, FAM115A, FAM115C, FAM115D, FAM117A, FAM117B, FAM118A, FAM118B, FAM120A, FAM120AOS, FAM120B, FAM120C, FAM122A, FAM122B, FAM122C, FAM124A, FAM124B, FAM126A, FAM126B, FAM127A, FAM127B, FAM127C, FAM129A, FAM129B, FAM129C, FAM131A, FAM131B, FAM131C, FAM132A, FAM132B, FAM133A, FAM133B, FAM133CP, FAM133DP, FAM134A, FAM134B, FAM134C, FAM135A, FAM135B, FAM136A, FAM138A, FAM138B, FAM138C, FAM138D, FAM138E, FAM138F, FAM13A, FAM13A-AS1, FAM13B, FAM13C, FAM149A, FAM149B1, FAM150A, FAM150B, FAM151A, FAM151B, FAM153A, FAM153B, FAM153C, FAM154A, FAM154B, FAM155A, FAM155A-LT1, FAM155B, FAM156A, FAM156B, FAM157A, FAM157B, FAM157C, FAM159A, FAM159B, FAM160A1, FAM160A2, FAM160B1, FAM160B2, FAM161A, FAM161B, FAM162A, FAM162B, FAM163A, FAM163B, FAM166A, FAM166B, FAM167A, FAM167A-AS1, FAM167B, FAM168A, FAM168B, FAM169A, FAM169B, FAM170A, FAM170B, FAM170B-AS1, FAM171A1, FAM171A2, FAM171B, FAM172A, FAM172BP, FAM173A, FAM173B, FAM174A, FAM174B, FAM175A, FAM175B, FAM177A1, FAM177B, FAM178A, FAM178B, FAM179A, FAM179B, FAM180A, FAM180B, FAM181A, FAM181A-AS1, FAM181B, FAM182A, FAM182B, FAM183A, FAM183B, FAM183CP, FAM184A, FAM184B, FAM185A, FAM186A, FAM186B, FAM187B, FAM188A, FAM188B, FAM189A1, FAM189A2, FAM189B, FAM192A, FAM193A, FAM193B, FAM195A, FAM195B, FAM196A, FAM196B, FAM197Y2, FAM197Y5, FAM198A, FAM198B, FAM199X, FAM19A1, FAM19A2, FAM19A3, FAM19A4, FAM19A5, FAM200A, FAM200B, FAM201A, FAM204A, FAM205A, FAM205BP, FAM206A, FAM207A, FAM208A, FAM208B, FAM209A, FAM209B, FAM20A, FAM20B, FAM20C, FAM210A, FAM210B, FAM212A, FAM212B, FAM212B-AS1, FAM213A, FAM213B, FAM214A, FAM214B, FAM215A, FAM216A, FAM216B, FAM217A, FAM217B, FAM218A, FAM219A, FAM219B, FAM21A, FAM21C, FAM21EP, FAM220A, FAM221A, FAM221B, FAM222A, FAM222A-AS1, FAM222B, FAM223A, FAM223B, FAM224A, FAM224B, FAM225A, FAM225B, FAM226A, FAM226B, FAM227A, FAM227B, FAM228A, FAM228B, FAM229A, FAM229B, FAM230B, FAM230C, FAM231A, FAM231D, FAM24A, FAM24B, FAM24B-CUZD1, FAM25A, FAM25BP, FAM25C, FAM25G, FAM26D, FAM26E, FAM26F, FMA27B, FAM27C, FAM27E2, FAM27E3, FAM27L, FAM32A, FAM35A, FAM35BP, FAM35DP, FAM3A, FAM3B, FAM3C, FAM3D, FAM41AY1, FAM41AY2, FAM41C, FAM43A, FAM43B, FAM45A, FAM45B , FAM46A, FAM46B, FAM46C, FAM46D, FAM47A, FAM47B, FAM47C, FAM47E, FAM47E-STBD1, FAM49A, FAM49B, FAM50A, FAM50B, FAM53A, FAM53B, FAM53B-AS1, FAM53C, FAM57A, FAM57B, FAM58A, FAM60A, FAM63A, FAM63B, FAM64A, FAM65A, FAM65B, FAM65C, FAM66A, FAM66B, FAM66C, FAM66D, FAM66E, FAM69A, FAM69B, FAM69C, FAM71A, FAM71B, FAM71C, FAM71D, FAM71E1, FAM71E71E2, FAM71F1, FAM71F2, FAM72A, FAM72B, FAM72C, FAM72D, FAM73A, FAM73B, FAM74A1, FAM74A3, FAM74A4, FAM74A6, FAM74A7, FAM76A, FAM76B, FAM78A, FAM78B, FAM81A, FAM81B, FAM83A, FAM83A-AS1, FAM83B, FAM83C, FAM83C-AS1, FAM83D, FAM83E, FAM83F, FAM83G, FAM83H, FAM83H-AS1, FAM84A, FAM84B, FAM86B1, FAM86B2, FAM86B3P, FAM86C1, FAM86C2P, FAM86DP, FAM86EP, FAM86FP, FAM86HP, FAM86JP, FAM87A, FAM87B, FAM89A, FAM89B, FAM8A1, FAM90A1, FAM90A10P, FAM90A25P, FAM90A27P, FAM90A2P, FAM90A7P, FAM91A1, FAM92A1, FAM92A1P2, FAM92B, FAM95A, FAM95B1, FAM95C, FAM96A, FAM96B, FAM98A, FAM98B, FAM98C, FAM99A, FAM99B, FAM9A, FAM9B, FAM9C, FAN1, FANCA, FANCB, FANCC, FANCD2, FANCD2OS, FANCE, FANCF, FANCG, FANCI, FANCL, FANCM, FANK1, FANK1-AS1, FAP, FAR1, FAR2, FAR2P1, FAR2P2, FARP1, FARP2, FARS2, FARSA, FARSB, FAS, FAS-AS1, FASLG, FASN, FASTK, FASTKD1, FASTKD2, FASTKD3, FASTKD5, FAT1, FAT2, FAT3, FAT4, FATE1, FAU, FAXC, FAXDC2, FBF1, FBL, FBLIM1, FBLL1, FBLN1, FBLN2, FBLN5, FBLN7, FBN1, FBN2, FBN3, FBP1, FBP2, FBRS, FBRSL1, FBXL12, FBXL13, FBXL14, FBXL15, FBXL16, FBXL17, FBXL18, FBXL19, FBXL19-AS1, FBXL2, FBXL20, FBXL21, FBXL22, FBXL3, FBXL4, FBXL5, FBXL6, FRXT7, FBXL8, FBXO10, FBXO11, FBXO15, FBXO16, FBXO17, FBXO18, FBXO2, FBXO21, FBXO22, FBXO22-AS1, FBXO24, FBXO25, FBXO27, FBXO28, FBXO3, FBXO30, FBXO31, FBXO32, FBXO33, FBXO34, FBXO36, FBXO38, FBXO39, FBXO3-AS1, FBXO4, FBXO40, FBXO41, FBXO42, FBXO43, FRXO44, FRXO45, FBXO46, FBXO47, FBXO48, FBXO5, FBXO6, FBXO7, FBXO8, FBXO9, FBXW10, FBXW11, FBXW12, FBXW2, FRXW4, FBXW4P1, FBXW5, FBXW7, FBXW8, FBXW9, FCAMR, FCAR, FCER1A, FCER1G, FCER2, FCF1, FCGBP, FCGRIA, FCGR1B, FCGR1C, FCGR2A, FCGR2B, FCGR2C, FCGR3A, FCGR3B, FCGRT, FCHO1, FCHO2, FCHSD1, FCHSD2, FCN1, FCN2, FCN3, FCRL1, FCRL2, FCRL3, FCRL4, FCRL5, FCRL6, FCRLA, FCRLB, FDCSP, FDFT1, FDPS, FDPSP2, FDX1, FDX1L, FDXACB1, FDXR, FECH, FEM1A, FEM1B, FEM1C, FEN1, FENDRR, FER, FER1L4, FER1L5, FER1L6, FER1L6-AS1, FER1L6-AS2, FERD3L, FERMT1, FERMT2, FERMT3, FES, FETUB, FEV, FEZ1, FEZ2, FEZF1, FEZF1-AS1, FEZF2, FFAR1, FFAR2, FFAR3, FFAR4, FGA, FGB, FGD1, FGD2, FGD3, FGD4, FGD5, FGD5-AS1, FGD5P1, FGD6, FGF1, FGF10, FGF10-AS1, FGF11, FGF12, FGF12-AS1, FGF13, FGF13-AS1, FGF14, FGF14-AS1, FGF14-AS2, FGF14-IT1, FRF16, FGF17, FGF18, FGF19, FGF2, FGF20, FGF21, FGF22, FGF23, FGF3, FGF4, FGF5, FGF6, FGF7, FGF8, FGF9, FGFBP1, FGFBP2, FGFBP3, FGFR1, FGFR1OP, FGFR1OP2, FGFR2, FGFR3, FGFR4, FGFRL1, FGG, FGGY, FGL1, FGL2, FGR, FH, FHAD1, FHDC1, FH1T, FHL1, FHL2, FHL3, FHL5, FHOD1, FHOD3, FIBCD1, FIBIN, FIBP, FICD, FIG4, FIGF, FIGLA, FIGN, FIGNL1, FIGNL2, FILIP1, FILIP1L, FIP1L1, FIRRE, FIS1, FITM1, FITM2, FIZ1, FJX1, FKBP10, FKBP11, FKBP14, FKBP15, FKBP1A, FKBP1AP1, FKBP1A-SDCBP2, FKBP1B, FKBP2, FKBP3, FKBP4, FKBP5, FKBP6, FKBP7, FKBP8, FKBP9, FKBP9P1, FKBPL, FKRP, FKSG29, FKTN, FLAD1, FLCN, FLG, FLG2, FLG-AS1, FLI1, FLII, FLJ10038, FLJ12825, FLJ13224, FLJ16171, FLJ16779, FLJ20021, FLJ21408, FLJ22447, FLJ22763, FLJ23867, FLJ25758, FLJ26245, FLJ26850, FLJ27354, FLJ30679, FLJ31104, FLJ31356, FLJ31662, FLJ32255, FLJ33360, FLJ33534, FLJ33581, FLJ34503, FLJ35934, FLJ36000, FLJ36777, FLJ37035, FLJ37201, FLJ37453, FLJ37505, FLJ38122, FLJ38576, FLJ39080, FLJ40194, FLJ40288, FLJ41200, FLJ41278, FLJ41941, FLJ42102, FLJ42351, FLJ42393, FLJ42627, FLJ42969, FLJ43315, FLJ43681, FLJ43879, FLJ44511, FLJ44635, FLJ45079, FLJ45513, FLJ46066, FLJ46284, FLJ46906, FLNA, FLNB, FLNC, FLOT1, FLOT2, FLRT1, FLRT2, FLRT3, FLT1, FLT3, FLT3LG, FLT4, FLVCR1, FLVCR1-AS1, FLVCR2, FLYWCH1, FLYWCH2, FMN1, FMN2, FMNL1, FMNL2, FMNL3, FMO1, FMO2, FMO3, FMO4, FMO5, FMO6P, FMO9P, FMOD, FMR1, FMR1-AS1, FMR1NB, FN1, FN3K, FN3KRP, FNBP1, FNBP1L, FNBP4, FINDC1, FNDC3A, FNDC3B, FNDC4, ENDC5, FNDC7, FNDC8, FNDC9, FNIP1, FNIP2, FNTA, FNTB, FOCAD, FOCAD-AS1, FOLH1, FOLH1B, FOLR1, FOLR2, FOLR3, FOPNL, FOS, FOSB, FOSL1, FOSL2, FOXA1, FOXA2, FOXA3, FOXB1, FOXB2, FOXC1, FOXC2, FOXC2-AS1, FOXCUT, FOXD1, FOXD2, FOXD2-AS1, FOXD3, FOXD3-AS1, FOXD4, FOXD4L1, FOXD4L3, FOXD4L4, FOXD4L5, FOXD4L6, FOXE1, FOXE3, FOXF1, FOXF2, FOXG1, FOXG1-AS1, FOHI1, FOXI1, FOXI2, FOXI3, FOXJ1, FOXJ2, FOXJ3, FOXK1, FOXK2, FOXL1, FOXL2, FOXL2NB, FOXM1, FOXN1, FOXN2, FOXN3, FOXN3-AS1, FOXN3-AS2, FOXN4, FOXO1, FOXO3, FOXO3B, FOXO4, FOXO6, FOXP1, FOXP1-AS1, FOXP2, FOXP3, FOXP4, FOXP4-AS1, FOXQ1, FOXR1, FOXR2, FOXRED1, FOXRED2, FOXS1, FPGS, FPGT, FPGT-TNNI3K, FPR1, FPR2, FPR3, FRA10AC1, FRAS1, FRAT1, FRAT2, FREM1, FREM2, FREM3, FRG1, FRG1B, FRG2, FRG2B, FRG2C, FRG2DP, FRG2EP, FRK, FRMD1, FRMD3, FRMD4A, FRMD4B, FRMD5, FRMD6, FRMD6-AS1, FRMD6-AS2, FRMD7, FRMD8, FRMD8P1, FRMPD1, FRMPD2, FRMPD2B, FRMPD3, FRMPD3-AS1, FRMPD4, FRRS1, FRRS1L, FRS2, FRS3, FRY, FRY-AS1, FRYL, FRZB, FSBP, FSCB, FSCN1, FSCN2, FSCN3, FSD1, FSD1L, FSD2, FSHB, FSHR, FSIP1, FSIP2, FST, FSTL1, FSTL3, FSTL4, FSTL5, FTCD, FTCDNL1, FTH1, FTH1P18, FTH1P3, FTHL17, FTL, FTLP10, FTMT, FTO, FTO-IT1, FTSJ1, FTSJ2, FTSJ3, FTX, FUBP1, FUBP3, FUCA1, FUCA2, FUK, FUNDC1, FUNDC2, FUNDC2P2, FUOM, FURIN, FUS, FUT1, FUT10, FUT11, FUT2, FUT3, FUT4, FUT5, FUT6, FUT7, FUT8, FUT8-AS1, FUT9, FUZ, FXN, FXR1, FXR2, FXYD1, FXYD2, FXYD3, FXYD4, FXYD5, FXYD6, FXYD6-FXYD2, FXYD7, FYB, FYCO1, FYN, FYTTD1, FZD1, FZD10, FZD10-AS1, FZD2, FZD3, FZD4, FZD5, FZD6, FZD7, FZD8, FZD9, FZR1, G0S2, G2E3, G3BP1, G3BP2, G6PC, G6PC2, G6PC3, G6PD, GAA, GAB1, GAB2, GAB3, GAB4, GABARAP, GABARAPL1, GABARAPL2, GABARAPL3, GABBR1, GABBR2, GABPA, GABPB1, GABPB1-AS1, GABPB2, GABRA1, GABRA2, GABRA3, GABRA4, GABRA5, GABRA6, GABRB1, GABRB2, GABRB3, GABRD, GABRE, GABRG1, GABRG2, GABRG3, GABRG3-AS1, GABRP, GABRQ, GABRR1, GABRR2, GABRR3, GACAT1, GACAT2, GACAT3, GAD1, GAD2, GADD45A, GADD45B, GADD45G, GADD45GIP1, GADL1, GAGE1, GAGE10, GAGE12B, GAGE12C, GAGE12D, GAGE12E, GAGE12F, GAGE12G, GAGE12H, GAGE12I, GAGE12J, GAGE13, GAGE2A, GAGE2B, GAGE2C, GAGE2D, GAGE2E, GAGE4, GAGE5, GAGE6, GAGE7, GAGE8, GAK, GAL, GAL3 ST1, GAL3 ST2, GAL3 ST3, GAL3ST4, GALC, GALE, GALK1, GALK2, GALM, GALNS, GALNT1, GALNT10, GALNT11, GALNT12, GALNT13, GALNT14, GALNT15, GALNT16, GALNT18, GALNT2, GALNT3, GALNT4, GALNT5, GALNT6, GALNT7, GALNT8, GALNT9, GALNTL5, GALNTL6, GALP, GALR1, GALR2, GALR3, GALT, GAMT, GAN, GANAB, GANC, GAP43, GAPDH, GAPDH, GAPT, GAPVD1, GAR1, GAREM, GAREML, GARNL3, GARS, GART, GAS1, GAS2, GAS2L1, GAS2L1P2, GAS2L2, GAS2L3, GAS5, GAS5-AS1, GAS6, GAS6-AS1, GAS6-AS2, GAS7, GAS8, GAS8-AS1, GAST, GATA1, GATA2, GATA2-AS1, GATA3, GATA3-AS1, GATA4, GATA5, GATA6, GATA6-AS1, GATAD1, GATAD2A, GATAD2B, GATB, GATC, GATM, GATS, GATSL2, GATSL3, GBA, GBA2, GBA3, GBAP1, GBAS, GBE1, GBF1, GBGT1, GBP1, GBP1P1, GBP2, GBP3, GBP4, GBP5, GBP6, GBP7, GBX1, GBX2, GC, GCA, GCAT, GCC1, GCC2, GCDH, GCFC2, GCG, GCGR, GCH1, GCHFR, GCK, GCKR, GCLC, GCLM, GCM1, GCM2, GCN1L1, GCNT1, GCNT2, GCNT3, GCNT4, GCNT7, GCOM1, GCSAM, GCSAML, GCSAML-AS1, GCSH, GCSHP3, GDA, GDAP1, GDAP1L1, GDAP2, GDE1, GDF1, GDF10, GDF11, GDF15, GDF2, GDF3, GDF5, GDF6, GDF7, GDF9, GDI1, GDI2, GDNF, GDNF-AS1, GDPD1, GDPD2, GDPD3, GDPD4, GDPD5, GDPGP1, GEM, GEMIN2, GEMIN4, GEMIN5, GEMIN6, GEMIN7, GEMIN8, GEMIN8P4, GEN1, GET4, GFAP, GFER, GFI1, GFI1B, GFM1, GFM2, GFOD1, GFOD2, GFPT1, GFPT2, GFRA1, GFRA2, GFRA3, GFRA4, GFRAL, GFY, GGA1, GGA2, GGA3, GGACT, GGCT, GGCX, GGH, GGN, GGNBP1, GGNBP2, GGPS1, GGT1, GGT3P, GGT5, GGT6, GGT7, GGT8P, GGTA1P, GGTLC1, GGTLC2, GH1, GH2, GHDC, GHET1, GHITM, GHR, GHRH, GHRHR, GHRL, GHRLOS, GHSR, GID4, GID8, GIF, GIGYF1, GIGYF2, GIMAP1, GIMAP1-GIMAP5, GIMAP2, GIMAP4, GIMAP5, GIMAP6, GIMAP7, GIMAP8, GIMD1, GIN1, GINM1, GINS1, GINS2, GINS3, GINS4, GIP, GIPC1, GIPC2, GIPC3, GIPR, GIT1, GIT2, GJA1, GJA10, GJA3, GJA4, GJA5, GJA8, GJA9, GJA9-MYCBP, GJB1, GJB2, GJB3, GJB4, GJB5, GJB6, GJB7, GJC1, GJC2, GJC3, GJD2, GJD3, GJD4, GK, GK2, GK3P, GK5, GKAP1, GKN1, GKN2, GLA, GLB1, GLB1L, GLB1L2, GLB1L3, GLCCI1, GLCE, GLDC, GLDN, GLE1, GLG1, GLI1, GLI2, GLI3, GLI4, GLIDR, GLIPR1, GLIPR1L1, GLIPR1L2, GLIPR2, GLIS1, GLIS2, GLIS2-AS1, GLIS3, GLIS3-AS1, GLMN, GLO1, GLOD4, GLOD5, GLP1R, GLP2R, GLRA1, GLRA2, GLRA3, GLRA4, GLRB, GLRX, GLRX2, GLRX3, GLRX5, GLS, GLS2, GLT1D1, GLT6D1, GLT8D1, GLT8D2, GLTP, GLTPD2, GLTSCR1, GLTSCR1L, GLTSCR2, GLUD1, GLUD1P3, GLUD1P7, GLUD2, GLUL, GLYAT, GLYATL1, GLYATL2, GLYATL3, GLYCAM1, GLYCTK, GLYCTK-AS1, GLYR1, GM140, GM2 A, GMCL1, GMCL1P1, GMDS, GMDS-AS1, GMEB1, GMEB2, GMFB, GMFG, GMIP, GML, GMNC, GMNN, GMPPA, GMPPB, GMPR, GMPR2, GMPS, GNA11, GNA12, GNA13, GNA14, GNA14-AS1, GNA15, GNAI1, GNAI2, GNAI3, GNAL, GNAO1, GNAQ, GNAS, GNAS-AS1, GNAT1, GNAT2, GNAT3, GNAZ, GNB1, GNB1L, GNB2, GNB2L1, GNB3, GNB4, GNB5, GNE, GNG10, GNG11, GNG12, GNG12-AS1, GNG13, GNG2, GNG3, GNG4, GNG5, GNG7, GNG8, GNGT1, GNGT2, GNL1, GNL2, GNL3, GNL3L, GNLY, GNMT, GNN, GNPAT, GNPDA1, GNPDA2, GNPNAT1, GNPTAB, GNPTG, GNRH1, GNRH2, GNRHR, GNRHR2, GNS, GOLGA1, GOLGA2, GOLGA2P10, GOLGA2P2Y, GOLGA2P3Y, GOLGA2P5, GOLGA2P6, GOLGA2P7, GOLGA2P9, GOLGA3, GOLGA4, GOLGA5, GOLGA6A, GOLGA6B, GOLGA6C, GOLGA6D, GOLGA6L1, GOLGA6L10, GOLGA6L17P, GOLGA6L22, GOLGA6L4, GOLGA6L5P, GOLGA6L6, GOLGA6L7P, GOLGA6L9, GOLGA7, GOLGA7B, GOLGA8A, GOLGA8B, GOLGA8CP, GOLGA8DP, GOLGA8EP, GOLGA8F, GOLGA8G, GOLGA8H, GOLGA8IP, GOLGA8J, GOLGA8K, GOLGA8M, GOLGA8N, GOLGA8O, GOLGA8R, GOLGA8S, GOLGA8T, GOLGB1, GOLIM4, GOLM1, GOLPH3, GOLPH3L, GOLT1A, GOLT1B, GON4L, GOPC, GORAB, GORASP1, GORASP2, GOSR1, GOSR2, GOT1, GOT1L1, GOT2, GP1BA, GP1BB, GP2, GP5, GP6, GP9, GPA33, GPAA1, GPALPP1, GPAM, GPANK1, CPAT2, GPATCH1, GPATCH11, GPATCH2, GPATCH2L, GPATCH3, GPATCH4, GPATCH8, GPBAR1, GPBP1, GPBP1L1, GPC1, GPC2, GPC3, GPC4, GPC5, GPC5-AS1, GPC5-AS2, GPC6, GPC6-AS1, GPC6-AS2, GPCPD1, GPD1, GPD1L, GPD2, GPER1, GPHA2, GPHB5, GPHN, GPI, GPIHBP1, GPKOW, GPLD1, GPM6A, GPM6B, GPN1, GPN2, GPN3, GPNMB, GPR1, GPR101, GPR107, GPR108, GPR110, GPR111, GPR112, GPR113, GPR114, GPR115, GPR116, GPR119, GPR12, GPR123, GPR123-AS1, GPR124, GPR125, GPR126, GPR128, GPR132, GPR133, GPR135, GPR137, GPR137B, GPR137C, GPR139, GPR141, GPR142, GPR143, GPR146, GPR148, GPR149, GPR15, GPR150, GPR151, GPR152, GPR153, GPR155, GPR156, GPR157, GPR158, GPRI58-AS1, GPR160, GPR161, GPR162, GPR17, GPR171, GPR173, GPR174, GPR176, GPR179, GPR18, GPR180, GPR182, GPR183, GPR19, GPR1-AS, GPR20, GPR21, GPR22, GPR25, GPR26, GPR27, GPR3, GPR31, GPR32, GPR33, GPR34, GPR35, GPR37, GPR37L1, GPR39, GPR4, GPR45, GPR50, GPR52, GPR55, GPR56, GPR6, GPR61, GPR62, GPR63, GPR64, GPR65, GPR68, GPR75, GPR75-ASB3, GPR78, GPR82, GPR83, GPR84, GPR85, GPR87, GPR88, GPR89A, GPR89B, GPR97, GPR98, GPRASP1, GPRASP2, GPRC5A, GPRC5B, GPRC5C, GPRC5D, GPRC6A, GPRIN1, GPRIN2, GPRIN3, GPS1, GPS2, GPSM1, GPSM2, GPSM3, GPT, GPT2, GPX1, GPX2, GPX3, GPX4, GPX5, GPX6, GPX7, GPX8, GRAMD1A, GRAMD1B, GRAMD1C, GRAMD2, GRAMD3, GRAMD4, GRAP, GRAP2, GRAPL, GRASP, GRB10, GRB14, GRB2, GRB7, GREB1, GREB1L, GREM1, GREM2, GRHL1, GRHL2, GRHL3, GRHPR, GRIA1, GRIA2, GRIA3, GRIA4, GRID1, GRID1-AS1, GRID2, GRID2IP, GRIFIN, GRIK1, GRIK1-AS1, GRIK1-AS2, GRIK2, GRIK3, GR1K4, GRIK5, GRIN1, GRIN2A, GRIN2B, GRIN2C, GRIN2D, GRIN3A, GRIN3B, GRINA, GRIP1, GRIP2, GRIPAP1, GRK1, GRK4, GRK5, GRK6, GRK7, GRM1, GRM2, GRM3, GRM4, GRM5, GRM5-AS1, GRM6, GRM7, GRM7-AS1, GRM7-AS3, GRM8, GRN, GRP, GRPEL1, GRPEL2, GRPR, GRSF1, GRTP1, GRTPI-AS1, GRWD1, GRXCR1, GRXCR2, GS1-24F4.2, GS1-259H13.2, GS1-279B7.1, GS1-600G8.3, GSAP, GSC, GSC2, GSDMA, GSDMB, GSDMC, GSDMD, GSE1, GSG1, GSG1L, GSG2, GSK3A, GSK3B, GSKIP, GSN, GSN-AS1, GSPT1, GSPT2, GSR, GSS, GSTA1, GSTA2, GSTA3, GSTA4, GSTA5, GSTA7P, GSTCD, GSTK1, GSTM1, GSTM2, GSTM2P1, GSTM3, GSTM4, GSTM5, GSTO1, GSTO2, GSTP1, GSTT2, GSTT2B, GSTTP1, GSTTP2, GSTZ1, GSX1, GSX2, GTDC1, GTF2A1, GTF2A1L, GTF2A2, GTF2B, GTF2E1, GTF2E2, GTF2F1, GTF2F2, GTF2H1, GTF2H2, GTF2H2B, GTF2H2C, GTF2H2C_2, GTF2H3, GTF2H4, GTF2H5, GTF2I, GTF2IP1, GTF2IRD1, GTF2IRD1P1, GTF2IRD2, GTF2IRD2B, GTF3A, GTF3C1, GTF3C2, GTF3C2-AS1, GTF3C3, GIF3C4, CTF3C5, GTF3C6, GTPBP1, GTPBP10, GTPBP2, GTPBP3, GTPBP4, GTPBP6, GTPBP8, GTSCR1, GTSE1, GTSE1-AS1, GTSF1, GTSF1L, GUCA1A, GUCA1B, GUCA1C, GUCA2A, GUCA2B, GUCD1, GUCY1A2, GUCY1A3, GUCY1B2, GUCY1B3, GUCY2C, GUCY2D, GUCY2EP, GUCY2F, GUCY2GP, GUF1, GUK1, GULP1, GUSB, GUSBP1, GUSBP10, GUSBP11, GUSBP2, GUSBP3, GUSBP4, GUSBP5, GUSBP9, GVINP1, GXYLT1, GXYLT1P3, GXYLT2, GYG1, GYG2, GYG2P1, GYLTL1B, GYPA, GYPB, GYPC, GYPE, GYS1, GYS2, GZF1, GZMA, GZMB, GZMH, GZMK, GZMM, H19, H1F0, H1FNT, H1FOO, H1FX, H1FX-AS1, H2AFB1, H2AFB2, H2AFB3, H2AFJ, H2AFV, H2AFX, H2AFY, H2AFY2, H2AFZ, H2BFM, H2BFWT, H2BFXP, H3F3A, H3F3AP4, H3F3B, H3F3C, H6PD, HAAO, HABP2, HABP4, HACE1, HACL1, HADH, HADHA, HADHB, HAGH, HAGHL, HAGLR, HAGLROS, HAL, HAMP, HAND1, HAND2, HAND2-AS1, HAO1, HAO2, HAO2-IT1, HAP1, HAPLN1, HAPLN2, HAPLN3, HAPLN4, HAR1A, HAR1B, HARBI1, HARS, HARS2, HAS1, HAS2, HAS2-AS1, HAS3, HAT1, HAUS1, HAUS2, HAUS3, HAUS4, HAUS5, HAUS6, HAUS7, HAUS8, HAVCR1, HAVCRIP1, HAVCR2, HAX1, BHA1, HBA2, HBB, HBBP1, HBD, HBE1, HBEGF, HBG1, HBG2, HBM, HBP1, HBQ1, HBSIL, HBZ, HCAR1, HCAR2, HCAR3, HCCAT5, HCCS, HCFC1, HCFC1-AS1, HCFC1R1, HCFC2, HCG11, HCG14, HCG17, HCG18, HCG2040054, HCG22, HCG23, HCG25, HCG26, HCG27, HCG4, HCG4B, HGB8, HCG9, HCK, HCLS1, HCN1, HCN2, HCN3, HCN4, HCN5, HCRT, HCRTR1, HCRTR2, HCST, HDAC1, HDAC10, HDAC11, HDAC11-AS1, HDAC2, HDAC3, HDAC4, HDAC5, HDAC6, HDAC7, HDAC8, HDAC9, HDC, HDDC2, HDDC3, HDGF, HDGFL1, HDGFRP2, HDGFRP3, HDHD1, HDHD2, HDHD3, HDLBP, HDX, HEATR1, HEATR3, HEATR4, HEATR5A, HEATR5B, HEATR6, HEATR9, HEBP1, HEBP2, HECA, HECTD1, HECTD2, HECTD2-AS1, HECTD3, HECTD4, HECW1, HECW2, HEG1, HEIH, HELB, HELLS, HELQ, HELT, HELZ, HELZ2, HEMGN, HEMK1, HENMTI, HEPACAM, HEPACAM2, HEPH, HEPHL1, HEPN1, HERC1, HERC2, HERC2P10, HERC2P2, HERC2P3, HERC2P4, HERC2P7, HERC2P9, HERC3, HERC4, HERC5, HERC6, HERPUD1, HERPUD2, HES1, HES2, HES3, HES4, HES5, HES6, HES7, HESX1, HEXA, HEXA-AS1, HEXB, HEXDC, HEXIM1, HEXIM2, HEY1, HEY2, HEYL, HFE, HFE2, HFM1, HGC6.3, HGD, HGF, HGFAC, HGH1, HGS, HGSNAT, HHAT, HHATL, HHEX, HHIP, HHIP-AS1, HHIPL1, HHIPL2, HHLA1, HHLA2, HHLA3, HIAT1, HIATL1, HIATL2, HIBADH, HIBCH, HIC1, HIC2, HID1, HID1-AS1, HIF1A, HIF1A-AS1, HIF1A-AS2, HIF1AN, HIF3A, HIGD1A, HIGD1B, HIGD1C, HIGD2A, HIGD2B, HILPDA, HILS1, HINFP, HINT1, HINT2, HINT3, HIP1, HIP1R, HIPK1, HIPK1-AS1, HIPK2, HIPK3, HIPK4, HIRA, HIRIP3, HIST1H1A, HIST1H1B, HIST1H1C, HIST1H1D, HST1H1E, HIST1H1T, HIST1H2AA, HIST1H2AB, HIST1H2AC, HIST1H2AD, HIST1H2AE, HIST1H2AG, HIST1H2AH, HIST1H2AI, HIST1H2AJ, HIST1H2AK, HIST1H2AL, HIST1H2AM, HIST1H2APS1, HIST1H2BA, HIST1H2BB, HIST1H2BC, HIST1H2BD, HIST1H2BE, HIST1H2BF, HIST1H2BG, HIST1H2BH, HIST1H2BI, HIST1H2BJ, HIST1H2BK, HIST1H2BL, HIST1H2BM, HIST1H2BN, HIST1H2BO, HIST1H3B, HIST1H3B, HIST1H3C, HIST1H3D, HIST1H3E, HIST1H3F, HIST1H3G, HIST1H3H, HIST1H3I, HIST1H3J, HIST1H4A, HIST1H4B, HIST1H4D, HIST1H4D, HIST1H4E, HIST1H4F, HIST1H4G, HIST1H4H, HIST1H4I, HIST1H4J, HIST1H4K, HIST1H4L, HIST2H2AA3, HIST2H2AA4, HIST2H2AB, HIST2-H2AC, HIST2H2BA, HIST2H2BC, HIST2H2BE, HIST2H2BF, HIST2H3A, HIST2H3C, HIST2H3D, HIST2H4A, HIST2H4B, HIST3H2A, HIST3H2BB, HIST3H3, HIST4H4, HIVEP1, HIVEP2, HIVEP3, HJURP, HK1, HK2, HK3, HKDC1, HKR1, HLA-A, HLA-B, HLA-C, HLA-DMA, HLA-DMB, HLA-DOA, HLA-DOB, HLA-DPA1, HLA-DPB1, HLA-DPB2, HLA-DQA-1, HLA-DQA2, HLA-DQB1, HLA-DQB2, HLA-DRA, HLA-DRB1, HLA-DRB5, HLA-DRB6, HLA-E, HLA-F, HLA-F-AS1, HLA-G, HLA-H, HLA-J, HLA-L, HLCS, HLF, HLTF, HLTF-AS1, HLX, HLX-AS1, HM13, HM13-AS1, HMBOX1, HMBS, HMCES, HMCN1, HMCN2, HMG20A, HMG20B, HMGA1, HMGA1P7, HMGA2, HMGB1, HMGB2, HMGB3, HMGB3P1, HMGB4, HMGCL, HMGCLL1, HMGCR, HMGCS1, HMGCS1, HMGN1, HMGN2, HMGN2P46, HMGN3, HMGN3-AS1, HMGN4, HMGN5, HMGXB3, HMGXB4, HMHA1, HMHB1, HMMR, HMMR-AS1, HMOX1, HMOX2, HMP19, HMSD, HMX1, HMX2, HMX3, HN1, HN1L, HNF1A, HNF1A-AS1, HNF1B, HNF4A, HNF4A-AS1, HNF4G, HNMT, HNRNPA0, HNRNPA1, HNRNPA1L2, HNRNPA1P10, HNRNPA1P33, HNRNPA2B1, HNRNPA3, HNRNPA3P1, HNRNPAB, HNRNPC, HNRNPCL1, HNRNPCL2, HNRNPCL3, HNRNPCL4, HNRNPD, HNRNPDL, HNRNPF, HNRNPH1, HNRNPH2, HNRNPH3, HNRNPK, HNRNPKP3, HNRNPL, HNRNPLL, HNRNPM, HNRNPR, HNRNPU, HNRNPU-AS1, HNRNPUL1, HNRNPUL2, HNRNPUL2-BSCL2, HOGA1, HOMER1, HOMER2, HOMER3, HOMEZ, HOOK1, HOOK2, HOOK3, HOPX, HORMAD1, HORMAD2, HORMAD2-AS1, HOTAIR, HOTAIRM1, HOTS, HOTTIP, HOXA1, HOXA10, HOXA10-AS, HOXA10-HOXA9, HOXA11, HOXA11-AS, HOXA13, HOXA2, HOXA3, HOXA4, HOXA5, HOXA6, HOXA7, HOXA9, HOXA-AS2, HOXA-AS3, HOXB1, HOXB13, HOX2, HOXB3, HOXB4, HOXB5, HOXB6, HOXB7, HOXB8, HOXB9, HOXB-AS1, HOXB-AS3, HOXC10, HOXC11, HOXC12, HOXC13, HOXC13-AS, HOXC4, HOXC5, HOXC6, HOXC8, HOXC9, HOXC-AS1, HOXC-AS2, HOXC-AS3, HOXD1, HOXD10, HOXID11, HOXD12, HOXD13, HOXD3, HOXD4, HOXD8, HOXD9, HOXD-AS2, HP, HP09025, HP09053, HP1BP3, HPCA, HPCAL1, HPCAL4, HPD, HPDL, HPGD, HPGDS, HPN, HPN-AS1, HPR, HPRT1, HPS1, HPS3, HPS4, HPS5, HPS6, HPSE, HPSE2, HPVC1, HPX, HPYR1, HR, HRAS, HRASLS, HRASLS2, HRASLS5, HRC, HRCT1, HRG, HRH1, HRH2, HRH3, HRH4, HRK, HRNR, HRSP12, HS1BP3, HS1BP3-IT1, HS2ST1, HS3ST1, HS3ST2, HS3ST3A1, HS3ST3B1, HS3ST4, HS3ST5, HS3ST6, HS6ST2, HS6ST2-AS1, HS6ST3, HSBP1, HSBP1L1, HSCB, HSD11B1, HSD11B1L, HSD11B2, HSD17B1, HSD17B10, HSD17B11, HSD17B12, HSD17B13, HSD17B14, HSD17B2, HSD17B3, HSD17B4, HSD17B6, HSD17B7, HSD17B7P2, HSD17B8, HSD3B1, HSD3B2, HSD3B7, HSD3BP4, HSD52, HSDL1, HSDL2, HSF1, HSF2, HSF2BP, HSF4, HSF5, HSFX1, HSFX2, HSFY1, HSFY1P1, HSFY2, HSH2D, HSP90AA1, HSP90AB1, HSP90AB4P, HSP90B1, HSP90B2P, HSPA12A, HSPA12B, HSPA13, HSPA14, HSPA1A, HSPA1B, HSPA1L, HSPA2, HSPA4, HSPA4L, HSPA5, HSPA6, HSPA7, HSPA8, HSPA9, HSPB1, HSPB11, HSPB2, HSPB2-C11orf52, HSPB3, HSPB6, HSPB7, HSPB8, HSPB9, HSPBAP1, HSPBP1, HSPD1, HSPE1, HSPE1-MOB4, HSPG2HSPH1, HTATIP2, HTATSF1, HTATSF1P2, HTN1, HTN3, HTR1A, HTR1B, HTR1D, HTR1E, HTR1F, HTR2A, HTR2A-AS1, HTR2B, HTR2C, HTR3A, HTR3B, HTR3C, HTR3D, HTR3E, HTR4, HTR5A, HTR5A-AS1, HTR6, HTR7, HTR7P1, HTRA1, HTRA2, HTRA3, HTRA4, HTT, HTT-AS, HULC, HUNK, HUS1, HUS1B, HUWEI, HVCN1, HYAL1, HYAL2, HYAL3, HYAL4, HYALP1, HYDIN, HYDIN2, HY1, HYKK, HYLS1, HYMA1, HYOU1, HYPK, HYPM, IAH1, IAPP, IARS, IARS2, IBA57, IBA57-AS1, IBSP, IBTK, ICA1, ICA1L, ICAM1, ICAM2, ICAM3, ICAM4, ICAM5, ICE1, ICE2, ICK, ICMT, ICOS, ICOSLG, ICT1, ID1, ID2, ID2-AS1, ID3, ID4, IDE, IDH1, IDH1-AS1, IDH2, IDH3A, IDH3B, IDH3G, IDI1, IDI2, IDI2-AS1, IDNK, IDO1, IDO2, IDS, IDUA, IER2, IER3, IER3IP1, IER5, IER5L, IFFO1, IFFO2, IFH16, IFI27, IFI27L1, IFI27L2, IFI30, IFI35, IFI44, IFI44L, IF16, IFIH1, IFIT1, IFIT-B 1-L B, IFIT2, IFIT3, IFIT5, IFITM1, IFITM10, IFITM3, IFITM4P, IFITM5, IFNA1, IFNA10, IFINA13, IFNA14, IFNA16, IFNA17, IFNA2, IFNA21, IFNA22P, IFNA4, IFNA5, IFNA6, IFNA7, IFNA8, IFNAR1, IFNAR2, IFNB1, IFNE, IFNG, IFNG-AS1, IFNGR1, IFNGR2, IFNK, IFNL1, IFNL2, IFNL3, IFNL4, IFNLR1, IFNW1, IFRD1, IFRD2, IFT122, IFT140, IFT172, IFT20, IFT22, IFT27, IFT43, IFT46, IFT52, IFT57, IFT74, IFT74-AS1, IFT80, IFT81, IFT88, IGBP1, IGBP1P1, IGDCC3, IGDCC4, IGF1, IGF1R, IGF2, IGF2-AS, IGF2BP1, IGF2BP2, IGF2BP2-AS1, IGF2BP3, IGF2R, IGFALS, IGFBP1, IGFBP2, IGFBP3, IGFBP4, IGFBP5, IGFBP6, IGFBP7, IGFBP7-AS1, IGFBL1, IGFL1, IGFLR2, IGFL3, IGFL4, IGFLR1, IGFN1, IGHMBP2, IGIP, IGJ, IGLL1, IGLL3P, IGLL5, IGLON5, IGSF1, IGSF10, IGSF11, IGSF11-AS1, IGSF21, IGSF22, IGSF23, IGSF3, IGSF5, IGSF6, IGSF8, IGSF9, IGSF9B, IHH, IK, IKBIP, IKBKAP, IKBKB, IKBKE, IKBKG, IKZF1, IKZF2, IKZF3, IKZF4, IKZF5, IL10, IL10RA, IL10B, IL10RB-AS1, IL11, IL11RA, IL12A, IL12A-AS1, IL12B, IL12RB1, IL12RB2, IL13, IL13RA1, IL13RA2, IL15, IL15RA, IL16, IL17A, IL17B, IL17C, IL17D, IL17F, IL17RA, IL17RB, IL17RC, IL17RD, IL17RE, IL17REL, IL18, IL18BP, IL18R1, IL,18RAP, IL19, IL1A, IL1B, IL1F10, IL1R1, IL1R2, IL1RAP, IL1RAPL1, IL1RAPL2, IL1RL1, IL1RL2, IL1RN, IL2, IL20, IL20RA, IL20RB, IL21, IL21-AS1, IL21R, IL21R-AS1, IL22, IL22RA1, IL22RA2, IL23A, IL23R, IL24, IL25, IL26, IL27, IL27RA, IL2RA, IL2RB, IL2RG, IL3, IL31, IL31RA, IL32, IL33, IL34, IL36A, IL36B, IL36G, IL36RN, IL37, IL3RA, IL4, IL4I1, IL4R, IL5RA, IL6, IL6ST, IL7, IL7R, IL9, IL9R, ILDR1, ILDR2, ILF2, ILF3, ILF3-AS1, ILK, ILKAP, ILVBL, IMMP1L, IMMP2L, IMMT, IMP3, LMP4, IMPA1, IMPA2, IMPACT, IMPAD1, IMPDH1, IMPDH2, IMPG1, IMP2, INA, INADL, INAFM1, INAFM2, INCA1, INCENP, INE1, INE2, INF2, ING1, ING2, ING3, ING4, ING5, INGX, INHA, INHBA, INHBA-AS1, INHBB, INHBC, INHBE, INIP, INMT, INMT-FAM188B, INO80, INO80B, INO80B-WBP1, INO80C, INO80D, INO80E, INPP1, INPP4A, INPP4B, INPP5A, INPP5B, INPP5D, INPP5E, INPP5F, INPP5J, INPP5K, INPPL1, INS, INSC, INSIG1, INSIG2, INS-IGF2, INSL3, INSL4, INSL5, INSL6, INSM1, INSM2, INSR, INSRR, INTS1, INTS10, INTS12, INTS2, INTS3, INTS4, INTS4P2, INTS5, INTS6, INTS6-AS1, INTS7, INTS8, INTS9, INTU, INVS, IP6K1, IP6K2, IP6K3, IPCEF1, IPMK, IPO11, IPO11-LRRC70, IPO13, IPO4, IPO5, IPO5P1, IPO7, IPO8, IPO9, IPO9-AS1, IPP, IPPK, IPW, IQCA1, IQCB1, IQCC, IQCD, IQCE, IQCF1, IQCF2, IQCF3, IQCF4, IQCF5, IQCF5-AS1, IQCF6, IQCG, IQCH, IQCH-AS1, IQCJ, IQCJ-SCHIP1, IQCJ-SCHIP1-AS1, IQCK, IQGAP1, IQGAP2, IQGAP3, IQSEC1, IQSEC2, IQSEC3, IQUB, IRAIN, IRAK1, IRAK1BP1, IRAK2, IRAK3, IRAK4, IREB2, IRF1, IRF2, IRF2BP1, IRF2BP2, IRF2BPL, IRF3, IRF4, IRF5, IRF6, IRF7, IRF8, IRF9, IRG1, IRGC, IRGM, IRGQ, IRS1, IRS2, IRS4, IRX1, IRX2, IRX3, IRX4, IRX5, IRX6, ISCA1, ISCA2, ISCU, ISG15, ISG20, ISG20L2, ISL1, ISL2, ISLR, ISLR2, ISM1, ISM1-AS1, ISM2, ISOC1, ISOC2, ISPD, ISPD-AS1, IST1, ISX, ISY1, ISY1-RAB43, ISYNA1, ITCH, ITFG1, ITFG1-AS1, ITFG2, ITFG3, ITGA1, ITGA10, ITGA11, ITGA2, ITGA2B, ITGA3, ITGA4, ITGA5, ITGA6, ITGA7, ITGA8, ITGA9, ITGA9-AS1, ITGAD, ITGAE, ITGAL, ITGAM, ITGAV, ITGAX, ITGB1, ITGB1BP1, ITGB1BP2, ITGB2, ITGB2-AS1, ITGB3, ITGB3BP, ITGB4, ITGB5, ITGB6, ITGB7, ITGB8, ITGBL1, ITIH1, ITIH2, ITIH3, ITIH4, ITIH4-AS1, ITIH5, ITIH6, ITK, ITLN1, ITLN2, ITM2A, ITM2B, ITM2C, ITPA, ITPK1, ITPK1-AS1, ITPKA, ITPKB, ITPKB-IT1, ITPKC, ITRP1, ITPR-AS1, ITPR2, ITPR3, ITPRIP, ITPRIPL1, ITPRIPL2, ITSN1, ITSN2, IVD, IVL, IVNS1-ABP, IWS1, IYD, IZUMO1, IZUMO1R, IZUMO2, IZUMO3, IZUMO4, JADE1, JADE2, JADE3, JAG1, JAC2, JAGN1, JAK1, JAK2, JAK3, JAKMIP1, JAKMIP2, JAKMIP2-AS1, JAKMIP3, JAM2, JAM3, JARID2, JARID2-AS1, JAZF1, JAZIF1-AS1, JDP2, JHDM1D-AS1, JKAMP, JMJD1C, JMJD1C-AS1, JMJD4, JMJD6, JMJD7, JMJD7-PLA2G4B, JMJD8, JMY, JOSD1, JOSD2, JPH1, JPH2, JPH3, JPH4, JPX, JRK, JRKL, JRKL-AS1, JSRP1, JTB, JUN, JUNB, JUND, JUP, KAAG1, KAL1, KALRN, KANK1, KANK2, KANK3, KANK4, KANSL1, KANSL1-ASI, KANSL1L, KANSL2, KANSL3, KANTR, KARS, KAT2A, KAT2B, KAT5, KAT6A, KAT6B, KAT7, KAT8, KATNA1, KATNAL1, KATNAL2, KATNB1, KATNBL1, KATNBL1P6, KAZALD1, KAZN, KBTBD11, KBTBD11-OT1, KBTBD12, KBTBD13, KBTBD2, KBTBD3, KBTBD4, KBTBD6, KBTBD7, KBTBD8, KC6, KCMF1, KCNA1, KCNA10, KCNA2, KCNA3, KCNA4, KCNA5, KCNA6, KCNA7, KCNAB1, KCNAB1-AS1, KCNAB1-AS2, KCNAB2, KCNAB3, KCNB1, KCNB2, KCNC1, KCNC2, KCNC3, KCNC4, KCNC4-AS1, KCND1, KCND2, KCND3, KCND3-IT1, KCNE1, KCNE1, KCNE2, KCNE3, KCNE4, KCNF1, KCNG1, KCNG2, KCNG3, KCNG4, KCNH1, KCNH2, KCNH3, KCNH4, KCNH5, KCNH6, KCNH7, KCNH8, KCNIP1, KCNIP2, KCNIP2-AS1, KCNIP3, KCNIP4, KCNIP4-IT1, KCNJ1, KCNJ10, KCNJ11, KCNJ12, KCNJ13, KCNJ14, KCNJ15, KCNJ16, KCNJ18, KCNJ2, KCNJ2-AS1, KCNJ3, KCNJ4, KCNJ5, KCNJ6, KCNJ8, KCNJ9, KCNK1, KCNK10, KCNK12, KCNK13, KCNK15, KCNK16, KCNK17, KCNK18, KCNK2, KCNK3, KCNK4, KCNK5, KCNK6, KCNK7, KCNK9, KCNMA1, KCNMA1-AS1, KCNMAI-AS2, KCNMA1-AS3, KCNMB1, KCNMB2, KCNMB2-AS1, KCNMB3, KCNM4, KCNN1, KCNN2, KCNN3, KCNN4, KCNQ1, KCNQ1DN, KCNQ1OT1, KCNQ2, KCNQ3, KCNQ4, KCNQ5, KCNQ5-AS1, KCNQ5-IT1, KCNRG, KCNS1, KCNS2, KCNS3, KCNT1, KCNT2, KCNU1, KCNV1, KCNV2, KCP, KCTD1, KCTD10, KCTD11, KCTD12, KCTD13, KCTD14, KCD15, KCTD16, KCTD17, KCTD18, KCTD19, KCTD2, KCTD20, KCTD21, KCTD21-AS1, KCTD3, KCTD4, KCTD5, KCTD6, KCTD7, KCTD8, KCTD9, KDELC1, KDELC2, KDELR1, KDELR2, KDELR3, KDF1, KDM1A, KDM1B, KDM2A, KDM2B, KDM3A, KDM3B, KDM4A, KDM4A-AS1, KDM4B, KDM4C, KDM4D, KDM4E, KDM5A, KDM5B, KDM5C, KDM6A, KDM6B, KDM7A, KDM8, KDR, KDSR, KEAP1, KEL, KERA, KGFLP1, KGFLP2, KHDC1, KHDC1L, KHDC3L, KHDRBS1, KHDRBS2, KHDRBS3, KHK, KHNYN, KHSRP, KIAA0020, KIAA0040, KIAA0087, KIAA0100, KIAA0101, KIAA0125, KIAA0141, KIAA0195, KIAA0196, KIAA0226, KIAA0226L, KIAA0232, KIAA0319, KIAA0319L, KIAA0355, KIAA0368, KIAA0391, KIAA0408, KIAA0430, KIAA0513, KIAA0556, KIAA0586, KIAA0753, KIAA0754, KIAA0825, KIAA0895, KIAA0895L, KIAA0907, KIAA0922, KIAA0930, KIAA1024, KIAA1024L, KIAA1033, KIAA1045, KIAA1107, KIAA1109, KIAA1143, KIAA1147, KIAA1161, KIAA1191, KLAA1210, KIAA1211, KIAA1211L, KIAA1217, KIAA1244, KIAA1257, KIAA1279, KIAA1324, KIAA1324L, KIAA1328, KIAA1377, KIAA0407, KIAA1429, KIAA1456, KIAA1462, KIAA1467, KIAA1468, KIAA1522, KIAA1524, KIAA1549, KIAA1549L, KIAA1551, KIAA1586, KIAA1598, KIAA1614, KIAA1644, KIAA1656, KIAA1671, KIAA1683, KIAA1715, KIAA1731NL, KIAA1755, KIAA1804, KIAA1841, KIAA1875, KIAA1919, KIAA1958, KIAA2012, KIAA2013, KIAA2018, KIAA2022, KIAA2026, KIDINS220, KIF11, KIF12, KIF13A, KIF13B, KIT14, KIF15, KIF16B, KIF17, KIF18A, KIF18B, KIF19, KIF1A, KIF1B, KIF1C, KIF20A, KIF20B, KIF21A, KIF21B, K1F22, KIF23, KIF24, KIF25, KIF25-ASL KIF26A, KIF26B, KIF27, KIF2A, KIF2B, KIF2C, KIF3A, KIF3B, KIF3C, KIF4A, KIF4B, KIF5A, KIF5B, KIF5C, KIF6, KIF7, KIF9, KIF9-AS1, K1FAP3, KIFC1, KIFC2, KIFC3, KIN, KIR2DL1, KIR2DL2, KIR2DL3, KIR2DL4, KIR2DS1, KIR2DS2, KIR2DS3, KIR2DS4, KIR2DS5, KIR3DL1, KIR3DL2, KIR3DL3, KIR3DS1, KIR3DX1, KIRREL, KIRREL2, KIRREL3, KIRREL3-AS2, KIRREL3-AS3, KISS1, KISS1R, KIT, KITLG, KIZ, KIZ-AS1, KL, KLB, KLC1, KLC2, KLC3, KLC4, KLF1, KLF10, KLF11, KLF12, KLF13, KLF14, KLF15, KLF16, KLF17, KLF2, KLF3, KLF3-AS1, KLF4, KLF5, KLF6, KLF7, KLF8, KLF9, KLHDC1, KLHDC10, KLHDC2, KLEDC3, KLHDC4, KLHDC7A, KLHDC7B, KLHDC8A, KLHDC8B, KLHDC9, KLHL1, KLHL10, KLHL11, KLHL12, KLHL13, KLHL14, KLHL15, KLHL17, KLHL18, KLHL2, KLHL20, KLHL21, KLHL22, KLHL23, KLHL24, KLHL25, KLHL26, KLHL28, KLHL29, KLHL3, KLHL30, KLHL31, KLHL32, KLHL33, KLHL34, KLHL35, KLHL36, KLHL38, KLHL4, KLHL40, KLHL41, KLHL42, KLHL5, KLHL6, KLHL6-AS1, KLHL7, KLHL7-AS1, KLH8, KLHL9, KLK1, KLK10, KLK11, KLK12, KLK13, KLK14, KLK15, KLK2, KLK3, KLK4, KLK5, KLK6, KLK7, KLK8, KLK9, KLKB1, KLKP1, KLLN, KLRAP1, KLRB1, KLRC1, KLRC2, KLRC3, KLRC4, KLRC4-KLRK1, KLRD1, KLRF1, KLRF2, KLRG1, KLRG2, KLRK1, KMO, KMT2A, KMT2B, KMT2C, KMT2D, KMT2E, KMT2E-AS1, KNCN, KNDC1, KNG1, KNOP1, KNSTRN, KNTC1, KPNA1, KPNA2, KPNA3, KPNA4, KPNA5, KPNA6, KPNA7, KPNB1, KPRP, KPTN, KRAS, KRBA1, KRBA2, KRBOX1, KRBOX1-AS1, KRBOX4, KRCC1, KREMEN1, KREMEN2, KRI1, KRIT1, KRR1, KRT1, KRT10, KRT12, KRT13, KRT14, KRT15, KRT16, KRT16P1, KRT16P2, KRT16P3, KRT17, KRT17P5, KRT18, KRT18P55, KRT19, KRT19P2, KRT2, KRT20, KRT222, KRT23, KRT24, KRT25, KRT26, KRT27, KRT28, KRT3, KRT31, KRT32, KRT33A, KRT33B, KRT34, KRT35, KRT36, KRT37, KRT38, KRT39, KRT4, KRT40, KRT42P, KRT5, KRT6A, KRT6B, KRT6C, KRT7, KRT71, KRT72, KRT73, KRT73-AS1, KRT74, KRT75, KRT76, KRT77, KRT78, KRT79, KRT8, KRT80, KRT81, KRT82, KRT83, KRT84, KRT85, KRT86, KRT8P41, KRT9, KRTAP10-1, KRTAP10-10, KRTAP10-11, KRTAP10-12, KRTAP10-2, KRTAP10-3, KRTAP10-4, KRTAP10-5, KRTAP10-6, KRTAP10-7, KRTAP10-8, KRTAP10-9, KRTAP1-1, KRTAP11-1, KRTAP12-1, KRTAP12-2, KRTAP12-3, KRTAP12-4, KRTAP1-3, KRTAP13-1, KRTAP13-2, KRTAP13-3, KRTAP13-4, KRTAP1-4, KRTAP1-5, KRTAP15-1, KRTAP16-1, KRTAP17-1, KRTAP19-1, KRTAP19-2, KRTAP19-3, KRTAP19-4, KRTAP19-5, KRTAP19-6, KRTAP19-7, KRTAP19-8, KRTAP20-1, KRTAP20-2, KRTAP20-3, KRTAP20-4, KRTAP2-1, KRTAP21-1, KRTAP21-2, KRTAP21-3, KRTP2-2, KRTAP22-1, KRTAP22-2, KRTAP2-3, KRTAP23-1, KRTAP2-4, KRTAP24-1, KRTAP25-1, KRTAP26-1, KRTAP27-1, KRTAP29-1, KRTAP3-1, KRTAP3-2, KRTAP3-3, KRTAP4-1, KRTAP4-11, KRTAP4-12, KRTAP4-2, KRTAP4-3, KRTAP4-4, KRTAP4-5, KRTAP4-6, KRTAP4-7, KRTAP4-8, KRTAP4-9, KRTAP5-1, KRTAP5-10, KRTAP5-11, KRTAP5-2, KRTAP5-3, KRTAP5-4, KRTAP5-5, KRTAP5-6, KRTAP5-7, KRTAP5-8, KRTAP5-9, KRTAP5-AS1, KRTAP6-1, KRTAP6-2, KRTAP6-3, KRTAP7-1, KRTAP8-1, KRTAP9-1, KRTAP9-2, KRTAP9-3, KRTAP9-4, KRTAP9-6, KRTAP9-7, KRTAP9-8, KRTAP9-9, KRTCAP2, KRTCAP3, KRTDAP, KSR1, KSR2, KTI12, KTN1, KTN1-AS1, KU-MEL-3, KXD1, KY, KYNU, L1CAM, L1TD1, L2HGDH, L3HYPDH, L3MBTL1, L3MBTL2, L3MBTL3, L3MBTL4, L3MBTL4-AS1, LACC1, LACE1, LACRT, LACTB, LACTB2, LACTBL1, LAD1, LAG3, LAGE3, LAIR1, LAIR2, LALBA, LAMA1, LAMA2, LAMA3, LAMA4, LAMA5, LAMA5-AS1, LAMB1, LAMB2, LAMB2P1, LAMB3, LAMB4, LAMC1, LAMC2, LAMC3, LAMP1, LAMP2, LAMP3, LAMP5, LAMP5-AS1, LAMTOR1, LAMTOR2, LAMTOR3, LAMTOR4, LAMTOR5, LAMTOR5-AS1, LANCL1, LANCL1-AS1, LANCL2, LANCL3, LAP3, LAPTM4A, LAPTM4B, LAPTM5, LARGE, LARGE-AS1, LARP1, LARP1B, LARP4, LARP4B, LARP6, LARP7, LARS, LARS2, LARS2-AS1, LAS1L, LASP1, LAT, LAT2, LATS1, LATS2, LAX1, LAYN, LBH, LBHD1, LBP, LBR, LBX1, LBX1-AS1, LBX2, LBX2-AS1, LCA5, LCA5L, LCAT, LCE1A, LCE1B, LCE1C, LCE1D, LCE1E, LCE1F, LCE2A, LCE2B, LCE2C, LCE2D, LCE3A, LCE3B, LCE3C, LCE3D, LCE3E, LCE4A, LCE5A, LCE6A, LCK, LCLAT1, LCMT1, LCMT1-AS1, LCMT1-AS2, LCMT2, LCN1, LCN10, LCN12, LCN15, LCN2, LCN6, LCN8, LCN9, LCNL1, LCOR, LCORL, LCP1, LCP2, LCT, LCTL, LDB1, LDB2, LDB3, LDHA, LDHAL6A, LDHAL6B, LDHB, LDHC, LDHD, LDLR, LDLRAD1, LDLRAD2, LDLRAD3, LDLRAD4, LDLRAD4-AS1, LDLRAP1, LDOC1, LDOC1L, LEAP2, LECT1, LECT2, LEF1, LEF1-AS1, LEFTY1, LEFTY2, LEKR1, LELP1, LEMD1, LEMD1-AS1, LEMD2, LEMD3, LENEP, LENG1, LENG8-AS1, LENG-9, LEO1, LEP, LEPR, LEPRE1, LEPREL1, LEPREL1-AS1, LEPREL2, LEPREL4, LEPROT, LEPROTL1, LETM1, LETM2, LETMD1, LEUTX, LFNG, LGALS1, LGALS12, LGALS13, LGALS14, LGALS16, LGALS17A, LGALS2, LGALS3, LGALS3BP, LGALS4, LGALS7, LGALS7B, LGALS8, LGALS8-AS1, LGALS9, LGALS9B, LGALS9C, LGALGALSL, LGI1, LGI2, LG13, LG14, LGMN, LGR4, LGR5, LGR6, LGSN, LHB, LHCGR, LHFP, LHFPL1, LHFPL2, LHFPL3, LHFPL3-AS1, LHFPL3-AS2, LHFPL4, LHFPL5, LHPP, LHX1, LHX2, LHX3, LHX4, LHX4-AS1, LHX5-AS1, LHX6, LHX8, LHX9, LIAS, LIF, LIFR, LIFR-AS1, LIG1, LIG3, LIG4, LILRA1, LILRA2, LILRA4, LILRA5, LILRA6, LILRB1, LILRB2, LILRB3, LILRB4, LILRB5, LILRP2, LIM2, LIMA1, LIMCH1, LIMD1, LIMD1-AS1, LIMD2, LIME1, LIMK1, LIMK2, LIMS1, LIMS2, LIMS3, LIMS3L, LIMS3-LOC440895, LIN28A, LIN28B, LIN37, LIN52, LIN54, LIN7A, LIN7B, LIN7C, LIN9, LINC00028, LINC00029, LINC00032, LINC00051, LINC00052, LINC00086, LINC00087, LINC00092, LINC00094, LINC00102, LINC00111, LINC00112, LINC00113, LINC00114, LINC00115, LINC00116, LINC00152, LINC00158, LINC00159, LINC00160, LINC00161, LINC00162, LINC00163, LINC00167, LINC00173, LINC00174, LINC00176, LINC00184, LINC00189, LINC000200, LINC00202-1, LINC00202-2, LINC00207, LINC00208, LINC00210, LINC00211, LINC00221, LINC00222, LINC00226, LINC00229, LINC00235, LINC00238, LINC00239, LINC00240, LINC00242, LINC00244, LINC00251, LINC00254, LINC00260, LINC00261, LINC00263, LINC00264, LINC00265, LINC00266-1, LINC00266-3, LINC00269, LINC00271, LINC00272, LINC00273, LINC00276, LINC00278, LINC00280, LINC00282, LINC00284, LINC00290, LINC00293, LINC00294, LINC00297, LINC00298, LINC00299, LINC00301, LINC00303, LINC00304, LINC00305, LINC00307, LINC00308, LINC00309, LINC00310, LINC00311, LINC00312, LINC00313, LINC00314, LINC00316, LINC00317, LINC00319, LINC00320, LINC00322, LINC00323, LINC00324, LINC00326, LINC00327, LINC00330, LINC00331, LINC00332, LINC00333, LINC00336, LINC00337, LINC00339, LINC00341, LINC00342, LINC00343, LINC00346, LINC00347, LINC00348, LINC00351, LINC00353, LINC00354, LINC00358, LINC00359, LINC00363, LINC00366, LINC00367, LINC00368, LINC00371, LINC00375, LINC00376, LINC00377, LINC00378, LINC00379, LINC00380, LINC00381, LINC00382, LINC00383, LINC00392, LINC00395, LINC00396, LINC00397, LINC00398, LINC00399, LINC00400, LINC00403, LINC00408, LINC00410, LINC00411, LINC00412, LINC00417, LINC00421, LINC00423, LINC00424, LINC00426, LINC00428, LINC00431, LINC00433, LINC00437, LINC00441, LINC00442, LINC00443, LINC00446, LINC00448, LINC00452, LINC00456, LINC00457, LINC00458, LINC00460, LINC00461, LINC00462, LINC00463, LINC00466, LINC00467, LINC00469, LINC00470, LINC00471, LINC00472, LINC00473, LINC00474, LINC00475, LINC00476, LINC00477, LINC00479, LINC00482, LINC00483, LINC00485, LINC00486, LINC00487, LINC00488, LINC00489, LINC00489, LINC00492, LINC00493, LINC00494, LINC00499, LINC00501, LINC00502, LINC00504, LINC00506, LINC00507, LINC00508, LINC00511, LINC00514, LINC00515, LINC00518, LINC00520, LINC00521, LINC00523, LINC00524, LINC00525, LINC00526, LINC00528, LINC00534, LINC00535, LINC00536, LINC00538, LINC00539, LINC00540, LINC00544, LINC00545, LINC00547, LINC00548, LINC00550, LINC00551, LINC00552, LINC00554, LINC00558, LINC00559, LINC00562, LINC00563, LINC00565, LINC00570, LINC00571, LINC00572, LINC00574, LINC00575, LINC00577, LINC00578, LINC00581, LINC00582, LINC00583, LINC00587, LINC00588, LINC00589, LINC00592, LINC00593, LINC00595, LINC00597, LINC00598, LINC00599, LINC00601, LINC00602, LINC00603, LINC00605, LINC00606, LINC00607, LINC00608, LINC00609, LINC00612, LINC00613, LINC00615, LINC00616, LINC00618, LINC00619, LINC00620, LINC00622, LINC00623, LINC00624, LINC00626, LINC00628, LINC00629, LINC00630, LINC00632, LINC00633, LINC00634, LINC00635, LINC00636, LINC00637, LINC00638, LINC00639, LINC00640, LINC00641, LINC00642, LINC00643, LINC00644, LINC00645, LINC00648, LINC00649, LINC00652, LINC00654, LINC00656, LINC00657, LINC00658, LINC00659, LINC00661, LINC00662, LINC00663, LINC00664, LINC00665, LINC00667, LINC00668, LINC00669, LINC00670, LINC00671, LINC00672, LINC00673, LINC00674, LINC00675, LINC00676, LINC00678, LINC00681, LINC00682, LINC00683, LINC00684, LINC00685, LINC00687, LINC00689, LINC00690, LINC00691, LINC00692, LINC00693, LINC00696, LINC00698, LINC00700, LINC00701, LINC00702, LINC00703, LINC00704, LINC00705, LINC00706, LINC00707, LINC00708, LINC00709, LINC00710, LINC00824, LINC00836, LINC00837, LINC00838, LINC00839, LINC00840, LINC00841, LINC00842, LINC00844, LINC00845, LINC00847, LINC00850, LINC00851, LINC00852, LINC00853, LINC00854, LINC00856, LINC00857, LINC00858, LINC00861, LINC00862, LINC00864, LINC00865, LINC00866, LINC00867, LINC00869, LINC00870, LINC00871, LINC00877, LINC00879, LINC00880, LINC00881, LINC00882, LINC00883, LINC00884, LINC00885, LINC00886, LINC00887, LINC00888, LINC00889, LINC00890, LINC00891, LINC00892, LINC00893, LINC00894, LINC00895, LINC00896, LINC00898, LINC00899, LINC00900, LINC00901, LINC00904, LINC00905, LINC00906, LINC00907, LINC00908, LINC00909, LINC00910, LINC00911, LINC00917, LINC00919, LINC00920, LINC00921, LINC00922, LINC00923, LINC00924, LINC00925, LINC00926, LINC00927, LINC00928, LINC00929, LINC00930, LINC00933, LINC00934, LINC00935, LINC00936, LINC00937, LINC00938, LINC00939, LINC00940, LINC00941, LINC00942, LINC00943, LINC00944, LINC00945, LINC00950, LINC00950, LINC00951, LINC00954, LINC00955, LINC00957, LINC00958, LINC00959, LINC00960, LINC00961, LINC00963, LINC00964, LINC00965, LINC00967, LINC00968, LINC00969, LINC00970, LINC00971, LINC00974, LINC00977, LINC00982, LINC00987, LINC00989, LINC00992, LINC00993, LINC00994, LINC00996, LINC00997, LINC00998, LINC00999, LINC01000, LINC01001, LINC01002, LINC01003, LINC01004, LINC01005, LINC01006, LINC01007, LINC01010, LINC01011, LINC01012, LINC01013, LINC01014, LINC01015, LINC01016, LINC01017, LINC01018, LINC01019, LINC01020, LINC01021, LINC01023, LINC01024, LINC01028, LINC01029, LINC01030, LINC01031, LINC01032, LINC01033, LINC01036, LINC01038, LINC01039, LINC01044, LINC01046, LINC01048, LINC01049, LINC01050, LINC01053, LINC01054, LINC01055, LINC01056, LINC01057, LINC01058, LINC01060, LINC01061, LINC01065, LINC01068, LINC01069, LINC01070, LINC01072, LINC01075, LINC01080, LINC01081, LINC01082, LINC01085, LINC01087, LINC01088, LINC01089, LINC01090, LINC01091, LINC01093, LINC01094, LINC01095, LINC01096, LINC01097, LINC01098, LINC01099, LINC01100, LINC01101, LINC01102, LINC01103, LINC01104, LINC01105, LINC01106, LINC01107, LINC01108, LINC01111, LINC01114, LINC01115, LINC01116, LINC01117, LINC01118, LINC01119, LINC01120, LINC01121, LINC01122, LINC01123, LINC01124, LINC01125, LINC01126, LINC01127, LINC01128, LINC01132, LINC01133, LINC01134, LINC01135, LINC01136, LINC01137, LINC01138, LINC01139, LINC01140, LINC01141, LINC01142, LINC01143, LINC01144, LINC01146, LINC01150, LINC01151, LINC01152, LINC01158, LINC01159, LINC01160, LINC01162, LINC01163, LINC01164, LINC01166, LINC01167, LINC01168, LINC01169, LINC01170, LINC01176, LINC01177, LINC01179, LINC01180, LINC01182, LINC01184, LINC01185, LINC01186, LINC01187, LINC01189, LINC01191, LINC01192, LINC01193, LINC01194, LINC01195, LINC01197, LINC01198, LINC01201, LINC01202, LINC01203, LINC01204, LINC01205, LINC01206, LINC01207, LINC01208, LINC01209, LINC01210, LINC01212, LINC01213, LINC01214, LINC01215, LINC01216, LINC01219, LINC01220, LINC01221, LINC01222, LINC01224, LINC01225, LINC01226, LINC01227, LINC01229, LINC01230, LINC01231, LINC01232, LINC01233, LINC01234, LINC01237, LINC01239, LINC01241, LINC01242, LINC01246, LINC01247, LINC01248, LINC01249, LINC01250, LINC01251, LINC01252, LINC01254, LINC01255, LINC01256, LINC01257, LINC01258, LINC01260, LINC01262, LINC01264, LINC01265, LINC01266, LINC01267, LINC01268, LINC01269, LINC01270, LINC01271, LINC01272, LINC01273, LINC01276, LINC01277, LINC01278, LINC01279, LINC01280, LINC01281, LINC01282, LINC01284, LINC01285, LINC01287, LINC01288, LINC01289, LINC01291, LINC01296, LINC01298, LINC01299, LINC01300, LINC01301, LINC01304, LINC01305, LINC01307, LINC01309, LINC01310, LINC01311, LINC01312, LINC01314, LINC01315, LINC01317, LINC01320, LINC01322, LINC01324, LINC01327, LINC01330, LINC01331, LINC01333, LINC01335, LINC01336, LINC01337, LINC01338, LINC01339, LINC01340, LINC01341, LINC01342, LINC01343, LINC01344, LINC01346, LINC01347, LINC01348, LINC01349, LINC01350, LINC01351, LINC01352, LINC01353, LINC01354, LINC01355, LINC01356, LINC01358, LINC01359, LINC01360, LINC01361, LINC01363, LINC01364, LINC01365, LINC01366, LINC01370, LINC01372, LINC01375, LINC01377, LINC01378, LINC01384, LINC01386, LINC01387, LINC01389, LINC01391, LINC01392, LINC01393, LINC01395, LINC01396, LINC01397, LINC01398, LINC01399, LINC01402, LINC01405, LINC01410, LINC01411, LINC01412, LINC01413, LINC01419, LINC01420, LINC01422, LINC01423, LINC01424, LINC01425, LINC01426, LINC01427, LINC01428, LINC01429, LINC01430, LINC01431, LINC01432, LINC01433, LINC01435, LINC01436, LINC01440, LINC01441, LINC01443, LINC01444, LINC01445, LINC01446, LINC01447, LINC01448, LINC01449, LINC01450, LINC01452, LINC01461, LINC01465, LINC01467, LINC01468, LINC01470, LINC01471, LINC01473, LINC01474, LINC01475, LINC01476, LINC01477, LINC01478, LINC01479, LINC01480, LINC01481, LINC01482, LINC01483, LINC01484, LINC01485, LINC01486, LINC01487, LINC01488, LINC01489, LINC01490, LINC01491, LINC01492, LINC01493, LINC01494, LINC01495, LINC01496, LINC01497, LINC01498, LINC01499, LINC01500, LINC01501, LINC01502, LINC01503, LINC01504, LINC01505, LINC01506, LINC01507, LINC01508, LINC01509, LINC01510, LINC01511, LINC01512, LINC01514, LINC01515, LINC01516, LINC01517, LINC01518, LINC01519, LINC01520, LINC01521, LINC01522, LINC01523, LINC01524, LINC01525, LINC01526, LINC01529, LINC01530, LINC01531, LINC01532, LINC01533, LINC01534, LINC01535, LINC01537, LINC01538, LINC01539, LINC01540, LINC01541, LINC01543, LINC01544, LINC01545, LINC01546, LINC01547, LINC01548, LINC01549, LINC01550, LINC01551, LINC01552, LINC01553, LINC01554, LINC01555, LINC01556, LINC01558, LINC01559, LINC01560, LINC01561, LINC01563, LINC01564, LINC01565, LINC01566, LINC01567, LINC01568, LINC01569, LINC01570, LINC01571, LINC01572, LINC01573, LINC01574, LINC01578, LINC01580, LINC01581, LINC01582, LINC01583, LINC01584, LINC01585, LINC01586, LINC01587, LINC01588, LINC-PINT, LINCR-0001, LINCR-0002, LINCR-0003, LINC-ROR, LINGO1, LINGO1-AS1, LINGO1-AS2, LINGO2, LINGO3, LINGO4, LINS, LIPA, LIPC, LIPE, LIPE-AS1, LIPF, LIPG, LIPH, LIPI, LIPJ, LIPK, LIPM, LIPN, LIPT1, LIPT2, LITAF, LIX1, LIX1L, LKAAEAR1, LL22NC01-81G9.3, LL22NC03-63E9.3, LL22NC03-75H12.2, LLGL1, LLGL2, LLPH, LLPH-AS1, LMAN1, LMANIL, LMAN2, LMAN2L, LMBR1, LMBRD1L, LMBRD1, LMBRD2, LMCD1, LMCD1-AS1, LMF1, LMF1-AS1, LMF2, LMLN, LMLN-AS1, LMNA, LMNB1, LMNB2, LMNTD1, LMNTD2, LMO1, LMO2, LMO3, LMO4, LMO7, LMO7-AS1, LMO7DN, LMO7DN-IT1, LMOD1, LMOD2, LMOD3, LMTK2, LMTK3, LMX1A, LMX1B, LNP1, LNPEP, LNX1, LNX1-AS1, LNX1-AS2, LNX2, LOC100049716, LOC100093631, LOC100101148, LOC100126784, LOC100128006, LOC100128076, LOC100128164, LOC100128176, LOC100128233, LOC100128239, LOC100128288, LOC100128317, LOC100128361, LOC100128398, LOC100128494, LOC100128531, LOC100128554, LOC100128568, LOC100128573, LOC100128593, LOC100128714, LOC100128770, LOC100128885, LOC100128993, LOC100129027, LOC100129034, LOC100129046, LOC100129055, LOC100129083, LOC100129138, LOC100129148, LOC100129175, LOC100129203, LOC100129216, LOC100129223, LOC100129316, LOC100129345, LOC100129361, LOC100129434, LOC100129461, LOC100129518, LOC100129520, LOC100129534, LOC100129550, LOC100129603, LOC100129617, LOC100129620, LOC100129636, LOC100129697, LOC100129917, LOC100129924, LOC100129931, LOC100129935, LOC100129940, LOC100129973, LOC100130075, LOC100130093, LOC100130238, LOC100130264, LOC100130298, LOC100130331, LOC100130357, LOC100130370, LOC100130417, LOC100130451, LOC100130452, LOC100130476, LOC100130539, LOC100130587, LOC100130673, LOC100130691, LOC100130700, LOC100130705, LOC100130744, LOC100130849, LOC100130872, LOC100130880, LOC100130899, LOC100130950, LOC100130964, LOC100130987, LOC100130992, LOC100131047, LOC100131257, LOC100131289, LOC100131303, LOC100131315, LOC100131347, LOC100131496, LOC100131532, LOC100131564, LOC100131626, LOC100131635, LOC100131655, LOC100132057, LOC100132062, LOC100132077, LOC100132078, LOC100132111, LOC100132146, LOC100132174, LOC100132215, LOC100132287, LOC100132304, LOC100132352, LOC100132356, LOC100132735, LOC100132741, LOC100132781, LOC100132831, LOC00132891, LOC100133050, LOC100133077, LOC100133091, LOC100133267, LOC100133286, LOC100133315, LOC100133331, LOC100133461, LOC100133669, LOC100133920, LOC100133985, LOC100134317, LOC100134368, LOC100134391, LOC100134868, LOC100144595, LOC100147773, LOC100190940, LOC100190986, LOC100192426, LOC100240728, LOC100240734, LOC100240735, LOC100268168, LOC100270746, LOC100270804, LOC100271832, LOC100272216, LOC100272217, LOC100286922, LOC100287010, LOC100287015, LOC100287036, LOC100287042, LOC100287072, LOC100287098, LOC100287225, LOC100287592, LOC100287632, LOC100287704, LOC100287728, LOC100287792, LOC100287834, LOC100287846, LOC100287944, LOC100288069, LOC100288123, LOC100288152, LOC100288162, LOC100288181, LOC100288570, LOC100288637, LOC100288748, LOC100288778, LOC100288798, LOC100288814, LOC100288842, LOC100288846, LOC100288866, LOC100288911, LOC100288974, LOC100289230, LOC100289333, LOC100289361, LOC100289473, LOC100289495, LOC100289511, LOC100289561, LOC100289580, LOC100289650, LOC100289656, LOC100289673, LOC100294145, LOC100294362, LOC100303749, LOC100335030, LOC100379224, LOC100419583, LOC100420587, LOC100422212, LOC100422556, LOC100422737, LOC100499194, LOC100499484, LOC100499484-C9ORF174, LOC100499489, LOC100500773, LOC100505478, LOC100505515, LOC100505530, LOC100505549, LOC100505622, LOC100505625, LOC100505635, LOC100505658, LOC100505666, LOC100505715, LOC100505716, LOC100505718, LOC100505736, LOC100505739, LOC100505782, LOC100505795, LOC100505811, LOC100505817, LOC100505841, LOC100505878, LOC100505887, LOC100505912, LOC100505915, LOC100505918, LOC100505920, LOC100505921, LOC100505938, LOC100505942, LOC100505978, LOC100505984, LOC100506022, LOC100506023, LOC100506071, LOC100506076, LOC100506082, LOC100506083, LOC100506085, LOC100506100, LOC100506122, LOC100506123, LOC100506124, LOC100506125, LOC100506127, LOC100506136, LOC100506142, LOC100506159, LOC100506175, LOC100506178, LOC100506188, LOC100506207, LOC100506258, LOC100506271, LOC100506272, LOC100506274, LOC100506281, LOC100506302, LOC100506314, LOC100506321, LOC100506368, LOC100506371, LOC100506384, LOC100506388, LOC100506393, LOC100506403, LOC100506406, LOC100506422, LOC100506444 LOC100506457, LOC100506470, LOC100506472, LOC100506474, LOC100506476, LOC100506497, LOC100506499, LOC100506526, LOC100506548, LOC100506551, LOC100506585, LOC100506603, LOC100506606, LOC100506639, LOC100506674, LOC100506675, LOC100506679, LOC100506682, LOC100506688, LOC100506700, LOC100506725, LOC100506730, LOC100506746, LOC100506747, LOC100506753, LOC100506790, LOC100506801 LOC100506804, LOC100506834, LOC100506844, LOC100506858, LOC100506860, LOC100506869, LOC100506895, LOC100506985, LOC100506990, LOC100507002, LOC100507006, LOC100507053, LOC100507065, LOC100507073, LOC100507091, LOC100507140, LOC100507144, LOC100507156, LOC100507175, LOC100507194, LOC100507195, LOC100507201, LOC100507205, LOC100507250, LOC100507283, LOC100507291, LOC100507316, LOC100507334, LOC100507346, LOC100507351, LOC100507373, LOC100507377, LOC100507384, LOC100507387, LOC100507388, LOC100507389, LOC100507391, LOC100507406, LOC100507412, LOC100507420, LOC100507424, LOC100507431, LOC100507437, LOC100507443, LOC100507462, LOC100507468, LOC100507472, LOC100507477, LOC100507487, LOC100507506, LOC100507530, LOC100507534, LOC100507537, LOC100507547, LOC100507557, LOC100507564, LOC100507577, LOC100507600, LOC100507634, LOC100507639, LOC100507642, LOC100507651, LOC100507661, LOC100508046, LOC100630918, LOC100630923, LOC100631378, LOC100652758, LOC100652768, LOC100652931, LOC100652999, LOC100653233, LOC100862671, LOC100996249, LOC100996251, LOC100996255, LOC100996263, LOC100996286, LOC100996291, LOC100996324, LOC100996325, LOC100996338, LOC100996342, LOC100996348, LOC100996349, LOC100996351, LOC100996385, LOC100996437, LOC100996447, LOC100996455, LOC100996579, LOC100996583, LOC100996634, LOC100996635, LOC100996654, LOC100996671, LOC100996679, LOC100996693, LOC100996694, LOC100996758, LOC101054525, LOC101059948, LOC101060019, LOC101060091, LOC101060321, LOC101060385, LOC101060389, LOC101060498, LOC101060524, LOC101060542, LOC101060553, LOC101241902, LOC101243545, LOC101409256, LOC101448202, LOC101559451, LOC101593348, LOC101805491, LOC101926889, LOC101926892, LOC101926897, LOC101926898, LOC101926905, LOC101926908, LOC101926911, LOC101926913, LOC101926915, LOC101926926, LOC101926928, LOC101926933, LOC101926935, LOC101926940, LOC101926941, LOC101926942, LOC101926943, LOC101926944, LOC101926955, LOC101926960, LOC101926962, LOC101926963, LOC101926964, LOC101926966, LOC101926975, LOC101927003, LOC101927018, LOC101927020, LOC101927021, LOC101927023, LOC101927027, LOC101927040, LOC101927043, LOC101927045, LOC101927048, LOC101927051, LOC101927053, LOC101927055, LOC101927056, LOC101927058, LOC101927062, LOC101927066, LOC101927067, LOC101927069, LOC101927070, LOC101927079, LOC101927081, LOC101927082, LOC101927087, LOC101927100, LOC101927115, LOC101927120, LOC101927123, LOC101927124, LOC101927131, LOC101927132, LOC101927136, LOC101927139, LOC101927142, LOC101927143, LOC101927151, LOC101927153, LOC101927157, LOC101927159, LOC101927164, LOC101927166, LOC101927178, LOC101927179, LOC101927181, LOC101927188, LOC101927189, LOC101927190, LOC101927196, LOC101927204, LOC101927207, LOC101927211, LOC101927221, LOC101927229, LOC101927230, LOC101927237, LOC101927239, LOC101927243, LOC101927244, LOC101927248, LOC101927257, LOC101927267, LOC101927269, LOC101927272, LOC101927273, LOC101927274, LOC101927280, LOC101927282, LOC101927284, LOC101927285, LOC101927286, LOC101927292, LOC101927296, LOC101927305, LOC101927310, LOC101927311, LOC101927314, LOC101927318, LOC1 01927322, LOC101927334, LOC101927342, LOC101927348, LOC101927354, LOC101927356, LOC101927358, LOC101927359, LOC101927365, LOC101927374, LOC101927378, LOC101927379, LOC101927391, LOC101927394, LOC101927406, LOC101927410, LOC101927411, LOC101927412, LOC101927415, LOC101927416, LOC101927418, LOC101927419, LOC101927421, LOC101927431, LOC101927434, LOC101927437, LOC101927438, LOC101927446, LOC101927450, LOC101927459, LOC101927460, LOC101927464, LOC101927468, LOC101927472, LOC101927476, LOC101927478, LOC101927481, LOC101927482, LOC101927487, LOC101927488, LOC101927492, LOC101927495, LOC101927497, LOC101927501, LOC101927502, LOC101927523, LOC101927526, LOC101927539, LOC101927543, LOC101927549, LOC101927550, LOC101927557, LOC101927560, LOC101927571, LOC101927572, LOC101927575, LOC101927577, LOC101927580, LOC101927583, LOC101927587, LOC101927588, LOC101927592, LOC101927604, LOC101927616, LOC101927619, LOC101927620, LOC101927623, LOC101927630, LOC101927636, LOC101927637, LOC101927640, LOC101927641, LOC101927650, LOC101927651, LOC101927653, LOC101927657, LOC101927661, LOC101927666, LOC101927668, LOC101927683, LOC101927686, LOC101927691, LOC101927692, LOC101927694, LOC101927697, LOC101927701, LOC101927708, LOC101927709, LOC101927730, LOC101927735, LOC101927740, LOC101927746, LOC101927755, LOC101927762, LOC101927765, LOC101927766, LOC101927768, LOC101927769, LOC101927770, LOC101927780, LOC101927787, LOC101927795, LOC101927797, LOC101927798, LOC101927811, LOC101927814, LOC101927815, LOC101927817, LOC101927822, LOC101927827, LOC101927829, LOC101927830, LOC101927835, LOC101927839, LOC101927843, LOC101927844, LOC101927845, LOC101927847, LOC101927849, LOC101927851, LOC101927854, LOC101927865, LOC101927869, LOC101927870, LOC101927876, LOC101927881, LOC101927884, LOC101927901, LOC101927905, LOC101927907, LOC101927911, LOC101927914, LOC101927915, LOC101927919, LOC101927924, LOC101927926, LOC101927932, LOC101927934, LOC101927948, LOC101927950, LOC101927954, LOC101927964, LOC101927967, LOC101927972, LOC101927973, LOC101927987, LOC101927990, LOC101928002, LOC101928008, LOC101928009, LOC101928012, LOC101928020, LOC101928030, LOC101928034, LOC101928035, LOC101928036, LOC101928043, LOC101928048, LOC101928052, LOC101928053, LOC101928063, LOC101928068, LOC101928069, LOC101928075, LOC101928093, LOC101928100, LOC101928103, LOC101928105, LOC101928107, LOC101928118, LOC101928128, LOC101928131, LOC101928134, LOC101928135, LOC101928137, LOC101928140, LOC101928150, LOC101928161, LOC101928162, LOC101928163, LOC101928167, LOC101928168, LOC101928174, LOC101928191, LOC101928201, LOC101928203, LOC101928205, LOC101928211, LOC101928222, LOC101928223, LOC101928226, LOC101928227, LOC101928231, LOC101928241, LOC101928253, LOC101928254, LOC101928259, LOC101928266, LOC101928269, LOC101928270, LOC101928272, LOC101928273, LOC101928279, LOC101928280, LOC101928283, LOC101928295, LOC101928298, LOC101928303, LOC101928304, LOC101928306, LOC101928307, LOC101928314, LOC101928322, LOC101928323, LOC101928324, LOC101928333, LOC101928335, LOC101928336, LOC101928353, LOC101928358, LOC101928370, LOC101928371, LOC101928372, LOC101928381, LOC101928386, LOC101928398, LOC101928401, LOC101928404, LOC101928414, LOC101928416, LOC101928417, LOC101928418, LOC101928435, LOC101928436, LOC101928437, LOC101928438, LOC101928441, LOC101928443, LOC101928445, LOC101928446, LOC101928448, LOC101928449, LOC101928453, LOC101928460, LOC101928461, LOC101928471, LOC101928476, LOC101928489, LOC101928491, LOC101928495, LOC101928505, LOC101928509, LOC101928514, LOC101928516, LOC101928517, LOC101928519, LOC101928523, LOC101928525, LOC101928530, LOC101928535, LOC101928539, LOC101928540, LOC101928551, LOC101928564, LOC101928565, LOC101928567, LOC101928569, LOC101928580, LOC101928590, LOC101928597, LOC101928600, LOC101928605, LOC101928618, LOC101928622, LOC101928626, LOC101928650, LOC101928651, LOC101928661, LOC101928663, LOC101928673, LOC101928674, LOC101928682, LOC101928694, LOC101928696, LOC101928697, LOC101928700, LOC101928708, LOC101928710, LOC101928718, LOC101928730, LOC101928731, LOC101928737, LOC101928738, LOC101928739, LOC101928748, LOC101928751, LOC101928766, LOC101928767, LOC101928769, LOC101928775, LOC101928778, LOC101928782, LOC101928786, LOC101928790, LOC101928791, LOC101928794, LOC101928796, LOC101928797, LOC101928804, LOC101928809, LOC101928812, LOC101928823, LOC101928834, LOC101928837, LOC101928844, LOC101928847, LOC101928851, LOC101928855, LOC101928861, LOC101928865, LOC101928880, LOC101928882, LOC101928886, LOC101928891, LOC101928894, LOC101928896, LOC101928909, LOC101928911, LOC101928936, LOC101928937, LOC101928940, LOC101928942, LOC101928943, LOC101928944, LOC101928961, LOC101928973, LOC101928977, LOC101928978, LOC101928979, LOC101928988, LOC101928989, LOC101928992, LOC101928994, LOC101928995, LOC101929019, LOC101929023, LOC101929034, LOC101929057, LOC101929058, LOC101929064, LOC101929066, LOC101929073, LOC101929076, LOC101929080, LOC101929084, LOC101929089, LOC101929095, LOC101929099, LOC101929106, LOC101929116, LOC101929122, LOC101929123, LOC101929124, LOC101929125, LOC101929128, LOC101929140, LOC101929144, LOC101929147, LOC101929148, LOC101929153, LOC101929154, LOC101929162, LOC101929164, LOC101929172, LOC101929181, LOC101929194, LOC101929199, LOC101929207, LOC101929210, LOC101929217, LOC101929224, LOC101929229, LOC101929231, LOC101929234, LOC101929237, LOC101929239, LOC101929241, LOC101929259, LOC101929260, LOC101929268, LOC101929279, LOC101929282, LOC101929284, LOC101929294, LOC101929295, LOC101929297, LOC101929312, LOC101929315, LOC101929319, LOC101929331, LOC101929337, LOC101929340, LOC101929353, LOC101929371, LOC101929372, LOC101929374, LOC101929378, LOC101929380, LOC101929384, LOC101929395, LOC101929406, LOC101929412, LOC101929413, LOC101929415, LOC101929420, LOC101929427, LOC101929431, LOC101929439, LOC101929441, LOC101929448, LOC101929450, LOC101929452, LOC101929454, LOC101929464, LOC101929468, LOC101929470, LOC101929473, LOC101929486, LOC101929488, LOC101929497, LOC101929504, LOC101929505, LOC101929512, LOC101929516, LOC101929517, LOC101929524, LOC101929526, LOC101929528, LOC101929529, LOC101929532, LOC101929541, LOC101929549, LOC101929550, LOC101929551, LOC101929555, LOC101929563, LOC101929565, LOC101929567, LOC101929570, LOC101929572, LOC101929574, LOC101929577, LOC101929579, LOC101929584, LOC101929586, LOC101929592, LOC101929595, LOC101929596, LOC101929607, LOC101929608, LOC101929613, LOC101929622, LOC101929625, LOC101929626, LOC101929631, LOC101929633, LOC101929645, LOC101929646, LOC101929653, LOC101929657, LOC101929662, LOC101929679, LOC101929680, LOC101929681, LOC101929694, LOC101929696, LOC101929698, LOC101929705, LOC101929709, LOC101929715, LOC101929717, LOC101929718, LOC101929721, LOC101929723, LOC101929733, LOC101929741, LOC101929753, LOC101929754, LOC101929762, LOC101929767, LOC101929771, LOC101929829, LOC101929897, LOC101929983, LOC101930010, LOC101930071, LOC101930452, LOC102031319, LOC102467073, LOC102467079, LOC102467080, LOC102467081, LOC102467146, LOC102467147, LOC102467212, LOC102467213, LOC102467214, LOC102467216, LOC102467217, LOC102467223, LOC102467224, LOC102467225, LOC102467226, LOC102467655, LOC102477328, LOC102503427, LOC102546226, LOC102546228, LOC102546229, LOC102546294, LOC102546298, LOC102546299, LOC102577426, LOC102606465, LOC102606466, LOC102659288, LOC102723344, LOC102723354, LOC102723362, LOC102723373, LOC102723376, LOC102723377, LOC102723385, LOC102723427, LOC102723439, LOC102723448, LOC102723505, LOC102723517, LOC102723544, LOC102723582, LOC102723604, LOC102723617, LOC102723649, LOC102723661, LOC102723701, LOC102723703, LOC102723704, LOC102723709, LOC102723729, LOC102723766, LOC102723769, LOC102723778, LOC102723809, LOC102723824, LOC102723828, LOC102723831, LOC102723833, LOC102723854, LOC102723859, LOC102723883, LOC102723885, LOC102723895, LOC102723927, LOC102724000, LOC102724009, LOC102724020, LOC102724034, LOC102724050, LOC102724053, LOC102724058, LOC102724084, LOC102724094, LOC102724096, LOC102724153, LOC102724163, LOC102724188, LOC102724190, LOC102724201, LOC102724238, LOC102724279, LOC102724297, LOC102724301, LOC102724312, LOC102724321, LOC102724323, LOC102724421, LOC102724450, LOC102724467, LOC102724484, LOC102724508, LOC102724511, LOC102724539, LOC102724550, LOC102724552, LOC102724555, LOC102724558, LOC102724589, LOC102724596, LOC102724601, LOC102724604, LOC102724612, LOC102724623, LOC102724651, LOC102724659, LOC102724661, LOC102724663, LOC102724691, LOC102724699, LOC102724710, LOC102724719, LOC102724776, LOC102724784, LOC102724804, LOC102724814, LOC102724849, LOC102724862, LOC102724874, LOC102724890, LOC102724913, LOC102724919, LOC102724927, LOC102724933, LOC102724957, LOC102724958, LOC102800447, LOC103021295, LOC103021296, LOC103091866, LOC103171574, LOC103191607, LOC103312105, LOC103344931, LOC103352541, LOC103611081, LOC103908605, LOC104054148, LOC104613533, LOC104798195, LOC113230, LOC115110, LOC143666, LOC145474, LOC145783, LOC145837, LOC145845, LOC146513, LOC146880, LOC148413, LOC148696, LOC148709, LOC149373, LOC149684, LOC149950, LOC150776, LOC150935, LOC151121, LOC151174, LOC151475, LOC151484, LOC152225, LOC152578, LOC153684, LOC153910, LOC154449, LOC154761, LOC154872, LOC155060, LOC157273, LOC158434, LOC158435, LOC158960, LOC171391, LOC1720, LOC200726, LOC200772, LOC202181 LOC220729, LOC221122, LOC221946, LOC253573, LOC254028, LOC254896, LOC255187, LOC255654, LOC256880, LOC257396, LOC283038, LOC283045, LOC283070, LOC283140, LOC283177, LOC283194, LOC283214, LOC283299, LOC283332, LOC283335, LOC283352, LOC283440, LOC283575, LOC283585, LOC283683, LOC283693, LOC283710, LOC283731, LOC283856, LOC283922, LOC284009, LOC284023, LOC284080, LOC284294, LOC284344, LOC284379, LOC284395, LOC284412, LOC284454, LOC284578, LOC284581, LOC284632, LOC284648, LOC284661, LOC284788, LOC284798, LOC284825, LOC284837, LOC284865, LOC284930, LOC284933, LOC284950, LOC285000, LOC285043, LOC285074, LOC285484, LOC285593, LOC285626, LOC285627, LOC285629, LOC285692, LOC285696, LOC285740, LOC285762, LOC285766, LOC285768, LOC285804, LOC285819, LOC285847, LOC285889, LOC286059, LOC286083, LOC286094, LOC286114, LOC286177, LOC286189, LOC286190, LOC286238, LOC286297, LOC286359, LOC286367, LOC286370, LOC286437, LOC338694, LOC338797, LOC338963, LOC339059, LOC339166, LOC339260, LOC339298, LOC339529, LOC339539, LOC339568, LOC339593, LOC339622, LOC339666, LOC339803, LOC339807, LOC339862, LOC339874, LOC339975, LOC340017, LOC340074, LOC340107, LOC340113, LOC340357, LOC340512, LOC341056, LOC343052, LOC344887, LOC344967, LOC349160, LOC374443, LOC375196, LOC387810, LOC388242, LOC388282, LOC388406, LOC388436, LOC388692, LOC388780, LOC388813, LOC388849, LOC388882, LOC388942, LOC389033, LOC389247, LOC389332, LOC389602, LOC389641, LOC389705, LOC389765, LOC389895, LOC389906, LOC390705, LOC391003, LOC391322, LOC392196, LOC392232, LOC392364, LOC392452, LOC399491, LOC399715, LOC399815, LOC399886, LOC400043, LOC400541, LOC400548, LOC400553, LOC400558, LOC400612, LOC400620, LOC400655, LOC400661, LOC400684, LOC400685, LOC400706, LOC400736, LOC400794, LOC400863, LOC400867, LOC400927, LOC400927-CSINK1E, LOC400940, LOC400958, LOC400997, LOC401010, LOC401052, LOC401127, LOC401134, LOC401177, LOC401242, LOC401286, LOC401312, LOC401320, LOC401324, LOC401463, LOC401557, LOC401585, LOC403312, LOC403323, LOC407835, LOC414300, LOC439933, LOC439994, LOC440028, LOC440040, LOC440117, LOC440173, LOC440300, LOC440311, LOC440390, LOC440434, LOC440446, LOC440461, LOC440600, LOC440602, LOC440700, LOC440704, LOC440895, LOC440896, LOC440910, LOC440982, LOC441025, LOC441081, LOC441155, LOC441178, LOC441204, LOC441242, LOC441454, LOC441455, LOC441601, LOC441666, LOC442028, LOC442132, LOC442497, LOC493754, LOC494127, LOC494141, LOC51145, LOC541473, LOC550113, LOC553103, LOC554206, LOC554223, LOC554249, LOC574538, LOC606724, LOC613037, LOC613038, LOC63930, LOC641367, LOC641746, LOC642236, LOC642361, LOC642366, LOC642423, LOC642426, LOC642846, LOC642852, LOC642929, LOC642943, LOC643072, LOC643201, LOC643339, LOC643355, LOC643387, LOC643406, LOC643441, LOC643542, LOC643623, LOC643711, LOC643733, LOC643770, LOC643802, LOC643923, LOC644145, LOC644172, LOC644189, LOC644554, LOC644656, LOC644669, LOC644762, LOC644838, LOC644919, LOC644936, LOC644961, LOC645166, LOC645354, LOC645382, LOC645434, LOC645513, LOC645752, LOC645949, LOC646214, LOC646268, LOC646471, LOC646522, LOC646626, LOC646736, LOC646743, LOC646762, LOC646813, LOC646903, LOC646938, LOC647323, LOC647859, LOC648987, LOC649133, LOC649324, LOC649352, LOC650226, LOC650293, LOC652276, LOC653160, LOC653513, LOC653602, LOC653653, LOC653712, LOC653786, LOC654342, LOC654841, LOC727751, LOC727896, LOC727924, LOC728024, LOC728040, LOC728084, LOC728175, LOC728323, LOC728392, LOC728485, LOC728554, LOC728613, LOC728637, LOC728673, LOC728730, LOC728739, LOC728743, LOC728752, LOC728819, LOC728989, LOC729080, LOC729083, LOC729159, LOC729218, LOC729296, LOC729506, LOC729603, LOC729609, LOC729658, LOC729683, LOC729732, LOC729737, LOC729739, LOC729867, LOC729930, LOC729950, LOC729966, LOC729970, LOC729987, LOC730101, LOC730102, LOC730159, LOC730183, LOC730202, LOC730668, LOC731157, LOC731424, LOC79160, LOC79999, LOC81691, LOC90246, LOC90768, LOC90784, LOC90834, LOC91450, LOC93432, LOC93622, LOH12CR1, LOH12CR2, LONP1, LONP2, LONRF1, LONRF2, LONRF3, LOR, LOX, LOXHD1, LOXL1, LOXL1-AS1, LOXL2, LOXL3, LOXL4, LPA, LPAL2, LPAR1, LPAR2, LPAR3, LPAR4, LPAR5, LPAR6, LPCAT1, LPCAT2, LPCAT3, LPCAT4, LPGAT1, LPHN1, LPHN2, LPHN3, LPHN3-AS1, LPIN1, LPIN2, LPIN3, LPL, LPO, LPP, LPP-AS1, LPP-AS2, LPPR1, LPPR2, LPPR3, LPPR4, LPPR5, LPXN, LRAT, LRBA, LRCH1, LRCH2, LRCH3, LRCH4, LRCOL1, LRFN1, LRFN2, LRFN3, LRFN4, LRFN5, LRG1, LRGUK, LRIF1, LRIG1, LRIG2, LRIG3, LRIT1, LRIT2, LRIT3, LRMP, LRP1, LRP10, LRP11, LRP12, LRP1B, LRP2, LRP2BP, LRP3, LRP4, LRP4-AS1, LRP5, LRP5L, LRP6, LRP8, LRPAP1, LRPPRC, LRR1, LRRC1, LRRC10, LRRC10B, LRRC14, LRRC14B, LRRC15, LRRC16A, LRRC16B, LRRC17, LRRC18, LRRC19, LRRC2, LRRC20, LRRC23, LRRC24, LRRC25, LRRC26, LRRC27, LRRC28, LRRC29, LRRC2-AS1, LRRC3, LRRC30, LRRC31, LRRC32, LRRC34, LRRC36, LRRC37A, LRRC37A11P, LRRC37A2, LRRC37A3, LRRC37A4P, LRRC37A5P, LRRC37A6P, LRRC37A8P, LRRC37B, LRRC37BP1, LRRC38, LRRC39, LRRC3-AS1, LRRC3B, LRRC3C, LRRC4, LRRC40, LRRC41, LRRC42, LRRC43, LRRC45, LRRC46, LRRC47, LRRC48, LRRC49, LRRC4B, LRRC4C, LRRC52, LRRC55, LRRC56, LRRC57, LRRC58, LRRC59, LRRC6, LRRC61, LRRC63, LRRC66, LRRC69, LRRC7, LRRC70, LRRC71, LRRC72, LRRC73, LRRC74A, LRRC74B, LRRC75A, LRRC75A-AS1, LRRC75B, LRRC8A, LRRC8B, LRRC8C, LRRC8D, LRRC8E, LRRC9, LRRCC1, LRRD1, LRRFIP1, LRRFIP2, LRRIQ1, LRRIQ3, LRRIQ4, LRRK1, LRRK2, LRRN1, LRRN2, LRRN3, LRRN4, LRRN4CL, LRRTM1, LRRTM2, LRRTM3, LRRTM4, LRSAM1, LRTM1, LRTM2, LRTOMT, LRWD1, LSAMP, LSAMP-AS1, LSG1, LSM1, LSM10, LSM11, LSM12, LSM14A, LSM14B, LSM2, LSM3, LSM4, LSM5, LSM6, LSM7, LSM8, LSMEM1, LSMEM2, LSP1, LSP1P3, LSR, LSS, LST1, LTA, LTA4H, LTB, LTB4R, LTB4R2, LTBP1, LTBP2, LTBP3, LTBP4, LTBR, LTC4S, LTF, LTK, LTN1, LTV1, LUC7L, LUC7L2, LUC7L3, LUCAT1, LUM, LUNAR1, LURAP1, LURAP1L, LURAP1L-AS1, LUZP1, LUZP2, LUZP4, LUZP6, LXN, LY6D, LY6E, LY6G5B, LY6G5C, LY6G6C, LY6G6D, LY6G6E, LY6G6F, LY6H, LY6K, LY75, LY75-CD302, LY86, LY86-AS1, LY9, LY96, LYAR, LYG1, LYG2, LYL1, LYN, LYNX1, LYPD1, LYPD2, LYPD3, LYPD4, LYPD5, LYPD6, LYPD6B, LYPD8, LYPLA1, LYPLA2, LYPLA2P2, LYPLAL1, LYPLAL1-AS1, LYRM1, LYRM2, LYRM4, LYRM5, LYRM7, LYRM9, LYSMD1, LYSMD2, LYSMD3, LYSMD4, LYST, LYVE1, LYZ, LYZL1, LYZL2, LYZL4, LYZL6, LZIC, LZTFL1, LZTR1, LZTS1, LZTS1-AS1, LZTS2, LZTS3, M1AP, M6PR, MAATS1, MAB21L1, MAB21L2, MAB21L3, MACC1, MACC1-AS1, MACF1, MACROD1, MACROD2, MACROD2-AS1, MACROD2-IT1, MAD1L1, MAD2L1, MAD2L1BP, MAD2L2, MADCAM1, MADD, MAEA, MAEL, MAF, MAF1, MAFA, MAFA-AS1, MAFB, MAFF, MAFG, MAFG-AS1, MAFK, MAG, MAGEA1, MAGEA10, MAGEA10-MAGEA5, MAGEA11, MAGEA12, MAGEA2, MAGEA2B, MAGEA3, MAGEA4, MAGEA5, MAGEA6, MAGEA8, MAGEA8-AS1, MAGEA9, MAGEA9B, MAGEB1, MAGEB10, MAGEB16, MAGEB17, MAGEB18, MAGEB2, MAGEB3, MAGEB4, MAGEB5, MAGEB6, MAGEC1, MAGEC2, MAGEC3, MAGED1, MAGED2, MAGED4, MAGED4B, MAGEE1, MAGEE2, MAGEF1, MAGEH1, MAGEL2, MAGI1, MAGI1-AS1, MAGI2, MAGI2-AS2, MAGI2-AS3, MAGI3, MAG1X, MAGOH, MAGOH2, MAGOHB, MAGT1, MAK, MAK16, MAL, MAL2, MALAT1, MALL, MALRD1, MALSU1, MALT1, MAMDC2, MAMDC2-AS1, MAMDC4, MAML1, MAML2, MAML3, MAMLD1, MAMSTR, MAN1A1, MAN1A2, MAN1B1, MAN1B1-AS1, MAN1C1, MAN2A1, MAN2A2, MAN2B1, MAN2B2, MAN2C1, MANBA, MANBAL, MANEA, MANEA-AS1, MANEAL, MANF, MANSC1, MANSC4, MAOA, MAOB, MAP10, MAP1A, MAP1B, MAP1LC3A, MAP1LC3B, MAP1LC3B2, MAP1LC3C, MAP1S, MAP2, MAP2K1, MAP2K2, MAP2K3, MAP2K4, MAP2K4P1, MAP2K5, MAP2K6, MAP2K7, MAP3K1, MAP3K10, MAP3K11, MAP3K12, MAP3K13, MAP3K14, MAP3K14-AS1, MAP3K15, MAP3K19, MAP3K2, MAP3K3, MAP3K4, MAP3K5, MAP3K6, MAP3K7, MAP3K7CL, MAP3K8, MAP3K9, MAP4, MAP4K1, MAP4K2, MAP4K3, MAP4K4, MAP4K5, MAP6, MAP6D1, MAP7, MAP7D1, MAP7D2, MAP7D3, MAP9, MAPK1, MAPK10, MAPK11, MAPK12, MAPK13, MAPK14, MAPK15, MAPK11P1L, MAPK3, MAPK4, MAPK6, MAPK7, MAPK8, MAPK8IP1, MAPK8IP2, MAPK8IP3, MAPK9, MAPKAP1, MAPKAPK2, MAPKAPK3, MAPKAPK5, MAPKAPK5-AS1, MAPKBP1, MAPRE1, MAPRE2, MAPRE3, MAPT, MAPT-AS1, MAPT-IT1, MARC1, MARC2, MARCH1, MARCH10, MARCH11, MARCH2, MARCH3, MARCH4, MARCH5, MARCH6, MARCH7, MARCH8, MARCH9, MARCKS, MARCKSL1, MARCO, MARK1, MARK2, MARK2P9, MARK3, MARK4, MARS, MARS2, MARVELD1, MARVELD2, MARVELD3, MAS1, MAS1L, MASP1, MASP2, MAST1, MAST2, MAST3, MAST4, MASTL, MAT1A, MAT2A, MAT2B, MATK, MATN1, MATN1-AS1, MATN2, MATN3, MATN4, MATR3, MAU2, MAVS, MAX, MAZ, MB, MB21D1, MB21D2, MBD1, MBD2, MBD3, MBD3L1, MBD3L2, MBD3L3, MBD3L4, MBD3L5, MBD4, MBD5, MBD6, MBIP, MBL1P, MBL2, MBLAC1, MBLAC2, MBNL1, MBNL1-AS1, MBNL2, MBNL3, MBOAT1, MBOAT2, MBOAT4, MBOAT7, MBP, MBTD1, MBTPS1, MBTPS2, MC1R, MC2R, MC3R, MC4R, MC5R, MCAM, MCAT, MCC, MCCC1, MCCC2, MCCD1, MCEE, MCEMP1, MCF2, MCF2L, MCF2L2, MCF2L-AS1, MCFD2, MCHR1, MCHR2, MCHR2-AS1, MCIDAS, MCL1, MCM10, MCM2, MCM3, MCM3AP, MCM3AP-AS1, MC4, MCM5, MCM6, MCM7, MCM8, MCM8-AS1, MCM9, MCMBP, MCMDC2, MCOLN1, MCOLN2, MCOLN3, MCPH1, MCRS1, MCTP1, MCTP2, MCTS1, MCTS2P, MCU, MCUR1, MDC1, MDFI, MDFIC, MDGA1, MDGA2, MDH1, MDH1B, MDH2, MDK, MDM1, MDM2, MDM4, MDN1, MDP1, MDS2, ME1, ME2, ME3, MEA1, MEAF6, MECOM, MECP2, MECR, MED1, MED10, MED11, MED12, MED12L, MED13, MED13L, MED14, MED14OS, MED15, MED15P9, MED16, MED17, MED18, MED19, MED20, MED21, MED22, MED23, MED24, MED25, MED26, MED27, MED28, MED29, MED30, MED31, MED4, MED4-AS1, MED6, MED7, MED8, MED9, MEDAG, MEF2A, MEF2B, MEF2BNB, MEF2BNB-MEF2B, MEF2C, MEF2C-AS1, MEF2D, MEFV, MEG3, MEG8, MEG9, MEGF10, MEGF11, MEGF6, MEGF8, MEGF9, MEI1, MEI4, MEIG1, MEIOB, MEIS1, MEIS1-AS3, MEIS2, MEIS3, MEIS3P1, MELK, MEMO1, MEN1, MEOX1, MEOX2, MEOX2-AS1, MEP1A, MEP1B, MEPCE, MEPE, MERTK, MESDC1, MESDC2, MESP1, MESP2, MEST, MESTIT1, MET, METAP1, METAP1D, METAP2, METRN, METRNL, METTL1, METTL10, METTL11B, METTL12, METTL13, METTL14, METTL15, METTL16, METTL17, METTL18, METTL20, METTL21A, METTL21B, METTL21C, METTL21EP, METTL22, METTL23, METTL24, METTL25, METTL2A, METTL2B, METTL3, METTL4, METTL5, METTL6, METTL7A, METTL7B, METTL8, METTL9, MEX3A, MEX3B, MEX3C, MEX3D, MFAP1, MFAP2, MFAP3, MFAP3L, MFAP4, MFAP5, MFF, MFGE8, MFHAS1, MFI2, MFI2-AS1, MFN1, MFN2, MFNG, MFRP, MFSD1, MFSD1, MFSD10, MFSD11, MFSD12, MFSD2A, MFSD2B, MFSD3, MFSD4, MFSD5, MFSD6, MFSD6L, MFSD7, MFSD8, MFSD9, MGA, MGAM, MGARP, MGAT1, MGAT2, MGAT3, MGAT3-AS1, MGAT4A, MGAT4B, MGAT4C, MGAT4D, MGAT4EP, MGAT5, MGAT5B, MGC12916, MGC15885, MGC16025, MGC16142, MGC16275, MGC27345, MGC27382, MGC2889, MGC32805, MGC34796, MGC39584, MGC45922, MGC50722, MGC57346, MGC57346-CRHR1, MGC72080, MGEA5, MGLL, MGME1, MGMT, MGP, MGRN1, MGST1, MGST2, MGST3, MHRT, MIA, MIA2, MIA3, MIA-RAB4B, MIAT, MIATNB, MIB1, MIB2, MICA, MICAL1, MICAL2, MICAL3, MICALCL, MICALL1, MICALL2, MICB, MICU1, MICU2, MICU3, MID1, MID1IP1, MID1IP1-AS1, MID2, MIDN, MIEF1, MIEF2, MIEN1, MIER1, MIER2, MIER3, MIF, MIF4GD, MIF-AS1, MIIP, MILR1, MIMT1, MINA, MINK1, MINOS1, MINOS1-NBL1, MINOS1P1, MINPP1, MIOS, MIOX, MIP, MIPEP, MIPEPP3, MIPOL1, MIR100, MIR100HG, MIR101-1, MIR101-2, MIR103A1, MIR103A2, MIRA103B1, MIR103B2, MIR105-1, MIR105-2, MIR106A, MIR106B, MIR107, MIR10A, MIR10B, MIR1-1, MIR1178, MIR1179, MIR1180, MIR1181, MIR1182, MIR1183, MIR1184-1, MIR1184-2, MIR1184-3, MIR1185-1, MIR1185-2, MIR1193, MIR1197, MIR1199, MIR1-1HG, MIR1-2, MIR1200, MIR1202, MIR1203, MIR1204, MIR1205, MIR1206, MIR1207, MIR1208, MIR122, MIR1224, MIR1225, MIR1226, MIR1227, MIR1228, MIR1229, MIR1231, MIR1233-1, MIR1233-2, MIR1234, MIR1236, MIR1237, MIR1238, MIR124-1, MIR124-2, MIR124-2HG, MIR1243, MIR124-3, MIR1244-1, MIR1244-2, MIR1244-3, MIR1244-4, MIR1245A, MIR1245B, MIR1246, MIR1247, MIR1248, MIR1249, MIR1250, MIR1251, MIR1252, MIR1253, MIR1254-1, MIR1254-2, MIR1255A, MIR1255B1, MIR1255B2, MIR1256, MIR1257, MIR1258, MIR125A, MIR125B1, MIR125B2, MIR126, MIR1260A, MIR1260B, MIR1261, MIR1262, MIR1263, MIR1264, MIR1265, MIR1266, MIR1267, MIR1268A, MIR1268B, MIR1269A, MIR1269B, MIR127, MIR1270, MIR1271, MIR1272, MIR1273A, MIR1273C, MIR1273D, MIR1273E, MIR1273F, MIR1273G, MIR1273H, MIR1275, MIR1276, MIR1277, MIR1278, MIR1279, MIR1281, MIR128-1, MIR1282, MIR128-2, MIR1283-1 MIR1283-2, MIR1284, MIR1285-1, MIR1285-2, MIR1286, MIR1287, MIR1288, MIR1289-1, MIR1289-2, MIR1290, MIR1291, MIR129-1, MIR1292, MIR129-2, MIR1293, MIR1294, MIR1295A, MIR1295M, MIR1296, MIR1297, MIR1298, MIR1299, MIR1301, MIR1302-1, MIR1302-10, MIR1302-11, MIR1302-2, MIR1302-3, MIR1302-4, MIR1302-5, MIR1302-6, MIRA302-7, MIR1302-8, MIR1302-9, MIR1303, MIR1304, MIR1305, MIR1306, MIR1307, MIR130A, MIR130B, MIR132, MIR1321, MIR1322, MIR1323, MIR1324, MIR133A1, MIR133A1HG, MIR133A2, MIR133B, MIR134, MIR1343, MIR135A1, MIR135A2, MIR135B, MIR136, MTR137, MIR137HG, MIR138-1, MIR138-2, MIR139, MIR140, MIR141, MIR142, MIR143, MIR143HG, MIR144, MIR145, MIR1468, MIR1469, MIR146A, MIR146B, MIR1470, MIR1471, MIR147A, MIR147B, MIR148A, MIR148B, MIR149, MIR150, MIR151A, MIR151B, MIR152, MIR153-1, MIR153-2, MIR1537, MIR1538, MIR539, MIR154, MIR155, MIR155HG, MIR1587, MIR15A, MIR15B, MIR16-1, MIR16-2, MIR17, MIR17HG, MIR181A1, MIR181A1HG, MIR181A2, MIR181A2HG, MIR181B1, MIR181B2, MIR181C, MIRA181D, MIR182, MIR1825, MIR1827, MIR183, MIR184, MIR185, MIR186, MIR187, MIR188, MIR18A, MIR18B, MIR1908, MIR1909, MIR190A, MIR190B, MIR191, MIR1910, MIR1911, MIR1912, MIR1913, MIR1914, MIR1915, MIR192, MIR193A, MIR193B, MIR194-1, MIR194-2, MIR195, MIR196A1, MIR196A2, MIR196B, MIR197, MIR1972-1, MIR1972-2, MIR1973, MIR1976, MIR198, MIR199A1, MIR199A2, MIR199B, MIR19A, MIR19B1, MIR19B2, MIR200A, MIR200B, MIR200C, MIR202, MIR202HG, MIR203A, MIR203B, MIR204, MIR205, MIR2052, MIR2053, MIR2054, MIR205HG, MIR206, MIR208A, MIR208B, MIR20A, MIR20B, MIR21, MIR210, MIR210HG, MIR211, MIR2110, MIR2113, MIR2114, MIR2115, MIR2116, MIR2117, MIR212, MIR214, MIR215, MIR216A, MIR216B, MIR217, MIR217HG, MIR218-1, MIR218-2, MIR219A1, MIR219A2, MIR219B, MIR22, MIR221, MIR222, MIR223, MIR224, MIR2276, MIR2277, MIR2278, MIR22HG, MIR2355, MIR2392, MIR23A, MIR23B, MIR23C, MIR24-1, MIR24-2, MIR2467, MIR25, MIR2681, MIR2682, MIR26A1, MIR26A2, MIR26B, MIR27A, MIR27B, MIR28, MIR2861, MIR2909, MIR296, MIR297, MIR298, 1MIR299, MIR29A, MIR29B1, MIR29B2, MIR29C, MIR300, MIR301A, MIR301B, MIR302A, MIR302B, MIR302C, MIR302D, MIR302E, MIR302F, MIR3064, MIR3065, MIR3074, MIR30A, MIR30B, MIR30C1, MIR30C2, MIR30D, MIR30E, MIR31, MIR3115, MIR3116-1, MIR3116-2, MIR3117, MIR3118-1, MIR3118-2, MIR3118-3, MIR3118-4, MIR3119-1, MIR3119-2, MIR3120, MIR3121, MIR3122, MIR3123, MIR3124, MIR3125, MIR3126, MIR3127, MIR3128, MIR3129, MIR3130-1, MIR3130-2, MIR3131, MIR3132, MIR3133, MIR3134, MIR3135A, MIR3135B, MIR3136, MIR3137, MIR3138, MIR3139, MIR3140, MIR3141, MIR3142, MIR3143, MIR3144, MIR3145, MIR3146, MIR3147, MIR3148, MIR3150A, MIR3150B, MIR3151, MIR3152, MIR3153, MIR3154, MIR3155A, MIR3155B, MIR3156-1, MIR3156-2, MIR3156-3, MIR3157, MIR3158-1, MIR3158-2, MIR3159, MIR3160-1, MIR3160-2, MIR3161, MIR3162, MIR3163, MIR3164, MIR3165, MIR3166, MIR3167, MIR3168, MIR3169, MIR3170, MIR3173, MIR3174, MIR3175, MIR3176, MIR3177, MIR3178, MIR3179-1, MIR3179-2, MIR3179-3, MIR3179-4, MIR3180-1, MIR3180-2, MIR3180-3, MIR3180-4, MIR3180-5, MIR3182, MIR3183, MIR3184, MIR3185, MIR3186, MIR3187, MIR3188, MIR3189, MIR3190, MIR3191 MIR3192, MIR3193, MIR3194, MIR3196, MIR3197, MIR3198-1, MIR3198-2, MIR3199-1, MIR3199-2, MIR31HG, MIR32, MIR3200, MIR3201, MIR3202-1, MIR3202-2, MIR320A, MIR320B1, MIR320B2, MIR320C1, MIR320C2, MIR320D1, MIR320D2, MIR320E, MIR323A, MIR323B, MIR324, MIR325, MIR325HG, MIR326, MIR328, MIR329-1, MIR329-2, MIR330, MIR331, MIR335, MIR337, MIR338, 1, MIR339, MIR33A, MIR33B, MIR340, MIR342, MIR345, MIR346, MIR34A, MIR34B, MIR34C, MIR3529, MIR3591, MIR3605, MIR3606, MIR3607, MIR3609, MIR361, MIR3610, MIR3611, MIR3612, MIR3613, MIR3614, MIR3615, MIR3616, MIR3617, MIR3618,MIR3619, MIR362, MIR3620, MIR3621, MIR3622A, MIR3622B, MIR363, MIR3646, MIR3648-1, MIR3648-2, MIR3649, MIR3650, MIR3651, MIR3652, MIR3653, MIR3654, MIR3655, MIR3656, MIR3657, MIR3658, MIR3659, MIR365A, MIR365B, MIR3660, MIR3661, MIR3662, MIR3663, MIR3663HG, MIR3664, MIR3665, MIR3666, MIR3667, MIR3668, MIR367, MIR3670-1, MIR3670-2, MIR3670-3, MIR3670-4, MIR3671, MIR3672, MIR3674, MIR3675, MIR3677, MIR3678, MIR3679, MIR3680-1, MIR3680-2, MIR3681, MIR3682, MIR3683, MIR3684, MIR3685, MIR3686, MIR3687-1, MIR3687-2, MIR3688-1, MIR3688-2, MIR3689A, MIR3689B, MIR3689C, MIR3689D1, MIR3689D2, MIR3689E, MIR3689F, MIR369, MIR3690, MIR3691, MIR3692, MIR370, MIR3713, MIR3714, MIR371A, MIR371B, MIR372, MIR373, MIR374A, MIR374B, MIR374C, MIR375, MIR376A1, MIR376A2, MIR376B, MIR376C, MIR377, MIR378A, MIR378B, MIR378C, MIR378D1, MIR378D2, MIR378E, MIR378F, MIR378G, MIR378H, MIR378I, MIR378J, MIR379, MIR380, MIR381, MIR381HG, MIR382, MIR383, MIR384, MIR3907, MIR3908, MIR3909, MIR3910-1, MIR3910-2, MIR3911, MIR3912, MIR3913-1, MIR3913-2, MIR3914-1, MIR3914-2, MIR3915, MIR3916, MIR3917, MIR3918, MIR3919, MIR3920, MIR3921, MIR3922, MIR3923, MIR3924, MIR3925, MIR3926-1, MIR3926-2, MIR3927, MIR3928, MIR3929, MIR3934, MIR3935, MIR3936, MIR3937, MIR3938, MIR3939, MIR3940, MIR3941, MIR3942, MIR3943, MIR3944, MIR3945, MIR3960MIR3972, MIR3973, MIR3974, MIR3975, MIR3976, MIR3976HG, MIR3977, MIR3978, MIR409, MIR410, MIR411, MIR412, MIR421, MIR422A, MIR423, MIR424, MIR425, MIR4251, MIR4252, MIR4253, MIR4254, MIR4255, MIR4256, MIR4257, MIR4258, MIR4260, MIR4261, MIR4262, MIR4263, MIR4264, MIR4265, MIR4266, MIR4267, MIR4268, MIR4269, MIR4270, MIR4271, MIR4272, MIR4273, MIR4274, MIR4275, MIR4276, MIR4277, MIR4278, MIR4279, MIR4280, MIR4281, MIR4282, MIR4283-1, MIR4283-2, MIR4284, MIR4285, MIR4286, MIR4287, MIR4288, MIR4289, MIR429, MIR4290, MIR4291, MIR4292, MIR4293, MIR4294, MIR4295, MIR4296, MIR4297, MIR4298, MIR4299, MIR4300, MIR4301, MIR4302, MIR4303, MIR4304, MIR4305, MIR4306, MIR4307, MIR4308, MIR4309, MIR431, MIR4310, MIR4311, MIR4312, MIR4313, MIR4314, MIR4315-1, MIR4315-2, MIR4316, MIR4317, MIR4318, MIR4319, MIR432, MIR4320, MIR4321, MIR4322, MIR4323, MIR4324, MIR4325, MIR4326, MIR4327, MIR4328, MIR4329, MIR433, MIR4330, MIR4417, MIR4418, MIR4419A, MIR4419B, MIR4420, MIR4421, MIR4422, MIR4423, MIR4424, MIR4425, MIR4426, MIR4427, MIR4428, MIR4429, MIR4430, MIR4431, MIR4432, MIR4433A, MIR4433B, MIR4434, MIR4435-1, MIR4435-1HG, MIR4435-2, MIR4436A, MIR4436B1, MIR4436B2, MIR4437, MIR4438, MIR4439, MIR4440, MIR4441, MIR4442, MIR4443, MIR4444-1, MIR4444-2, MIR4445, MIR4446, MIR4447, MIR4448, MIR4449, MIR4450, MIR4451, MIR4452, MIR4453, MIR4454, MIR4455, MIR4456, MIR4457, MIR4458, MIR4458HG, MIR4459, MIR4460, MIR4461, MIR4462, MIR4463, MIR4464, MIR4465, MIR4466, MIR4467, MIR4468, MIR4469, MIR4470, MIR4471, MIR4472-1, MIR4472-2, MIR4473, MIR4474, MIR4475, MIR4476, MIR4477A, MIR4477B, MIR4478, MIR4479, MIR448, MIR4480, MIR4481, MIR4482, MIR4483, MIR4484, MIR4485, MIR4486, MIR4487, MIR4488, MIR4489, MIR4490, MIR4491, MIR4492, MIR4493, MIR4494, MIR4495, MIR4496, MIR4497, MIR4498, MIR4499, MIR449A, MIR449B, MIR449C, MIR4500, MIR4500HG, MIR4501, MIR4502, MIR4503, MIR4504, MIR4505, MIR4506, MIR4507, MIR4508, MIR4509-1, MIR4509-2, MIR4509-3, MIR450A1, MIR450A2, MIR450B, MIR4510, MIR4511, MIR4512, MIR4513, MIR4514, MIR4515, MIR4516, MIR4517, MIR4518, MIR4519, MIR451A, MIR451B, MIR452, MIR4520-1, MIR4520-2, MIR4521, MIR4522, MIR4523, MIR4524A, MIR4524B, MIR4525, MIR4526, MIR4527, MIR4529, MIR4530, MIR4531, MIR4532, MIR4533, MIR4534, MIR4535, MIR4536-1, MIR454, MIR4540, MIR455, MIR4632, MIR4633, MIR4634, MIR4635, MIR4636, MIR4637, MIR4638, MIR4639, MIR4640, MIR4641, MIR4642, MIR4643, MIR4644, MIR4645, MIR4646, MIR4647, MIR4648, MIR4649, MIR4650-1, MIR4650-2, MIR4651, MIR4652, MIR4653, MIR4654, MIR4655, MIR4656, MIR4657, MIR4658, MIR4659A, MIR4659B, MIR4660, MIR4661, MIR4662A, MIR4662B, MIR4663, MIR4664, MIR4665, MIR4666A, MIR4666B, MIR4667, MIR4668, MIR4669, MIR4670, MIR4671, MIR4672, MIR4673, MIR4674, MIR4675, MIR4676, MIR4677, MIR4678, MIR4679-1, MIR4679-2, MIR4680, MIR4681, MIR4682, MIR4683, MIR4684, MIR4685, MIR4686, MIR4687, MIR4688, MIR4689, MIR4690, MIR4691, MIR4692, MIR4693, MIR4694, MIR4695, MIR4696, MIR4697, MIR4697HG, MIR4698, MIR4699, MIR4700, MIR4701, MIR4703, MIR4704, MIR4705, MIR4706, MIR4707, MIR4708, MIR4709, MIR4710, MIR4711, MIR4712, MIR4713, MIR4714, MIR4715, MIR4716, MIR4717, MIR4718, MIR4719, MIR4720, MIR4721, MIR4722, MIR4723, MIR4724, MIR4725, MIR4726, MIR4727, MIR4728, MIR4729, MIR4730, MIR4731, MIR4732, MIR4733, MIR4734, MIR4735, MIR4736, MIR4737, MIR4738, MIR4739, MIR4740, MIR4741, MIR4742, MIR4743, MIR4744, MIR4745, MIR4746, MIR4747, MIR4748, MIR4749, MIR4750, MIR4751, MIR4752, MIR4753, MIR4754, MIR4755, MIR4756, MIR4757, MIR4758, MIR4759, MIR4760, MIR4761, MIR4762, MIR4763, MIR4764, MIR4765, MIR4766, MIR4767, MIR4768, MIR4769, MIR4770, MIR4771-1, MIR4771-2, MIR4772, MIR4773-1, MIR4773-2, MIR4774, MIR4775, MIR4776-1, MIR4776-2, MIR4777, MIR4778, MIR4779, MIR4780, MIR4781, MIR4782, MIR4783, MIR4784, MIR4785, MIR4786, MIR4787, MIR4788, MIR4789, MIR4790, MIR4791, MIR4792, MIR4793, MIR4794, MIR4795, MIR4796, MIR4797, MIR4798, MIR4799, MIR4800, MIR4801, MIR4802, MIR4803, MIR4804, MIR483, MIR484, MIR485, MIR486-1, MIR486-2, MIR487A, MIR487B, MIR488, MIR489, MIR490, MIR491, MIR492, MIR493, MIR494, MIR495, MIR496, MIR497, MIR497HG, MIR498, MIR4999, MIR499A, MIR499B, MIR5000, MIR5001, MIR5002, MIR5003, MIR5004, MIR5006, MIR5007, MIR5008, MIR5009, MIR500A, MIR500B, MIR501, MIR5010, MIR5011, MIR502, MIR503, MIR503HG, MIR504, MIR5047, MIR505, MIR506, MIR507, MIR508, MIR5087, MIR5088, MIR5089, MIR5090, MIR5091, MIR509-1, MIR5092, MIR509-2, MIR5093, MIR509-3, MIR5094, MIR5095, MIR5096, MIR510, MIR5100, MIR511, MIR512-1, MIR512-2, MIR513A1, MIR513A2, MIR513B, MIR513C, MIR514A1, MIR514A2, MIR514A3, MIR514B, MIR515-1, MIR515-2, MIR516A1, MIR516A2, MIR516B1, MIR516B2, MIR517A, MIR517B, MIR517C, MIR5186, MIR5187, MIR5188, MIR5189, MIR518A1, MIR518A2, MIR518B, MIR518C, MIR518D, MIR518E, MIR518F, MIR5190, MIR5191, MIR5192, MIR5193, MIR5194, MIR5195, MIR5196, MIR5197, MIR519A1, MIR519A2, MIR519B, MIR519C, MIR519D, MIR519E, MIR520A, MIR520B, MIR520C, MIR520D, MIR520E, MIR520F, MIR520G, MIR520H, MIR521-1, MIR521-2, MIR522, MIR523, MIR524, MIR525, MIR526A1, MIR526A2, MIR526B, MIR527, MIR532, MIR539, MIR541, MIR542, MIR543, MIR544A, MIR544B, MIR545, MIR548A1, MIR548A2, MIR548A3, MIR548AA1, MIR548AA2, MIR548AB, MIR548AC, MIR548AD, MIR548AE1, MIR548AE2, MIR548AG1, MIR548AG2, MIR548AH, MIR548A1, MIR548AJ1, MIR548AJ2, MIR548AK, MIR548AL, MIR548AM, MIR548AN, MIR548AO, MIR548AP, MIR548AQ, MIR548AR, MIR548AS, MIR548AT, MIR548AU, MIR548AV, MIR548AW, MIR548AX, MIR548AY, MIR548AZ, MIR548B, MIR548BA, MIR548BB, MIR548C, MIR548D1, MIR548D2, MIR548E, MIR548F1, MIR548F2, MIR548F3, MIR548F4, MIR548F5, MIR548G, MIR548H1, MIR548H2, MIR548H3, MIR548H4, MIR548H5, MIR548I1, MIR548I2, MIR548I3, MIR548I4, MIR548J, MIR548K, MIR548L, MIR548M, MIR548N, MIR548O, MIR548O, MIR548P, MIR548Q, MIR548S, MIR548T, MIR548U, MIR548V, MIR548W, MIR548X, MIR548X2, MIR548Y, MIR548Z, MIR549A, MIR550A1, MIR550A2, MIR550A3, MIR550B1, MIR550B2, MIR551A, MIR551B, MIR552, MIR553, MIR554, MIR555, MIR556, MIR557, MIR5571, MIR5572, MIR5579, MIR558, MIR5580, MIR5581, MIR5582, MIR5583-1, MIR5583-2, MIR5584, MIR5585, MIR5586, MIR5587, MIR5588, MIR5589, MIR559, MIR5590, MIR5591, MIR561, MIR562, MIR563, MIR564, MIR566, MIR567, MIR568, MIR5680, MIR5681A, MIR5681B, MIR5682, MIR5683, MIR5684, MIR5685, MIR5687, MIR5688, MIR5689, MIR569, MIR5690, MIR5691, MIR5692A1, MIR5692A2, MIR5692B, MIR5692C1, MIR5692C2, MIR5693, MIR5694, MIR5695, MIR5696, MIR5697, MIR5698, MIR5699, MIR570, MIR5700, MIR5701-1, MIR5701-2, MIR5701-3, MIR5702, MIR5703, MIR5704, MIR5705, MIR5706, MIR5707, MIR5708, MIR571, MIR572, MIR573, MIR5739, MIR574, MIR575, MIR576, MIR577, MIR578, MIR5787, MIR579, MIR580, MIR581, MIR582, MIR583, MIR584, MIR585, MIR586, MIR587, MIR588, MIR589, MIR590, MIR591, MIR592, MIR593, MIR595, MIR596, MIR597, MIR598, MIR599, MIR600, MIR600HG, MIR601, MIR602, MIR603, MIR604, MIR605, MIR606, MIR6068, MIR6069, MIR607, MIR6070, MIR6071, MIR6072, MIR6073, MIR6074, MIR6075, MIR6076, MIR6077, MIR6078, MIR6079, MIR608, MIR6080, MIR6081, MIR6082, MIR6083, MIR6084, MIR6085, MIR6086, MIR6087, MIR6088, MIR6089, MIR609, MIR6090, MIR610, MIR611, MIR612, MIR6124, MIR6125, MIR6126, MIR6127, MIR6128, MIR6129, MIR613, MIR6130, MIR6131, MIR6132, MIR6133, MIR6134, MIR614, MIR615, MIR616, MIR6165, MIR617, MIR618, MIR619, MIR620, MIR621, MIR622, MIR623, MIR624, MIR625, MIR626, MIR627, MIR628, MIR629, MIR630, MIR631, MIR632, MIR633, MIR634, MIR635, MIR636, MIR637, MIR638, MIR639, MIR640, MIR641, MIR642A, MIR642B, MIR643, MIR644A, MIR645, MIR646, MIR646HG, MIR647, MIR648, MIR649, MIR6499, MIR650, MIR6500, MIR6501, MIR6502, MIR6503, MIR6504, MIR6505, MIR6506, MIR6507, MIR6508, MIR6509, MIR651, MIR6510, MIR6511A1, MIR6511A2, MIR6511A3, MIR6511A4, MIR6511B1, MIR6511B2, MIR6512, MIR6513, MIR6514, MIR6515, MIR6516, MIR652, MIR653, MIR654, MIR655, MIR656, MIR657, MIR658, MIR659, MIR660, MIR661, MIR662, MIR663A, MIR663AHG, MIR663B, MIR664A, MIR664B, MIR665, MIR668, MIR670, MIR671, MIR6715A, MIR6715B, MIR6716, MIR6717, MIR6718, MIR6719, MIR6720, MIR6721, MIR6722, MIR6723, MIR6724-1, MIR6724-2, MIR6724-3, MIR6724-4, MIR6726, MIR6727, MIR6728, MIR6729, MIR6730, MIR6731, MIR6732, MIR6733, MIR6734, MIR6735, MIR6736, MIR6737, MIR6738, MIR6739, MIR6740, MIR6741, MIR6742, MIR6743, MIR6744, MIR6745, MIR746, MIR6747, MIR6748, MIR6749, MIR675, MIR6750, MIR6751, MIR752, MIR6753, MIR6754, MIR6755, MIR6756, MIR6757, MIR6758, MIR6759, MIR676, MIR6760, MIR6761, MIR6762, MIR6763, MIR6765, MIR6766, MIR6767, MIR6768, MIR6769A, MIR6769B, MIR6770-1, MIR6770-2, MIR6770-3, MIR6771, MIR6772, MIR6773, MIR6774, MIR6775, MIR6776, MIR6777, MIR6778, MIR6779, MIR6780A, MIR6780B, MIR6781, MIR6782, MIR6783, MIR6784, MIR6785, MIR6786, MIR6787, MIR6788, MIR6789, MIR6790, MIR6791, MIR6792, MIR6793, MIR6794, MIR6795, MIR6796, MIR6797, MIR6798, MIR6799, MIR6800, MIR6801, MIR6802, MIR6803, MIR6804, MIR6805, MIR6806, MIR6807, MIR6808, MIR6809, MIR6810, MIR6811, MIR6812, MIR6813, MIR6814, MIR6815, MIR6816, MIR6817, MIR6818, MIR6819, MIR6820, MIR6821, MIR6822, MIR6823, MIR6824, MIR6825, MIR6826, MIR6827, MIR6828, MIR6829, MIR6830, MIR6831, MIR6832, MIR6833, MIR6834, MIR6835, MIR6836, MIR6837, MIR6838, MIR6839, MIR6840, MIR6841, MIR6842, MIR6843, MIR6844, MIR6845, MIR6846, MIR6847, MIR6848, MIR6849, MIR6850, MIR6851, MIR6852, MIR6853, MIR6854, MIR6855, MIR6856, MIR6857, MIR6858, MIR6859-1, MIR6859-2, MIR6859-3, MIR6859-4, MIR6860, MIR6861, MIR6862-1, MIR6862-2, MIR6863, MIR6864, MIR6865, MIR6866, MIR6867, MIR6868, MIR6869, MIR6870, MIR6871, MIR6872, MIR6873, MIR6874, MIR6875, MIR6876, MIR6877, MIR6878, MIR6879, MIR6880, MIR6881, MIR6882, MIR6883, MIR6884, MIR6885, MIR6886, MIR6887, MIR6888, MIR6889, MIR6890, MIR6891, MIR6892, MIR6893, MIR6894, MIR6895, MIR708, MIR7-1, MIR7106, MIR7107, MIR7108, MIR7109, MIR711, MIR7110, MIR7111, MIR7112, MIR7113, MIR7114, MIR7150, MIR7151, MIR7152, MIR7153, MIR7154, MIR7155, MIR7156, MIR7157, MIR7158, MIR7159, MIR7160, MIR7161, MIR7162, MIR718, MIR7-2, MIR7-3, MIR7-3HG, MIR744, MIR7515, MIR7515HG, MIR758, MIR759, MIR760, MIR761, MIR762, MIR762HG, MIR764, MIR7641-1, MIR7641-2, MIR765, MIR766, MIR767, MIR769, MIR770, MIR7702, MIR7703, MIR7704, MIR7705, MIR7706, MIR7843, MIR7844, MIR7845, MIR7846, MIR7847, MIR7848, MIR7849, MIR7850, MIR7851, MIR7852, MIR7853, MIR7854, MIR7855, MIR7856, MIR7973-1, MIR7973-2, MIR7974, MIR7975, MIR7976, MIR7977, MIR7978, MIR802, MIR8052, MIR8053, MIR8054, MIR8055, MIR8056, MIR8057, MIR8058, MIR8059, MIR8060, MIR8061, MIR8062, MIR8063, MIR8064, MIR8065, MIR8066, MIR8067, MIR8068, MIR8069-1, MIR8069-2, MIR8070, MIR8071-1, MIR8071-2, MI8072, MIR8073, MIR8074, MIR8075, MIR8076, MIR8077, MIR8078, MIR8079, MIR8080, MIR8081, MIR8082, MIR8083, MIR8084, MIR8085, MIR8086, MIR8087, MIR8088, MIR8089, MIR873, MIR874, MIR875, MIR876, MIR877, MIR885, MIR887, MIR888, MIR889, MIR890, MIR891A, MIR891B, MIR892A, MIR892B, MIR892C, MIR9-1, MIR9-2 MIR920, MIR921, MIR922, MIR924, MIR92A1, MIR92A2, MIR92B, MIR93, MIR9-3, MIR933, MIR934, MIR935, MIR936, MIR937, MIR938, MIR939, MIR940, MIR941-1 MIR941-2, MIR941-3, MIR941-4, MIR941-5, MIR942, MIR943, MIR944, MIR95, MIR9500, MIR96, MIR98, MIR99A, MIR99AHG, MIR99B, MIRLET7A1, MIRLET7A2, MIRLET7A3, MIRLET7B, MIRLET7BHG, MIRLET7C, MIRLET7D, MIRLET7DHG, MIRLET7E, MIRLET7F1, MIRLET7F2, MIRLET7G, MIRLET7I, MIS12, MIS18A, MIS18BP1, MISP, MITD1, MITF, MIXL1, MKI67, MKKS, MKL1, MKL2, MKLN1, MKLN1-AS, MKNK1, MKNK1-AS1, MKNK2, MKRN1, MKRN2, MKRN2OS, MKRN3, MKRN7P, MKRN9P, MKS1, MKX, MKX-AS1, MLANA, MLC1, MLEC, MLF1, MLF2, MLH1, MLH3, MLIP, MLIP-IT1, MLK7-AS1, MTKL, MLLT1, MLLT10, MLLT10P1, MLLT11, MLLT3, MLLT4, MLLT4-AS1, MLLT6, MLN, MLNR, MLPH, MLST8, MLX, MLXIP, MLXIPL, MILYCD, MMAA, MMAB, MMACHC, MMADHC, MMD, MNID2, MME, MMEL1, MMGT1, MMP1, MMP10, MMP11, MMP12, MMP13, MMP14, MMP15, MMP16, MMP17, MMP19, MMP2, MMP20, MMP21, MMP23A, MMP23B, MMP24, MMP24-AS1, MMP25, MMP25-AS1, MMP26, MMP27, MMP28, MMP3, MMP7, MMP8, MMP9, MMRN1, MMRN2, MMS19, MMS22L, MN1, MNAT1, MND1, MNDA, MNS1, MNT, MNX1, MNX1-AS1, MOAP1, MOB1A, MOB1B, MOB2, MOB3A, MOB3B, MOB3C, MOB4, MOBP, MOCOS, MOCS1, MOCS2, MOCS3, MOG, MOGAT1, MOGAT2, MOGAT3, MOGS, MOK, MON1A, MON1B, MON2, MORC1, MORC2, MORC2-AS1, MORC3, MORC4, MORF4L1, MORF4L2, MORF4L2-AS1, MORN1, MORN2, MORN3, MORN4, MORN5, MOS, MOSPD1, MOSPD2, MOSPD3, MOV10, MOV10L1, MOXD1, MOXD2P, MPC1, MPC1L, MPC2, MPDU1, MPDZ, WPEG1, MPG, MPHOSPH10, MPHOSPH6, MPHOSPH8, MPHOSPE9, MPI, MPL, MPLKIP, MPND, MPO, MPP1, MPP2, MPP3, MPP4, MPP5, MPP6, MPP7, MPPE1, MPPED1, MPPED2, MPRIP, MPST, MPV17, MPV17L, MPV17L2, MPZ, MPZL1, MPZL2, MPZL3, MR1, MRAP, MRAP2, MRAS, MRC1, MRC2, MRE11A, MREG, MRFAP1, MRFAP1L1, MRGBP, MRGPRD, MRGPRE, MRGPRF, MRGPRF-AS1, MRGPRG, MRGPRG-AS1, MRGPRX1, MRGPRX2, MRGPRX3, MRGPRX4, MR11, MRM1, MRO, MROH1, MROH2A, MROH2B, MROH5, MROH6, MROH7, MROH7-TTC4, MROH8, MROH9, MRPL1, MRPL10, MRPL11, MRPL12, MRPL13, MRPL14, MRPL15, MRPL16, MRPL17, MRPL18, MRPL19, MRPL2, MRPL20, MRPL21, MRPL22, MRPL23, MRPL23-AS1, MRPL24, MRPL27, MRPL28, MRPL3, MRPL30, MRPL32, MRPL33, MRPL34, MRPL35, MRPL36, MRPL37, MRPL38, MRPL39, MRPL4, MRPL40, MRPL41, MRPL42, MRPL42P5, MRPL43, MRPL44, MRPL45, MRPL45P2, MRPL46, MRPL47, MRPL48, MRPL49, MRPL50, MRPL51, MRPL52, MRPL53, MRPL54, MRPL55, MRPL57, MRPL9, MRPS10, MRPS11, MRPS12, MRPS14, MRPS15, MRPS16, MRPS17, MRPS18A, MRPS18B, MRPS18C, MRPS2, MRPS21, MRPS22, MRPS23, MRPS24, MRPS25, MRPS26, MRPS27, MRPS28, MRPS30, MRPS31, MRPS31P5, MRPS33, MRPS34, MRPS35, MRPS36, MRPS5, MRPS6, MRPS7, MRPS9, MRRF, MRS2, MRS2P2, MRTO4, MRVI1, MRVI1-AS1, MS4A1, MS4A10, MS4A12, MS4AI3, MS4A14, MS4A15, MS4A2, MS4A3, MS4A4A, MS4A5, MS4A6A, MS4A6E, MS4A7, MS4A8, MSANTD1, MSANTD2, MSANTD3, MSANTD3-TMEFF1, MSANTD4, MSC, MSGN1, MSH2, MSH3, MSH4, MSH5, MSH5-SAPCD1, MSH6, MSI1, MSI2, MSL1, MSL2, MSL3, MSL3P1, MSLN, MSMB, MSMO1, MSMP, MSN, MSR1, MSRA, MSRB1, MSRB2, MSRB3, MSS51, MST1, MST1L, MST1P2, MST1R, MSTN, MSTO1, MSTO2P, MSX1, MSX2, MSX2P1, MT1A, MT1B, MT1DP, MT1E, MT1F, MT1G, MT1H, MT1HL1, MT1IP, MT1JP, MT1L, MT1M, MT1X, MT2A, MT3, MT4, MTA1, MTA2, MTA3, MTAP, MTBP, MTCH1, MTCH2, MTCL1, MTCP1, MTDH, MTERF1, MTERF2, MTERF3, MTERF4, MTF1, MTF2, MTFMT, MTFP1, MTFR1, MTFR1L, MTFR2, MTG1, MTG2, MTHFD1, MTHFD1L, MTHFD2, MTHFD2L, MTHFD2P1, MTHFR, MTHFS, MTHFSD, MTIF2, MTIF3, MTL5, MTM1, MTMR1, MTMR10, MTMR11, MTMR12, MTMR14, MTMR2, MTMR3, MTMR4, MTMR6, MTMR7, MTMR8, MTMR9, MTMR9LP, MTNR1A, MTNR1B, MTO1, MTOR, MTOR-AS1, MTPAP, MTPN, MTR, MTRF1, MTRF1L, MTRNR2L1, MTRNR2L10, MTRNR2L2, MTRNR2L3, MTRNR2L4, MTRNR2L5, MTRNR2L6, MTRNR2L7, MTRNR2L8, MTRNR2L9, MTRR, MTSS1, MTSS1L, MTTP, MTURN, MTUS1, MTUS2, MTUS2-AS1, MTVR2, MTX1, MTX2, MTX3, MUC1, MUC12, MUC13, MUC15, MUC16, MUC17, MUC19, MUC2, MUC20, MUC21, MUC22, MUC3A, MUC4, MUC5B, MUC6, MUC7, MUCL1, MUL1, MUM1, MUM1L1, MURC, MUS8, MUSK, MUSTN1, MUT, MUTYH, MVB12A, MVB12B, MVD, MVK, MVP, MX1, MX2, MXD1, MXD3, MXD4, MXI1, MXRA5, MXRA7, MXRA8, MYADM, MYADML, MYADML2, MYB, MYBBP1A, MYBL1, MYBL2, MYBPC1, MYBPC2, MYBPC3, MYBPH, MYBPHL, MYC, MYCBP, MYCBP2, MYCBP2-AS1, MYCBPAP, MYCL, MYCN, MYCNOS, MYCNUT, MYCT1, MYD88, MYEF2, MYEOV, MYEOV2, MYF5, MYF6, MYH1, MYH10, MYH11, MYH13, MYH14, MYH15, MYH16, MYH2, MYH3, MYH4, MYH6, MYH7, MYH7B, MYH8, MYH9, MYHAS, MYL1, MYL10, MYL12A, MYL12B, MYL2, MYL3, MYL4, MYL5, MYL6, MYL1B, MYL7, MYL9, MYLIP, MYLK, MYLK2, MYLK3, MYLK4, MYLK-AS1, MYLK-AS2, MYLPF, MYNN, MYO10, MYO15A, MYO15B, MYO16, MYO16-AS1, MYO18A, MYO18B, MYO19, MYO1A, MYO1B, MYO1C, MYO1D, MYO1E, MYO1F, MYO1G, MYO1H, MYO3A, MYO3B, MYO5A, MYO5B, MYO5C, MYO6, MYO7A, MYO7B, MYO9A, MYO9B, MYOC, MYOCD, MYOD1, MYOF, MYOG, MYOM1, MYOM2, MYOM3, MYOT, MYOZ1, MYOZ2, MYOZ3, MYPN, MYPOP, MYRF, MYRIP, MYSM1, MYT1, MYT1L, MYT1L-AS1, MYZAP, MZB1, MZF1, MZF1-AS1, MZT1, MZT2A, MZT2B, N4BP1, N4BP2, N4BP2L1, N4BP2L2, N4BP2L2-IT2, N4BP3, N6AMT1, N6AMT2, NAA10, NAA11, NAA15, NAA16, NAA20, NAA25, NAA30, NAA35, NAA38, NAA40, NAA50, NAA60, NAAA, NAALAD2, NAALADL1, NAALADL2, NAALADL2-AS1, NAALADL2-AS2, NAALADL2-AS3, NAB1, NAB2, NABP1, NABP2, NACA, NACA2, NACAD, NACAP1, NACC1, NACC2, NADK, NADK2, NADSYN1, NAE1, NAF1, NAGA, NAGK, NAGLU, NAGPA, NAGPA-AS1, NAGS, NAIF1, NAIP, NALCN, NALCN-AS1, NAMA, NAMPT, NANOG, NANOGNB, NANOS1, NANOS2, NANOS3, NANP, NANS, NAP1L1, NAP1L2, NAP1L3, NAP1L4, NAP1L5, NAP1L6, NAPA, NAPA-AS1, NRPB, NAPEPLD, NAPG, NAPRT, NAPSA, NAPSB, NARF, NARFL, NARR, NARS, NARS2, NASP, NAT1, NAT10, NAT14, NAT16, NAT2, NAT6, NAT8, NAT8, NAT8L, NAT9, NATD1, NAV1, NAV2, NAV2-AS2, NAV2-AS4, NAV2-AS5, NAV3, NBAS, NBAT1, NBEA, NBEAL1, NBEAL2, NBEAP1, NBL1, NBN, NBPF1, NBPF10, NBPF11, NBPF12, NBPF13P, NBPF14, NBPF15, NBPF18P, NBPF20, NBPF22P, NBPF25P, NBPF3, NBPF4, NBPF6, NBPF7, NBPF8, NBPF9, NBR1, NBR2, NCALD, NCAM1, NCAM1-AS1, NCAM2, NCAN, NCAPD2, NCAPD3, NCAPG, NCAPG2, NCAPH, NCAPH2, NCBP1, NCBP2, NCBP2-AS2, NCCRP1, NCDN, NCEH1, NCF1, NCF1B, NCF1C, NCF2, NCF4, NCK1, NCK1-AS1, NCK2, NCKAP1, NCKAP1L, NCKAP5, NCKAP5L, NCKIPSD, NCL, NCLN, NCMAP, NCOA1, NCOA2, NCOA3, NCOA4, NCOA5, NCOA6, NCOA7, NCOA7-AS1, NCOR1, NCOR1P1, NCOR2, NCR3, NCR2, NCR3, NCR3LG1, NCRNA00250, NCRUPAR, NCS1, NCSTN, NDC1, NDC80, NDE1, NDEL1, NDF1P1, NDFIP2, NDFIP2-AS1, NDN, NDNF, NDNL2, NDOR1, NDP, NDRG1, NDRG2, NDRG3, NDRG4, NDST1, NDST2, NDST3, NDST4, NDUFA1, NDUFA10, NDUFA11, NDUFA12, NDUFA13, NDUFA2, NDUFA3, NDUFA4, NDUFA4L2, NDUFA5, NDUFA6, NDUFA6-AS1, NDUFA7, NDUFA8, NDUFA9, NDUFAB1, NDUFAF1, NDUFAF2, NDUFAF3, NDUFAF4, NDUFAF4P1, NDUFAF5, NDUFAF6, NDUFAF7, NDUFB1, NDUFB10, NDUFB11, NDUFB2, NDUFB2-AS1, NDUFB3, NDUFB4, NDUFB5, NDUFB6, NDUFB7, NDUTB8, NDUFB9, NDUFC1, NDUFC2, NDUFC2-KCTD14, NDUFS1, NDUFS2, NDUFS3, NDUFS4, NDUFS5, NDUFS6, NDUFS7, NDUFS8, NDUFV1, NDUFV2, NDUFV2-AS1, NDUFV3, NEAT1, NEB, NEBL, NEBL-AS1, NECAB1, NECAB2, NECAB3, NECAP1, NECAP2, NEDD1, NEDD4, NEDD4L, NEDD8, NEDD8-MDP1, NEDD9, NEFH, NEFL, NEFM, NEGR1, NEGR1-IT1, NEIL1, NEIL2, NEIL3, NEK1, NEK10, NEK11, NEK2, NEK3, NEK4, NEK5, NEK6, NEK7, NEK8, NEK9, NELFA, NELFB, NELFCD, NELFE, NELL1, NELL2, NEMF, NENF, NEO1, NES, NET1, NETO1, NETO2, NEU1, NEU2, NEU3, NEU4, NEURL1, NEURL1-AS1, NEURL1B, NEURL2, NEURL3, NEURL4, NEUROD1, NEUROD2, NEUROD4, NEUROD6, NEUROG1, NEUROG2, NEUROG3, NEXN, NEXN-AS1, NF1, NF1P2, NF2, NFAM1, NFASC, NFAT5, NFATC1, NFATC2, NFATC2IP, NFATC3, NFATC4, NFE2, NFE2L1, NFE2L2, NFE2L3, NFE4, NFIA, NFIA-AS1, NFIA-AS2, NFIB, NFIC, NFIL3, NFIX, NFKB1, NFKB2, NFKBIA, NFKBIB, NFKBID, NFKBIE, NFKBIL1, NFKBIZ, NFRKB, NFS1, NFU1, NFX1, NFXL1, NFYA, NFYB, NFYC, NFYC-AS1, NGB, NGDN, NGEF, NGF, NGFR, NGFRAP1, NGLY1, NGRN, NHEG1, NHEJ1, NHLH1, NHLH2, NHLRC1, NHLRC2, NHLRC3, NHLRC4, NHP2, NHP2L1, NHS, NHS-AS1, NHSL1, NHSL2, NICN1, NID1, NID2, NIF3L1, NIFK, NIFK-AS1, NIM1K, NIN, NINJ1, NINJ2, NINL, NIP7, NIPA1, NIPA2, NIPAL1, NIPAL2, NIPAL3, NIPAL4, NIPBL, NIPBL-AS1, NIPSNAP1, NIPSNAP3A, NIPSNAP3B, NISCH, NIT1, NIT2, NKAIN1, NKAIN2, NKAIN3, NKAIN4, NKAP, NKAPL, NKAPP1, NKD1, NKD2, NKG7, NKIRAS1, NKIRAS2, NKPD1, NKRF, NKTR, NKX1-1, NKX1-2, NKX2-1, NKX2-1-AS1, NKX2-2, NKX2-3, NKX2-4, NKX2-5, NKX2-6, NKX2-8, NKX3-1, NKX3-2, NKX6-1, NKX6-2, NKX6-3, NLE1, NLGN1, NLGN1-AS1, NLGN2, NLGN3, NLGN4X, NLGN4Y, NLGN4Y-AS1, NLK, NLN, NLRC3, NLRC4, NLRC5, NLRP1, NLRP1, NLRP10 , NLRP11, NLRP12, NLRP13, NLRP14, NLRP2, NLRP3, NLRP4, NLRP5, NLRP6, NLR7, NLRP8, NLRP9, NLRX1, NMB, NMBR, NMD3, NME1, NME1-NME2, NME2, NME3, NME4, NME5, NME6, NME7, NME8, NME9, NMI, NMNAT1, NMNAT2, NMNAT3, NMRAL1, NMRK1, NMRK2, NMS, NMT1, NMT2, NMU, NMUR1, NMUR2, NNAT, NNmT, NNT, NNT-AS1, NOA1, NOB1, NOBOX, NOC2L, NOC3L, NOC4L, NOD1, NOD2, NODAL, NOG, NOL10, NOL11, NOL12, NOL3, NOL4, NOL4L, NOL6, NOL7, NOL8, NOL9, NOLC1, NOM1, NOMO1, NOMO2, NOMO3, NONO, NOP10, NOP14, NOP14-AS1, NOP16, NOP2, NOP56, NOP58, NOP9, NOS1, NOSIAP, NOS2, NOS3, NOSIP, NOSTRIN, NOTCH1, NOTCH2, NOTCH2NL, NOTCH3, NOTCH4, NOTO, NOTUM, NOV, NOVA1, NOVA2, NOX1, NOX3, NOX4, NOX5, NOXA1, NOXO1, NOXRED1, NPAP1, NPAS1, NPAS2, NPAS3, NPAS4, NPAT, NPB, NPBWR1, NPBWR2, NPC1, NPC1L1, NPC2, NPDC1, NPEPL1, NPEPPS, NPFF, NPFFR1, NPFFR2, NPHP1, NPHP3, NPHP3-ACAD11, NPHP3-AS1, NPHP4, NPHS1, NPHS2, NPIPA1, NPIPA2, NPIPA3, NPIPA5, NPIPA7, NPIPA8, NPIPB3, NPIPB5, NPIP6, NPIPB9, NPL, NPLOC4, NPM1, NPM2, NPM3, NPNT, NPPA, NPPA-AS1, NPPB, NPPC, NPR1, NPR2, NPR3, NPRL2, NPRL3, NPS, NPSR1, NPSR1-AS1, NPTN, NPTN-IT1, NPTX1, NPTX2, NPTXR, NPVF, NPW, NPY, NPY1R, NPY2R, NPY4R, NPY5R, NPY6R, NQO1, NQO2, NROB1, NR0B2, NR1D1, NR1D2, NR1H2, NR1H3, NR1H4, NR112, NR1I3, NR2C1, NR2C2, NR2C2AP, NR2E1, NR2E3, NR2F1, NR2F1-AS1, NR2F2, NR2F2-AS1, NR2F6, NR3C1, NR3 C2, NR4A1, NR4A2, NR4A3, NR5A1, NR5A2, NR6A1, NRADDP, NRAP, NRARP, NRAS, NRBF2, NRBP1, NRBP2, NRCAM, NRD1, NRDE2, NREP, NREP-AS1, NRF1, NRG1, NRG1-IT1, NRG1-IT3, NRG2, NRG3, NRG3-AS1, NRG4, NRGN, NRIP1, NRIP2, NRIP3, NRIR, NRK, NRL, NRM, NRN1, NRN1L, NRON, NRP1, NRP2, NRROS, NRSN1, NRSN2, NRSN2-AS1, NRTN, NRXN1, NRXN2, NRXN3, NSA2, NSD1, NSDHL, NSF, NSFL1C, NSFP1, NSG1, NSL1, NSMAF, NSMCE1, NSMCE2, NSMCE4A, NSMF, NSRP1, NSUN2, NSUN3, NSUN4, NSUN5, NSUN5P1, NSUN5P2, NSUN6, NSUN7, NT5C, NT5C1A, NT5C1B, NT5C1B-RDH14, NT5C2, NT5C3A, NT5C3B, NT5DC1, NT5DC2, NT5DC3, NT5E, NT5M, NTAN1, NTF3, NTF4, NTHL1, NTM, NTM-1T, NTMT1, NTN1, NTN3, NTN4, NTN5, NTNG1, NTNG2, NTPCR, NTRK1, NTRK2, NTRK3, NTRK3-AS1, NTS, NTSR1, NTSR2, NUAK1, NUAK2, NUB1, NUBP1, NUBP2, NUBPL, NUCB1, NUCB1-AS1, NUCB2, NUCKS1, NUDC, NUDCD1, NUDCD2, NUDCD3, NUDT1, NUDT10, NUDT11, NUDT12, NUDT13, NUDT14, NUDT15, NUDT16, NUDT16L1, NUDT16P1, NUDT17, NUDT18, NUDT19, NUDT2, NUDT21, NUDT22, NUDT3, NUDT4, NUDT4P1, NUDT4P2, NUDT5, NUDT6, NUDT7, NUDT8, NUDT9, NUDT9P1, NUF2, NUFIP1, NUFIP2, NUGGC, NUMA1, NUMB, NUMBL, NUP107, NUP133, NUP153, NUP155, NUP160, NUP188, NUP205, NUP210, NUP210L, NUP210P1, NUP214, NUP35, NUP37, NUP43, NUP50, NUP50-AS1, NUP54, NUP62, NUP62CL, NUP85, NUP88, NUP93, NUP98, NUPL1, NUPL2, NUPR1, NUPR1L, NUS1, NUSAP1, NUTM1, NUTM2A, NUTM2A-AS1, NUTM2B, NUTM2B-AS1, NUTM2D, NUTM2F, NUTM2G, NVL, NWD1, NWD2, NXF1, NXF2, NXF2B, NXF3, NXF4, NXF5, NXN, NXNL1, NXNL2, NXPE1, NXPE2, NXPE3, NXPE4, NXPH1, NXPH2, NXPH3, NXPH4, NXT1, NXT2, NYAP1, NYAP2, NYNR1N, NYX, OACYLP, OAF, OARD1, OAS1, OAS2, OAS3, OASL, OAT, OAZ1, OAZ2, OAZ3, OBFC1, OBP2A, OBP2B, OBSCN, OBSL1, OC90, OCA2, OCEL1, OCIAD1, OCIAD2, OCLM, OCLN, OCM, OCM2, OCRL, OCSTAMP, ODAM, ODC1, ODF1, ODF2, ODF2L, ODF3, ODF3B, ODF3L1, ODF3L2, ODF4, OFD1, OGDH, OGDHL, OGFOD1, OGFOD2, OGFOD3, OGFR, OGFR-AS1, OGFRL1, OGFRP1, OGG1, OGN, OGT, OIP5, OIP5-AS1, OIT3, OLA1, OLAH, OLFM1, OLFM2, OLFM3, OLFM4, OLFML1, OLFML2A, OLFML2B, OLFML3, OLIG1, OLIG2, OLIG3, OLR1, OMA1, OMD, OMG, OMP, ONECUT1, ONECUT2, ONECUT3, OOEP, OOSP2, OPA1, OPA1-AS1, OPA3, OPALIN, OPCML, OPHN1, OPLAH, OPN1LW, OPN1MW, OPN1MW2, OPN1SW, OPN3, OPN4, OPN5, OPRD1, OPRK1, OPRL1, OPRM1, OPTC, OPTN, OR10A2, OR10A3, OR10A4, OR10A5, OR10A6, OR10A7, OR10AD1, OR10AG1, OR10C1, OR10G2, OR10G3, OR10G4, OR10G7, OR10G8, OR10G9, OR10H1, OR10H2, OR10H3, OR10H4, OR10H5, OR10J1, OR10J3, OR10J5, OR10K1, OR10K2, OR10P1, OR10Q1, OR10R2, OR10S1, OR10T2, OR10V1, OR10V2P, OR10W1, OR10X1, OR10Z1, OR11A1, OR11G2, OR11H1, OR11H12, OR11H2, OR11H4, OR11H6, OR11L1, OR12D2, OR12D3, OR13A1, OR13C2, OR13C3, OR13C4, OR13C5, OR13C8, OR13C9, OR13D1, OR13F1, OR13G1, OR13H1, OR13J1, OR14A16, OR14C36, OR14I1, OR14J1, OR1A1, OR1A2, OR1B1, OR1C1, OR1D2, OR1D4, OR1D5, OR1E1, OR1E2, OR1F1, OR1F2P, OR1G1, OR1I1, OR1J1, OR1J2, OR1J4, OR1K1, OR1L1, OR1L3, OR1L4, OR1L6, OR1L8, OR1M1, OR1N1, OR1N2, OR1Q1, OR1S1, OR1S2, OR2A1, OR2A12, OR2A14, OR2A1-AS1, OR2A2, OR2A20P, OR2A25, OR2A4, OR2A42, OR2A5, OR2A7, OR2A9P, OR2AE1, OR2AG1, OR2AG2, OR2AK2, OR2AP1, OR2AT4, OR2B11, OR2B2, OR2B3, OR2B6, OR2C1, OR2C3, OR2D2, OR2D3, OR2F1, OR2F2, OR2G2, OR2G3, OR2G6, OR2H1, OR2H2, OR2J2, OR2J3, OR2K2, OR2L13, OR2L1P, OR2L2, OR2E, OR2L5, OR2L8, OR2M1P, OR2M2, OR2M3, OR2M4, OR2M5, OR2M7, OR2S2, OR2T11, OR2T10, OR2T11, OR2T12, OR2T2, OR2T27, OR2T29, OR2T3, OR2T33, OR2T34, OR2T35, OR2T4, OR2T5, OR2T6, OR2T8, OR2V1, OR2V2, OR2W1, OR2W3, OR2W5, OR2Y1, OR2Z1, OR3 A1, OR3 A2, OR3 A3, OR3A4P, OR4A15, OR4A16, OR4A47, OR4A5, OR4B1, OR4C11, OR4C12, OR4C13, OR4C15, OR4C16, OR4C3, OR4C45, OR4C46, OR4C6, OR4D1, OR4D10, OR4D11, OR4D2, OR4D5, OR4D6, OR4D9, OR4E2, OR4F13P, OR4F15, OR4F16, OR4F17, OR4F21, OR4F29, OR4F3, OR4F4, OR4F5, OR4F6, OR4K1, OR4K13, OR4K14, OR4K15, OR4K17, OR4K2, OR4K5, OR4L1, OR4M1, OR4M2, OR4N2, OR4N3P, OR4N4, OR4N5, OR4P4, OR4Q3, OR4S1, OR4S2, OR4X1, OR4X2, OR51A2, OR51A4, OR51A7, OR51B2, OR51B4, OR51B5, OR51B6, OR51D1, OR51E1, OR51E2, OR51F1, OR51F2, OR51G1, OR51G2, OR51I1, OR51I2, OR51L1, OR51M1, OR51Q1, OR51S1, OR51T1, OR51V1, OR52A1, OR52A5, OR52B2, OR52B4, OR52B6, OR52D1, OR52E2, OR52E4, OR52E6, OR52E8, OR52H1, OR52I1, OR52I2, OR52J3, OR52K1, OR52K2, OR52L1, OR52M1, OR52N1, OR52N2, OR52N4, OR52N5, OR52R1, OR52W1, OR56A1, OR56A3, OR56A4, OR56A5, OR56B1, OR56B4, OR5A1, OR5A2, OR5AC2, OR5AK2, OR5AK4P, OR5AN1, OR5AP2, OR5AR1, OR5AS1, OR5AU1, OR5B12, OR5B17, OR5B2, OR5B21, OR5B3, OR5C1, OR5D13, OR5D14, OR5D16, OR5D18, OR5E1P, OR5F1, OR5H1, OR5H14, OR5H15, OR5H2, OR5H6, OR5I1, OR5J2, OR5K1, OR5K2, OR5K3, OR5K4, OR5L1, OR5L2, OR5M1, OR5M10, OR5M11, OR5M3, OR5M8, OR5M9, OR5P2, OR5P3, OR5R1, OR5T1, OR5T2, OR5T3, OR5V1, OR5W2, OR6A2, OR6B1, OR6B2, OR6B3, OR6C1, OR6C2, OR6C3, OR6C4, OR6C6, OR6C65, OR6C68, OR6C70, OR6C74, OR6C75, OR6C76, OR6F1, OR6K2, OR6K3, OR6K6, OR6M1, OR6N1, OR6N2, OR6P1, OR6Q1, OR6S1, OR6T1, OR6V1, OR6W1P, OR6X1, OR6Y1, OR7A10, OR7A17, OR7A5, OR7C1, OR7C2, ORSB7D2, OR7D4, OR7E12P, OR7E14P, OR7E156P, OR7E24, OR7E2P, OR7E37P, OR7E47P, OR7E5P, OR7E91P, OR7G1, OR7G2, OR7G3, OR8A1, OR8B12, OR8B2, OR8B3, OR8B4, OR8B8, OR8D1, OR8D2, OR8D4, OR8G1, OR8G2, OR8G5, OR8H1, OR8H2, OR8H3, OR8I2, OR8J1, OR8J3, OR8K1, OR8K3, OR8K5, OR8S1, OR8U1, OR8U8, OR9A2, OR9A4, OR9G1, OR9G4, OR9G9, OR9I1, OR9K2, OR9Q1, OR9Q2, ORAI1, ORAI2, ORAI3, ORAOV1, ORC1, ORC2, ORC3, ORC4, ORC5, ORC6, ORM1, ORM2, ORMDL1, ORMDL2, ORMDL3, OS9, OSBP, OSBP2, OSBPL10, OSBPL10-AS1, OSBPL11, OSBPL1A, OSBPL2, OSBPL3, OSBPL5, OSBPL6, OSBPL7, OSBPL8, OSBPL9, OSCAR, OSCP1, OSER1, OSER1-AS1, OSGEP, OSGEPL1, OSGEPL1-AS1, OSGIN1, OSGIN2, OSM, OSMR, OSMR-AS1, OSR1, OSR2, OST4, OSTC, OSTCP1, OSTF1, OSTM1, OSTN, OTC, OTOA, OTOF, OTOG, OTOGL, OTOL1, OTOP1, OTOP2, OTOP3, OTOR, OTOS, OTP, OTUB1, OTUB2, OTUD1, OTUD3, OTUD4, OTUD5, OTUD6A, OTUD6B, OTUD6B-AS1, OTUD7A, OTUD7B, OTULIN, OTX1, OTX2, OTX2-AS1, OVAAL, OVCA2, OVCH1, OVCH1-AS1, OVCH2, OVGP1, OVOL1, OVOL1-AS1, OVOL2, OVOL3, OXA1L, OXCT1, OXCT1-AS1, OXCT2, OXER1, OXGR1, OXLD1, OXNAD1, OXR1, OXSM, OXSR1, OXT, OXTR, P2RX1, P2RX2, P2RX3, P2RX4, P2RX5, P2RX5-TAX1BP3, P2RX6, P2RX6P, P2RX7, P2RY1, P2RY10, P2RY11, P2RY12, P2RY13, P2RY14, P2RY2, P2RY4, P2RY6, P2RY8, P4HA1, P4HA2, P4HA2-AS1, P4HA3, P4HB, P4HTM, PA2G4, PA2G4P4, PAAF1, PABPC1, PABPC1L, PABPC1L2A, PABPC1L2B, PABPC1L2B-AS1, PABPC1P2, PABPC3, PABPC4, PABPC4L, PABPC5, PABPC5-AS1, PABPN1, PABPN1L, PACERR, PACRG, PACRG-AS1, PACRGL, PACS1, PACS2, PACSIN1, PACSIN2, PACSIN3, PADI1, PADI2, PADI3, PADI4, PADI6, PAEP, PAF1, PAFAH1B1, PAFAH1B2, PAFAH1B3, PAFAH2, PAG1, PAGE1, PAGE2, PAGE2B, PAGE3, PAGE4, PAGE5, PAGR1, PAH, PAICS, PAIP1, PAIP2, PAIP2B, PAK1, PAK1IP1, PAK2, PAK3, PAK4, PAK6, PAK7, PALB2, PALD1, PALLD, PALM, PALM2, PALM2-AKAP2, PALM3, PALMD, PAM, PAM16, PAMR1, PAN2, PAN3, PAN3-AS1, PANDAR, RANK1, PANK2, PANK3, PANK4, PANO1, PANX1, PANX2, PANX3, PAOX, PAPD4, PAPD5, PAPD7, PAPL, PAPLN, PAPOLA, PAPOLB, PAPOLG, PAPPA, PAPPA2, PAPPA-AS1, PAPSS1, PAPSS2, PAQR3, PAQR4, PAQR5, PAQR6, PAQR7, PAQR8, PAQR9, PAQR9-AS1, PARD3, PARD3-AS1, PARD3B, PARD6A, PARD6B, PARD6G, PARD6G-AS1, PARG, PARGP1, PARK2, PARK7, PARL, PARM1, PARN, PARP1, PARP10, PARP11, PARP12, PARP14, PARP15, PARP16, PARP2, PARP3, PARP4, PARP6, PARP8, PARP9, PARPBP, PARS2, PART1, PARVA, PARVB, PARVG, PASD1, PASK, PATE1, PATE2, PATE3, PATE4, PATL1, PATL2, PATZ1, PAUPAR, PAWR, PAX1, PAX2, PAX3, PAX4, PAX5, PAX6, PAX7, PAX8, PAX8-AS1, PAX9, PAXBP1, PAXBP1-AS1, PAX1P1, PAXIP1-AS1, PAXIP1-AS2, PBDC1, PBK, PBLD, PBOV1, PBRM1, PBX1, PBX2, PBX3, PBX4, PBXIP1, PC, PCA3, PCAT1, PCAT14, PCAT18, PCAT19, PCAT2, PCAT29, PCAT4, PCAT6, PCAT7, PCBD1, PCBD2, PCBP1, PCBP1-AS1, PCBP2, PCBP2-OT1, PCBP3, PCBP4, PCCA, PCCA-AS1, PCCB, PCDH1, PCDH10, PCDH11X, PCDH12, PCDH15, PCDH17, PCDH18, PCDH19, PCDH20, PCDH7, PCDH8, PCDH9, PCDH9-AS2, PCDH9-AS3, PCDH9-AS4, PCDHA1, PCDHA10, PCDHA11, PCDHA12, PCDHA13, PCDHA2, PCDHA3, PCDHA4, PCDHA5, PCDHA6, PCDHA7, PCDHA8, PCDHA9, PCDHAC1, PCDHAC2, PCDHB1, PCDHB10, PCDHB11, PCDHB12, PCDHB13, PCDHB14, PCDHB15, PCDHB16, PCDHB17, PCDHB18, PCDHB19P, PCDHB2, PCDHB3, PCDHB4, PDHB5, PCDHB6, PCDHB7, PCDHB8, PCDHB9, PCDHGA1, PCDHGA10, PCDHGA11, PCDHGA12, PCDHGA2, PCDHGA3, PCDHGA4, PCDHGA5, PCDHGA6, PCDHGA7, PCDHGA8, PCDHGA9, PCDHGB1, PCDHGB2, PCDHGB3, PCDHGB4, PCDHGB5, PCDHGB6, PCDHGB7, PCDHGB8P, PCDHGC3, PCDHGC4, PCDHGC5, PCED1A, PCED1B, PCED1B-AS1, PCF11, PCGEM1, PCGF1, PCGF2, PCGF3, PCGF5, PCGF6, PCID2, PCIF1, PCK1, PCK2, PCLO, PCM1, PCMT1, PCMTD1, PCMTD2, PCNA, PCNA-AS1, PCNAP1, PCNP, PCNT, PCNX, PCNXL2, PCNXL3, PCNXL4, PCOLCE, PCOLCE2, PCOLCE-AS1, PCP2, PCP4, PCP4L1, PCSK1, PCSK1N, PCSK2, PCSK4, PCSK5, PCSK6, PCSK7, PCSK9, PCTP, PCYOX1, PCYOX1L, PCYT1A, PCYT1B, PCYT1B-AS1, PCYT2, PDAP1, PDC, PDCD1, PDCD10, PDCD11, PDCD1LG2, PDCD2, PDCD2L, PDCD4, PDCD4-AS1, PDCD5, PDCD6, PDCD6IP, PDCD6IPP2, PDCD7, PDCL, PDCL2, PDCL3, PDCL3P4, PDDC1, PDE10A, PDE11A, PDE12, PDE1A, PDE1B, PDE1C, PDE2A, PDE3A, PDE3B, PDE4A, PDE4B, PDE4C, PDE4D, PDE4DIP, PDE5A, PDE6A, PDE6B, PDE6C, PDE6D, PDE7G, PDE6H, PDE7A, PDE7B, PDE8A, PDE8B, PDE9A, PDF, PDGFA, PDGFB, PDGFC, PDGFD, PDGFRA, PDGFRB, PDGFRL, PDHA1, PDHA2, PDHB, PDHX, PDIA2, PDIA3, PDIA5P1, PDIA4, PDIA5, PDIA6, PDIK1L, PDILT, PDK1, PDK2, PDK3, PDK4, PDLIM1, PDLIM2, PDLIM3, PDLIM4, PDLIM5, PDLIM7, PDP1, PDP2, PDPK1, PDPN, PDPR, PDRG1, PDS5A, PDS5B, PDSS1, PDSS2, PDX1, PDX1-AS1, PDXDC1, PDXDC2P, PDXK, PDXP, PDYN, PDZD11, PDZD2, PDZD3, PDZD4, PDZD5, PDZD7, PDZD8 PDZD9, PDZK1, PDZK1IP1, PDZK1P2, PDZRN3, PDZRN3-AS1, PDZRN4, PEA15, PEAK1, PEAR1, PEBP1, PEBP4, PECAM1, PECR, PEF1, PEG10, PEG3, PEG3-AS1, PELI1, PELI2, PELI3, PELO, PELP1, PEMT, PENK, PEPD, PER1, PER2, PER3, PER4, PERM1, PERP, PES1, PET100, PET117, PEX1, PEX10, PEX11A, PEX11B, PEX11G, PEX12, PEX13, PEX14, PEX16, PEX119, PEX2, PEX26, PEX3, PEX5, PEX5L, PEX6, PEX7, PF4, PF4V1, PFAS, PFDN1, PFDN2, PFDN4, PFDN5, PFDN6, PFKFB1, PFKFB2, PFKFB3, PFKFB4, PFKL, PFKM, PFKP, PFN1, PFN1P2, PFN2, PFN3, PFN4, PGA3, PGA4, PGA5, PGAM1, PGAM1P5, PGAM2, PGAM4, PGAM5, PGAP1, PGAP2, PGAP3, PGBD1, PGBD2, PGBD3, PGBD4, PGBD5, PGC, PGCP1, PGD, PGF, PGGT1B, PGK1, PGK2, PGLS, PGLYRP1, PGLYRP2, PGLYRP3, PGLYRP4, PGM1, PGM2, PGM2L1, PGM3, PGM5, PGM5-AS1, PGM5P2, PGM5P3-AS1, PGM5P4-AS1, PGP, PGPEP1, PGPEP1L, PGR, PGRMC1, PGRMC2, PGS1, PHACTR1, PHACTR2, PHACTR3, PHACTR4, PHAX, PHB, PHB2, PHC1, PHC2, PHC3, PHEX, PHEX-AS1, PHF1, PHF10, PHF11, PHF12, PHF13, PHF14, PHF19, PHF2, PHF20, PHF20L1, PHF21A, PHF21B, PHF23, PHF3, PHF5A, PHF6, PHF7, PHF8, PHGDH, PHGR1, PHIP, PHKA1, PHKA2, PHKA2-AS1, PHKB, PHKG1, PHKG2, PHLDA1, PHLDA2, PHLDA3, PHLDB1, PHLDB2, PHLDB3, PHLPP1, PHLPP2, PHOSPHO1, PHOSPHO2, PHOSPHO2-KLHL23, PHOX2A, PHOX2B, PHPT1, PHRF1, PHTF1, PHTF2, PHYH, PHYHD1, PHYHIP, PHYHIPL, PHYKPL, PI15, PI16, PI3, PI4K2A, PI4K2B, PI4KA, PI4KAP1, PI4KAP2, PI4KB, PIANP, PIAS1, PIAS2, PIAS3, PIAS4, PIBF1, PICALM, PICK1, PID1, PIDD1, PIEZO1, PIEZO2, PIFO, PIGA, PIGB, PIGC, PIGF, PIGG, PIGH, PIGK, PIGL, PIGM, PIGN, PIGO, PIGP, PIGQ, PIGR, PIGS, PIGT, PICU, PIGV, PIGW, PIGX, PIGY, PIGZ, PIH1D1, PIH1D2, PIH1D3, PIK3AP1, PIK3C2A, PIK3C2B, PIK3C2G, PIK3C3, PIK3CA, PIK3CB, PIK3CD, PIK3CD-AS1, PIK3CD-AS2, PIK3CG, PIK3IP1, PIK3IP1-AS1, PIK3R1, PIK3R2, PIK3R3, PIK3R4, PIK3R5, PIK3R6, PIKFYVE, PILRA, PILRB, PIM1, PIM2, PIM3, PIN1, PIN1P1, PIN4, PIN4P1, PINK1, PINK1-AS, PINLYP, PINX1, PIP, PIP4K2A, PIP4K2B, PIP4K2C, PIP5K1A, PIP5K1B, PIP5K1C, PIP5K1P I, PIP5KL1, PIPOX, PIPSL, PIR, PIR-FIGF, PIRT, PISD, PISRT1, PITHD1, PITPNA, PITPNA-AS1, PITPNB, PITPNC1, PITPNM1, PITPNM2, PITPNM3, PITRM:1, PITRM1-AS1, PITX1, PITX2, PITX3, PIWIL1, PIWIL2, PIWIL3, PIWIL4, PJA1, PJA2, PKD1, PKD1L1, PKDIL2, PKD1L3, PKD1P1, PKD1P6, PKD2, PKD2L1, PKD2L2, PKDCC, PKDREJ, PKHD1, PKHD1L1, PKI55, PKIA, PKIB, PKIG, PKLR, PKM, PKMYT1, PKN1, PKN2, PKN2-AS1, PKN3, PKNOX1, PKNOX2, PKNOX2-AS1, PKP1, PKP2, PKP3, PKP4, PLA1A, PLA2G10, PLA2G12A, PLA2G12B, PLA2G15, PLA2G16, PLA2G1B, PLA2G2A, PLA2G2C, PLA2G2D, PLA2G2E, PLA2G2F, PLA2G-3, PLA2G4A, PLA2G4B, PLA2G4C, PLA2G4D, PLA2G4E, PLA2G4E-AS1, PLA2G4F, PLA2G5, PLA2G6, PLA2G7, PLA2R1, PLAA, PLAC1, PLAC4, PLAC8, PLAC8L1, PLAC9, PLAG1, PLAGL1, PLAGL2, PLAT, PLAU, PLAUR, PLB1, PLBD1, PLBD1-AS1, PLBD2, PLCB1, PLCB2, PLCB3, PLCB4, PLCD1, PLCD3, PLCD4, PLCE1, PLCE1-AS1, PLCE1-AS2, PLCG1, PLCG1-AS1, PLCG2, PLCH1, PLCH2, PLCL1, PLCL2, PLCXD1, PLCXD2, PLCXD2-AS1, PLCXD3, PLCZ1, PLD1, PLD2, PLD3, PLD4, PLD5, PLD6, PLEC, PLEK, PLEK2, PLEKHA1, PLEKHA2, PLEKHA3, PLEKHA4, PLEKHA5, PLEKHA6, PLEKHA7, PLEKHA8, PLEKHA8P1, PLEKFHB1, PLEKHB2, PLEKHD1, PLEKHF1, PLEKHF2, PLEKHG1, PLEKHG2, PLEKHG3, PLEKHG4, PLEKHG4B, PLEKHG5, PLEKHG6, PLBKHG7, PLEKHH1, PLEKHH2, PLEKHH3, PLEKHJ1, PLEKHM1, PLEKHM1P, PLEKHM2, PLEKHM3, PLEKHN1, PLEKHO1, PLEKHO2, PLEKHS1, PLET1, PLG, PLGLA, PLGLB1, PLGLB2, PLGRKT, PLIN1, PLIN2, PLIN3, PLIN4, PLIN5, PLK1, PLK2, PLK3, PLK4, PLK5, PLLP, PLN, PLOD1, PLOD2, PLOD3, PLP1, PLP2, PLRG1, PLS1, PLS3, PL3-AS1, PLSCR1, PLSCR2, PLSCR3, PLSCR4, PLSCR5, PLTP, PLVAP, PLXDC1, PLXDC2, PLXNA1, PLXNA2, PLXNA3, PLXNA4, PLXNB1, PLXNB2, PLXNB3, PLXNC1, PLXND1, PM20D1, PM20D2, PMAIP1, PMCH, PMCHL1, PMCHL2, PMEL, PMEPA1, PMF1, PMF1-BGLAP, PMFBP1, PML, PMM1, PMM2, PMP2, PMP22, PMPCA, PMPCB, PMS1, PMS2, PMS2CL, PMS2L2, PMS2P1, PMS2P3, PMS2P4, PMS2P5, PMS2P9, PMVK, PNCK, PNISR, PNKD, PNKP, PNLDC1, PNLIP, PNLIPRP1, PNLIPRP2, PNLIPRP3, PNMA1, PNMA2, PNMA3, PNMA5, PNMA6A, PNMAL1, PNMAL2, PNMT, PNN, PNO1, PNOC, PNP, PNPLA1, PNPLA2, PNPLA3, PNPLA4, PNPLA5, PNPLA6, PNPLA7, PNPLA8, PNPO, PNPT1, PNRC1, PNRC2, POC1A, POC1B, POC1B-GALNT4, POC5, PODN, PODNL1, PODXL, PODXL2, POF1B, POFUT1, POFUT2, POGK, POGLUT1, POGZ, POLA1, POLA2, POLB, POLD1, POLD2, POLD3, POLD4, POLDIP2, POLDIP3, POLE, POLE2, POLE3, POLE4, POLG, POLG2, POLH, POLI, POLK, POLL, POLM, POLN, POLQ, POLR1A, POLR1B, POLR1C, POLR1D, POLR1E, POLR2A, POLR2B, POLR2C, POLR2D, POLR2E, POLR2F, POLR2G, POLR2H, POLR2I, POLR2J, POLR2J2, POLR2J3, POLR2J4, POLR2K, POLR2L, POLR2M, POLR3A, POLR3B, POLR3C, POLR3D, POLR3E, POLR3F, POLR3G, POLR3GL, POLR3H, POLR3K, POLRMT, POM121, POM121C, POM121L10P, POM121L12, POM121L1P, POM121L2, POM121L4P, POM121L8P, POM121L9P, POMC, POMGNT1, POMGNT2, POMK, POMP, POMT1, POMT2, POMZP3, PON1, PON2 PON3, POP1, POP4, POP5, POP7, POPDC2, POPDC3, POR, PORCN, POSTN, POT1, POT1-AS1, POTEA, POTEB, POTEB2, POTEB3, POTEC, POTED, POTEE, POTEF, POTEG, POTEH, POTEH-AS1, POTEI, POTEJ, POTEKP, POTEM, POU1F1, POU2AF1, POU2F1, POU2F2, POU2F3, POU3F1, POU3F2, POU3F3, POU3F4, POU4F1, POU4F2, POU4F3, POU5F1, POU5F1B, POU5F1P3, POU5F1P4, POU5F2, POU6F1, POU6F2, POU6F2-AS1, PP12613, PP14571, PP2D1, PP7080, PPA1, PPA2, PPAN, PPAN-P2RY11, PPAP2A, PPAP2B, PPAP2C, PPAPDC1A, PPAPDC1B, PPAPDC2, PPAPDC3, PPARA, PPARD, PPARG, PPARGC1A, PPARGC1B, PPAT, PPBP, PPBPP2, PPCDC, PPCS, PPDPF, PPEF1, PPEF1-AS1, PPEF2, PPFIA1, PPFIA2, PPFIA3, PPFIA4, PPFIBP1, PPFIBP2, PPHLN1, PPIA, PPIAL4B, PPIAL4C, PPIAL4D, PPIAL4E, PPIAL4F, PPIAL4G, PPIAP30, PPIB, PPIC, PPID, PPIE, PPIEL, PPIF, PPIG, PPIH, PPIL1, PPIL2, PPIL3, PPIL4, PPIL6, PPIP5K1, PPIP5K2, PPL, PPM1A, PPM1B, PPM1D, PPM1E, PPM1F, PPM1G, PPM1H, PPM1J, PPM1K, PPM1L, PPM1M, PPM1N, PPME1, PPOX, PPP1CA, PPP1CB, PPP1CC, PPP1R10, PPP1R11, PPP1R12A, PPP1R12B, PPP1R12C, PPP1R13B, PPP1R13L, PPP1R14A, PPP1R14B, PPP1R14C, PPP1R14D, PPP1R15A, PPP1R15B, PPP1R16A, PPP1R16B, PPP1R17, PPP1R18, PPP1R1A, PPP1R1B, PPP1R1C, PPP1R2, PPP1R21, PPP1R26, PPP1R26-AS1, PPP1R27, PPP1R2P3, PPP1R2P9, PPP1R32, PPP1R35, PPP1R36, PPP1R37, PPP1R3A, PPP1R3B, PPP1R3C, PPP1R3D, PPP1R3E, PPP1R3F, PPP1R3G, PPP1R42, PPP1R7, PPP1R8, PPP1R9A, PPP1R9B, PPP2CA, PPP2CB, PPP2R1A, PPP2R1B, PPP2R2A, PPP2R2B, PPP2R2B-IT1, PPP2R2C, PPP2R2D, PPP2R3A, PPP2R3B, PPP2R3C, PPP2R4, PPP2R5A, PPP2R5B, PPP2R5C, PPP2R5D, PPP2R5E, PPP3CA, PPP3CB, PPP3CC, PPP3R1, PPP3R2, PPP4C, PPP4R1, PPP4R1-AS1, PPP4R1L, PPP4R2, PPP4R4, PPP5C, PPP5D1, PPP6C, PPP6R1, PPP6R2, PPP6R3, PPRC1, PPT1, PPT2, PPT2-EGFL8, PPTC7, PPWD1, PPY, PPY2, PQBP1, PQLC1, PQLC2, PQLC2L, PQLC3, PRAC1, PRAC2, PRADC1, PRAF2, PRAM1, PRAME, PRAMEF1, PRAMEF10, PRAMEF11, PRAMEF12, PRAMEF14, PRAMEF15, PRAMEF16, PRAMEF17, PRAMEF19, PRAMEF2, PRAMEF20, PRAMEF22, PRAMEF4, PRAMEF5, PRAMEF6, PRAMEF7, PRAMEF8, PRAMEF9, PRAP1, PRB1, PRB2, PRB3, PRB4, PRC1, PRC1-AS1, PRCC, PRCD, PRCP, PRDM1, PRDM10, PRDM11, PRDM12, PRDM13, PRDM14, PRDM15, PRDM16, PRDM2, PRDM4, PRDM5, PRDM6, PRDM7, PRDM8, PRDM9, PRDX1, PRDX2, PRDX3, PRDX4, PRDX5, PRDX6, PREB, PRELID1, PRELID2, PRELP, PREP, PREPL, PREX1, PREX2, PRF1, PRG1, PRG2, PRG3, PRG4, PRH1, PRH1-PRR4, PRH2, PRICKLE1, PRICKLE2, PRICKLE2-AS1, PRICKLE2-AS2, PRICKLE2-AS3, PRICKLE3, PRICKLE4, PRIM1, PRIM2, PRIMA1, PRIMPOL, PRKAA1, PRKAA2, PRKAB1, PRKAB2, PRKACA, PRKACB, PRKACG, PRKAG1, PRKAG2, PRKAG2-AS1, PRKAG3, PRKAR1A, PRKAR1B, PRKAR2A, PRKAR2A-AS1, PRKAR2B, PRKCA, PRKCA-AS1, PRKCB, PRKCD, PRKCDBP, PRKCE, PRKCG, PRKCH, PRKCI, PRKCQ, PRKCQ-AS1, PRKCSH, PRKCZ, PRKD1, PRKD2, PRKD3, PRKDC, PRKG1, PRKG1-AS1, PRKG2, PRKRA, PRKRIP1, PRKRIR, PRKX, PRKX-AS1, PRKXP1, PRKY, PRL, PRLH, PRLHR, PRLR, PRM1, PRM2, PRM3, PRMT1, PRMT2, PRMT3, PRMT5, PRMT5-AS1, PRMT6, PRMT7, PRMT8, PRMT9, PRNCR1, PRND, PRNP, PRNT, PROB1, PROC, PROCA1, PROCR, PRODH, PRODH2, PROK1, PROK2, PROKR1, PROKR2, PROL1, PROM1, PROM2, PROP1, PRORSD1P, PROS1, PROSC, PROSER1, PROSER2, PROSER2-AS1, PROSER3, PROX1, PROX2, PROZ, PRPF18, PRPF19, PRPF3, PRPF31, PRPF38A, PRPF38B, PRPF39, PRPF4, PRPF40A, PRPF40B, PRPF4B, PRPF6, PRPF8, PRPH, PRPH2, PRPS1, PRPS1L1, PRPS2, PRPSAP1, PRPSAP2, PRR11, PRR12, PRR13, PRR14, PRR14L, PRR15, PRR15L, PRR16, PRR18, PRR19, PRR20A, PRR20B, PRR20C, PRR20D, PRR20E, PRR21, PRR22, PRR23A, PRR23B, PRR23C, PRR23D1, PRR23D2, PRR25, PRR26, PRR27, PRR29, PRR3 PRR30, PRR32, PRR34, PRR34-AS1, PRR35, PRR36, PRR4, PRR5, PRR5-ARHGAP8, PRR5L, PRR7, PRR7-AS1, PRR9, PRRC1, PRRC2A, PRRC2B, PRRC2C, PRRG1, PRRG2, PRRG3, PRRG4, PRRT1, PRRT2, PRRT3, PRRT3-AS1, PRRT4, PRRX1, PRRX2, PRSS1, PRSS12, PRSS16, PRSS2, PRSS21, PRSS22, PRSS23, PRSS27, PRSS3, PRSS30P, PRSS33, PRSS35, PRSS36, PRSS37, PRSS38, PRSS41, PRSS42, PRSS45, PRSS46, PRSS48, PRSS50, PRSS53, PRSS54, PRSS55, PRSS56, PRSS57, PRSS58, PRSS8, PRTFDC1, PRTG, PRTN3, PRUNE, PRUNE2, PRX, PSAP, PSAPL1, PSAT1, PSCA, PSD, PSD2, PSD3, PSD4, PSEN1, PSEN2, PSENEN, PSG1, PSG10P, PSG11, PSG2, PSG3, PSG4, PSG5, PSG6, PSG7, PSG8, PSG9, PSIP1, PSKH1, PSKH2, PSMA1, PSMA2, PSMA3, PSMA3-AS1, PSMA4, PSMA5, PSMA6, PSMA7, PSMA8, PSMB1, PSMB10, PSMB11, PSMB2, PSMB3, PSMB4, PSMB5, PSMB6, PSMB7, PSMB8, PSMB8-AS1, PSMB9, PSMC1, PSMC2, PSMC3, PSMC3IP, PSMC4, PSMC5, PSMC6, PSMD1, PSM1D10, PSMD11, PSMD12, PSMD13, PSMD14, PSMD2, PSMD3, PSMD4, PSMD5, PSMD5-AS1, PSMD6, PSMD6-AS2, PSMD7, PSMD8, PSMD9, PSME1, PSME2, PSME3, PSME4, PSMF1, PSMG1, PSMG2, PSMG3, PSMG3-AS1, PSMG4, PSORS1C1, PSORS1C2, PSORS1C3, PSPC1, PSPH, PSPN, PSRC1, PSTK, PSTPIP1, PSTPIP2, PTAFR, PTAR1, PTBP1, PTBP2, PTBP3, PTCD1, PTCD2, PTCD3, PTCH1, PTCH2, PTCHD1, PTCHD1-AS, PTCHD2, PTCHD3, PTCHD4, PTCRA, PTCSC3, PTDSS1, PTDSS2, PTEN, PTENP1, PTENP1-AS, PTER, PTF1A, PTGDR, PTGDR2, PTGDS, PTGER1, PTGER2, PTGER3, PTGER4, PTGER4P2-CDK2AP2P2, PTGES, PTGES2, PTGES2-AS1, PTGES3, PTGES3L, PTGES3L-AARSD1, PTGFR, PTGFRN, PTGIR, PTGIS, PTGR1, PTGR2, PTGS1, PTGS2, PTH, PTH1R, PTH2, PTH2R, PTHLH, PTK2, PTK2B, PTK6, PTK7, PTMA, PTMS, PTN, PTOV1, PTOV1-AS1, PTOV1-AS2, PTP4A1, PTP4A2, PTP4A3, PTPDC1, PTPLA, PTPLAD1, PTPLAD2, PTPLB, PIPMT1, PTPN1, PTPN11, PTPN12, PTPN13, PTPN14, PTPN18, PTPN2, PTPN20B, PTPN21, PTPN22, PTPN23, PTPN3, PTPN4, PTPN5, PTPN6, PTPN7, PTPN9, PTPRA, PTPRB, PTPRC, PTPRCAP, PTPRD, PTPRD-AS1, PTPRD-AS2, PTPRE, PTPRF, PTPRG, PTPRG-AS1, PTPRH, PTPRJ, PTPRK, PTPRM, PTPRN, PTPRN2, PTPRO, PTPRQ, PTPRR, PTPRS, PTPRT, PTPRU, PTPRVP, PTPRZ1, PTRF, PTRH1, PTRH1, PTRHD1, PTS, PTTG1, PTTG1IP, PTTG2, PTTG3P, PTX3, PTX4, PUF60, PUM1, PUM2, PURA, PURB, PURG, PUS1, PUS10, PUS3, PUS7, PUS7L, PUSL1, PVALB, PVR, PVRIG, PVRIG2P, PVRL1, PVRL2, PVRL3, PVRL3-AS1, PVRL4, PVT1, PWAR1, PWAR4, PWAR5, PWARSN, PWP1, PWP2, PWRN1, PWRN2, PWRN4, PWWP2A, PWWP2B, PXDC1, PXDN, PXDNL, PXK, PXMP2, PXMP4, PXN, PXN-AS1, PXT1, PXYLP1, PYCARD, PYCARD-AS1, PYCR1, PYCR2, PYCRL, PYDC1, PYDC2, PYGB, PYGL, PYGM, PYGO1, PYGO2, PYHIN1, PYROXD1, PYROXD2, PYURF, PYY, PYY2, PZP, QARS, QDPR, QKI, QPCT, QPCTL, QPRT, QRFP, QRFPR, QRICH1, QRICH2, QRSL1, QSER1, QSOX1, QSOX2, QTRT1, QTRTD1, R3HCC1, R3HCC1L, R3HDM1, R3HDM2, R3HDM4, R3HDML, RAB10, RAB11A, RAB11B, RAB11B-AS1, RAB11FIP1, RAB11FIP2, RAB11FIP3, RAB11FIP4, RAB11FIP5, RAB12, RAB13, RAB14, RAB15, RAB17, RAB18, RAB19, RAB1A, RAB1B, RAB20, RAB21, RAB22A, RAB23, RAB24, RAB25, RAB26, RAB27A, RAB27B, RAB28, RAB29, RAB2A, PAB2B, RAB30, RAB30-AS1, RAB31, RAB32, RAB33A, RAB33B, RAB34, RAB35, RAB36, RAB37, RAB38, RAB39A, RAB39B, RAB3A, RAB3B, RAB3C, RAB3D, RAB3GAP1, RAB3GAP2, RAB3IL1, RAB3IP, RAB40A, RAB40AL, RAB40B, RAB40C, RAB41, RAB42, RAB43, RAB44, RAB4A, RAB4B , RAB4B-EGLN2, RAB5A, RAB5B, RAB5C, RAB6A, RAB6B, RAB6C, RAB6C-AS1, RAB7A, RAB7B, RAB8A, RAB8B, RAB9A, RAB9B, RAB9BP1, RABAC1, RABEP1, RABEP2, RABEPK, RABGAP1, RABGAP1L, RABGEF1, RABGGTA, RABGGTB, RARIF, RABL2A, RABL2B, RABL3, RABL6, RAC1, RAC2, RAC3, RACGAP1, RACGAP1P, RAD1, RAD17, RAD18, RAD21, RAD21-AS1, RAD2IL1, RAD23A, RAD23B, RAD50, RAD51, RAD51AP1, RAD51AP2, RAD51-AS1, RAD51B, RAD51C, RAD51D, RAD51L3-RFFL, RAD52, RAD54B, RAD54L, RAD54L2, RAD9A, RAD9B, RADIL, RAE1, RAET1E, RAET1E-AS1, RAET1G, RAET1K, RAET1L, RAF1, RAG1, RAG2, RAI1, RAI14, RAI2, RALA, RALB, RALBP1, RALGAPA1, RALGAPA1P, RALGAPA2, RALGAPB, RALGDS, RALGPS1, RALGPS2, RALY, RALY-AS1, RALYL, RAMP1, RAMP2, RAMP2-AS1, RAMP3, RAN, RANBP1, RANBP10, RANBP17, RANBP2, RANBP3, RANBP3L, RANBP6, RANBP9, RANGAP1, RANGRF, RAP1A, RAP1B, RAP1GAP, RAP1GAP2, RAP1GDS1, RAP2A, RAP2B, RAP2C, RAP2C-AS1, RAPGEF1, RAPGEF2, RAPGEF3, RAPGEF4, RAPGEF4-AS1, RAPGEF5, RAPGEF6, RAPGEFL1, RAPH1, RAPSN, RARA, RARA-AS1, RARB, RARG, RARRES1, RARRES2, RARRES3, RARS, RARS2, RASA1, RASA2, RASA3, RASA4, RASA4B, RASA4CP, BASAL1, RASAL2, RASAL2-AS1, RASAL3, RASD1, RASD2, RASEF, RASGEF1A, RASGEF1B, RASGEF1C, RASGRF1, RASRRF2, RASGRF2-AS1, RASGRP1, RASGRP2, RASGRP3, RASGRP4, RASIP1, RASL10A, RASL10B, RASL11A, RASL11B, RASL12, RASSF1, RASSF10, RASSF1-AS1, RASSF2, RASSF3, RASSF4, RASSF5, RASSF6, RASSF7, RASSF8, RASSF8-AS1, RASSF9, RAVER1, RAVER2, RAX, RAX2, RB1, RB1CC1, RBAK, RBAKDN, RBAK-RBAKDN, RBBP4, RBBP5, RBBP6, RBBP7, RBBP8, RBBP8NL, RBBP9, RBCK1, RBFA, RBFADN, RBFOX1, RBFOX2, RBFOX3, RBKS, RBL1, RBL2, RBM10, RBM11, RBM12, RBM12B, RBM12B-AS1, RBM14, RBM14-RBM4, RBM15, RBM15B, RBM17, RBM18, RBM19, RBM20, RBM2, RBM23, RBM24, RBM25, RBM26, RBM26-AS1, RBM27, RBM28, RBM3, RBM33, RBM34, RBM38, RBM39, RBM4, RBM41, RBM42, RBM43, RBM44, RBM45, RBM46, RBM47, RBM48, RBM4B, RBM5, RBM5-AS1, RBM6, RBM7, RBM8A, RBMS1, RBMS2, RBMS3, RBMS3-AS1, RBMS3-AS3, RBMX, RBMX2, RBMXL1, RBMXL2, RBMXL3, RBMY1A3P, RBMY2EP, RBMY2FP, RBMY3AP, RBP1, RBP2, RBP3, RBP4, RBP5, RBP7, RBPJ, RBRJL, RBPMS, RBPMS2, RBPMS-AS1, RBSN, RBX1, RC3H1, RC3H2, RCAN1, RCAN2, RCAN3, RCAN3AS, RCBTB1, RCBTB2, RCC1, RCC2, RCCD1, RCE1, RCHY1, RCL1, RCN1, RCN2, RCN3, RCOR1, RCOR2, RCOR3, RCSD1, RCVRN, RD3, RD3L, RDH10, RDH11, RDH12, RDH13, RDH14, RDH16, RDH5, RDH8, RDM1, RDX, REC114, REC8, RECK, RECQL, RECQL4, RECQL5, REEP1, REEP2, REEP3, REEP4, REEP5, REEP6, REG1A, REG1B, REG1P, REG3A, REG3G, REG4, REL, RELA, RELB, RELL1, RELL2, RELN, RELT, REM1, REM2, REN, RENBP, REP15, REPINI, REPS1, REPS2, RER1, RERE, REREP3, RERG, RERG-AS1, RERGL, RESP18, REST, RET, RETN, RETNLB, RETSAT, REV1, REV3L, REXO1, REXO1L2P, REXO2, REXO4, RFC1, RFC2, RFC3, RFC4, RFC5, RFESD, RFFL, RFK, RFNG, RFPL1, RFPL1S, RFPL2, RFPL3, RFPL3S, RFPL4A, RFPL4AL1, RFPL4B, RFT1, RFTN1, RFTN2, RFWD2, RFWD3, RFX1, RFX2, RFX3, RFX3-AS1, RFX4, RFX5, RFX6, RFX7, RFX8, RFXANK, RFXAP, RGAG1, RGAG4, RGCC, RGL1, RGL2, RGL3, RGL4, RGMA, RGMB, RGMB-AS1, RGN, RGP1, RGPD1, RGPD2, RGPD3, RGPD4, RGPD4-AS1, RGPD5, RGPD6, RGPD8, RGR, RGS1, RGS10, RGS11, RGS12, RGS13, RGS14, RGS16, RGS17, RGS18, RGS19, RGS2, RGS20, RGS21, RGS22, RGS3, RGS4, RGS5, RG56, RGS7, RGS7BP, RGS8, RGS9, RGS9BP, RGSL1, RHAG, RHBDD1, RHBDD2, RHBDD3, RHBDF1, RHBDF2, RHBDL1, RHBDL2, RHBDL3, RHBG, RHCE, RHCG, RHD, RHEB, RHEBL1, RHNO1, RHO, RHOA, RHOB, RHOBTB1, RHOBTB2, RHOBTB3, RHOC, RHOD, RHOF, RHOG, RHOH, RHOJ, RHOQ, RHOT1, RHOT2, RHOU, RHOV, RHOXF1, RHOXF2, RHOXF2B, RHPN1, RHPN1-AS1, RHPN2, RIBC1, RIBC2, RIC1, RIC3, RIC8A, RIC8B, RICTOR, RIF1, RHAD1, RILP, RILPL1, RILPL2, RIMBP2, RIMBP3, RIMBP3B, RIMBP3C, RIMKLA, RIMKLB, RIMS1, RIMS2, RIMS3, RIMS4, RIN1, RIN2, RIN3, RING1, RINL, RINT1, RIOK1, RIOK2, RIOK3, RIPK1, RIPK2, RIPK3, RIPK4, RIPPLY1, RIPPLY2, RIPPLY3, RIT1, RIT2, RITA1, RLBP1, RLF, RLIM, RLN1, RLN2, RLN3, RLTPR, RAMDN1, RMDN2, RMDN2-AS1, RMDN3, RMI1, RMI2, RMND1, RMND5A, RMND5B, RMRP, RMST, RN7SK, RN7SL1, RN7SL2, RNA18S5, RNA28S5, RNA45S5, RNA5-8S5, RNA5S1, RNA5S10, RNA5S11, RNA5S12, RNA5S13, RNA5S14, RNA5S15, RNA5S16, RNA5S17, RNA5S2, RNA5S3, RNA5S4, RNA5S5, RNA5S6, RNA5S7, RNA5S8, RNA5S9, RNASE1, RNASE10, RNASE11, RNASE12, RNASE13, RNASE2, RNASE3, RNASE4, RNASE6, RNASE7, RNASE8, RNASE9, RNASEH1, RNASEH1-AS1, RNASEH2A, RNASEH2B, RNASEH2B-AS1, RNASEH2C, RNASEK, RNASEK-C17orf49, RNASEL, RNASET2, RND1, RND2, RND3, RNF10, RNF103, RNF103-CHMP3, RNF11, RNF111, RNF112, RNF113A, RNF113B, RNF114, RNF115, RNF121, RNF122, RNF123, RNF125, RNF126, RNF126P1, RNF128, RNF13, RNF130, RNF133, RNF135, RNF138, RNF138P1, RNF139, RNF139-AS1, RNF14, RNF141, RNF144A, RNF144A-AS1, RNF144B, RNF145, RNF146, RNF148, RNF149, RNF150, RNF151, RNF152, RNF157, RNF157-AS1, RNF165, RNF166, RNF167, RNF168, RNF169, RNF17, RNF170, RNF175, RNF180, RNF181, RNF182, RNF183, RNF185, RNF186, RNF187, RNF19A, RNF19B, RNF2, RNF20, RNF207, RNF208, RNF212, RNF212B, RNF213, RNT214, RNF215, RNT216, RNF216-IT1, RNF216P1, RNF217, RNF217-AS1, RNF219, RNF219-AS1, RNF220, RNF222, RNF223, RNF224, RNF225, RNF24, RNF25, RNF26, RNF31, RNF32, RNF34, RNF38, RNF39, RNF4, RNF40, RNF41, RNF43, RNF44, RNF5, RNF5P1, RNF6, RNF7, RNF8, RNFT1, RNFT2, RNGTT, RNH1, RNLS, RNMT, RNMTL1, RNPC3, RNPEP, RNPEPL1, RNPS1, RNU105B, RNU105C, RNU11, RNU1-1, RNU1-13P, RNU12, RNU1-2, RNU1-27P, RNU1-28P, RNU1-3, RNU1-4, RNU2-1, RNU2-2P, RNU4-1, RNU4-2, RNU4ATAC, RNU5A-1, RNU5B-1, RNU5D-1, RNU5E-1, RNU5F-1, RNU6-1, RNU6-10P, RNU6-14P, RNU6-15P, RNU6-16P, RNU6-19P, RNU6-2, RNU6-21P, RNU6-23P, RNU6-26P, RNU6-28P, RNU6-30P, RNU6-31P, RNU6-33P, RNU6-34P, RNU6-35P, RNU6-36P, RNU6-39P, RNU6-42P, RNU6-45P, RNU6-46P, RNU6-48P, RNU6-52P, RNU6-53P, RNU6-55P, RNU6-56P, RNU6-57P, RNU6-58P, RNU6-59P, RNU6-63P, RNU6-64P, RNU6-66P, RNU6-67P, RNU6-68P, RNU6-69P, RNU6-7, RNU6-71P, RNU6-72P, RNU6-75P, RNU6-76P, RNU6-78P, RNU6-79P, RNU6-8, RNU6-81P, RNU6-82P, RNU6-83P, RNU6-9, RNU6ATAC, RNU7-1, RNU86, RNVU1-10, RNVU1-14, RNVU1-15, RNVU1-17, RNVU1-18, RNVU1-19, RNVU1-20, RNVU1-3, RNVU1-4, RNVU1-6, RNVU1-7, RNVU1-8, RNY1, RNY3, RNY4, RNY5, ROBO1, ROBO2, ROBO3, ROBO4, ROCK1, ROCK1P1, ROCK2, ROGDI, ROM1, ROMO1, ROPN1, ROPN1B, ROPN1L, ROPN1L-AS1, ROR1, ROR1-AS1, ROR2, RORA, RORA-AS1, RORA-AS2, RORB, RORB-AS1, RORC, ROS1, RP1, RP11-87M18.2, RP1L1, RP2, RP9, RP9P, RPA1, RPA2, RPA3, RPA4, RPAIN, RPAP1, RPAP2, RPAP3, RPARP-AS1, RPE, RPE65, RPEL1, RPF1, RPF2, RPGR, RPGRIP1, RPGRIP1L, RPH3A, RPH3AL, RPIA, RPL10, RPL10A, RPL10L, RPL11, RPL12, RPL13, RPL13A, RPL13AP17, RPL13AP20, RPL13AP3, RPL13AP5, RPL13AP6, RPL13P5, RPL14, RPL15, RPL17, RPL17-C18orf32, RPL18, RPL18A, RPL19, RPL19P12, RPL21, RPL21P28, RPL21P44, RPL22, RPL22L1, RPL23, RPL23A, RPL23AP32, RPL23AP53, RPL23AP64, RPL23AP7, RPL23AP82, RPL23P8, RPL24, RPL26, RPL26L1, RPL27, RPL27A, RPL28, RPL29, RPL29P2, RPL3, RPL30, RPL31, RPL31P11, RPL32, RPL32P3, RPL34, RPL34-AS1, RPL35, RPL35A, RPL36, RPL36A, RPL36A-HNRNPH2, RPL36AL, RPL37, RPL37A, RPL38, RPL39, RPL39L, RPL3L, RPL4, RPL41, RPL5, RPL6, RPL7, RPL7A, RPL7L1, RPL8, RPL9, RPLP0, RPLP0P2, RPLP1, RPLP2, RPN1, RPN2, RPP14, RPP21, RPP25, RPP25L, RPP30, RPP38, RPP40, RPPH1, RPRD1A, RPRD1B, RPRD2, RPRM, RPRML, RPS10, RPS10-NUDT3, RPS10P7, RPS11, RPS12, RPS13, RPS14, RPS14P3, RPS15, RPS15A, RPS15AP10, RPS16, RPS16P5, RPS17, RPS18, RPS18P9, RPS19, RPS19BP1, RPS2, RPS20, RPS21, RPS23, RPS24, RPS25, RPS26, RPS26P11, RPS27, RPS27A, RPS27L, RPS28, RPS29, RPS2P32, RPS3, RPS3A, RPS4X, RPS5, RPS6, RPS6KA1, RPS6KA2, RPS6KA2-AS1, RPS6KA2-IT1, RPS6KA3, RPS6KA4, RPS6KA5, RPS6KA6, RPS6KB1, RPS6KB2, RPS6KC1, RPS6KLI1, RPS7, RPS7P5, RPS8, RPS9, RPSA, RPSAP52, RPSAP58, RPSAP9, RPTN, RPTOR, RPUSD1, RPUSD2, RPUSD3, RPUSD4, RQCD1, RRAD, RRAGA, RRAGB, RRAGC, RRAGD, RRAS, RRAS2, RRBP1, RREB1, RRH, RRM1, RRM2, RRM2B, RRN3, RRN3P1, RRN3P2, RRN3P3, RRNAD1, RRP1, RRP12, RRP15, RRP1B, RRP36, RRP7A, RRP7B, RRP8, RRP9, RRS1, RRS1-AS1, RS1, RSAD1, RSAD2, RSBN1, RSBN1L, RSC1A1, RSF1, RSG1, RSL1D1, RSL24D1, RSPH1, RSPH10B, RSPH10B2, RSPH14, RSPH3, RSPH4A, RSPH6A, RSPH9, RSPO1, RSPO2, RSPO3, RSPO4, RSPRY1, RSRC1, RSRC2, RSRP1, RSU1, RSU1P2, RTBDN, RTCA, RTCA-AS1, RTCB, RTEL1, RTEL1-TNFRSF6B, RTF1, RTFDC1, RTKN, RTKN2, RTL1, RTN1, RTN2, RTN3, RTN4, RTN4IP1, RTN4R, RTN4RL1, RTN4RL2, RTP1, RTP2, RTP3, RTP4, RTP5, RTTN, RUFY1, RUFY2, RUFY3, RUFY4, RUNDC1, RUNDC3A, RUNDC3A-AS1, RUNDC3B, RUNX1, RUNX1-IT1, RUNX1T1, RUNX2, RUNX3, RUSC1, RUSC1-AS1, RUSC2, RUVBL1, RUVBL1-AS1, RUVBL2, RWDD1, RWDD2A, RWDD2B, RWDD3, RWDD4, RXFP1, RXFP2, RXFP3, RXFP4, RXRA, RXRB, RXRG, RYBP, RYK, RYR1, RYR2, RYR3, S100A1, S100A10, S100A11, S100A12, S100A13, S100A14, S100A16, S100A2, S100A3, S100A4, S100A5, S100A6, S100A7, S100A7A, S100A7L2, S100A8, S100A9, S100B, S100G, S100P, S100PBP, S100Z, S1PR1, S1PR2, S1PR3, S1PR4, S1 PR5, SAA1, SAA2, SAA2-SAA4, SAA3P, SAA4, SAAL1, SAC3D1, SACM1L, SACS, SACS-AS1, SAE1, SAFB, SAFB2, SAG, SAGE1, SALL1, SALL2, SALL3, SALL4, SALRNA1, SALRNA2, SALRNA3, SAMD1, SAMD10, SAMD11, SAMD12, SAMD12-AS1, SAMD13, SAMD14, SAMD15, SAMD3, SAMD4A, SAMD4B, SAMD5, SAMD7, SAMD8, SAMD9, SAMD9L, SAMHD1, SAMM50, SAMSN1, SAMSN1-AS1, SAP130, SAP18, SAP25, SAP30, SAP30BP, SAP30L, SAP30L-AS1, SAPCD1, SAPCD1-AS1, SAPCD2, SAR1A, SAR1B, SARAF, SARDH, SARM1, SARNP, SARS, SARS2, SART1, SART3, SASH1, SASH3, SASS6, SAT1, SAT2, SATB1, SATB1-AS1, SATB2, SATB2-AS1, SATL1, SAV1, SAYSD1, SBDS, SBDSP1, SBF1, SBF1P1, SBF2, SBF2-AS1, SBK1, SBK2, SBK3, SBNO1, SBNO2, SBSN, SBSPON, SC5D, SCAF1, SCAF11, SCAF4, SCAF8, SCA1, SCAMP1, SCAMP1-AS1, SCAMP2, SCAMP3, SCAMP4, SCAMP5, SCAND1, SCAND2P, SCAP, SCAPER, SCARA3, SCARA5, SCARB1, SCARB2, SCARF1, SCARF2, SCARNA1, SCARNA10, SCARNA11, SCARNA12, SCARNA13, SCARNA14, SCARNA15, SCARNA16, SCARNA17, SCARNA18, SCARNA2, SCARNA20, SCARNA21, SCARNA22, SCARNA23, SCARNA27, SCARNA3, SCARNA4, SCARNA5, SCARNA6, SCARNA7, SCARNA8, SCARNA9, SCARNA9L, SCART1, SCCPDH, SCD, SCD5, SCEL, SCEL-AS1, SCFD1, SCFD2, SCG2, SCG3, SCG5, SCGB1A1, SCGB1B2P, SCGB1C1, SCGB1C2, SCGB1D1, SCGB1D2, SCGB1D4, SCGB2A1, SCGB2A2, SCGB2B2, SCGB2B3P, SCGB3A1, SCGB3A2, SCGN, SCHIP1, SCHLAP1, SCIMP, SCIN, SCLT1, SCLY, SCMH1, SCML1, SCML2, SCML4, SCN10A, SCN11A, SCN1A, SCN1B, SCN2A, SCN2B, SCN3A, SCN3B, SCN4A, SCN4B, SCN5A, SCN7A, SCN8A, SCN9A, SCNM1, SCNN1A, SCNN1B, SCNN1D, SCNN1G, SCO1, SCO2, SCOC, SCOC-AS1, SCP2, SCP2D1, SCPEP1, SCRG1, SCR1B, SCRN1, SCRN2, SCRN3, SCRT1, SCRT2, SCT, SCTR, SCUBE1, SCUBE2, SCUBE3, SCX, SCYL1, SCYL2, SCYL3, SDAD1, SDC1, SDC2, SDC3, SDC4, SDC4P, SDCBP, SDCBP2, SDCBP2-AS1, SDCCAG3, SDCCAG8, SDE2, SDF2, SDF2L1, SDF4, SDHA, SDHAF1, SDHAF2, SDHAP1, SDHAP2, SDHAP3, SDHB, SDHC, SDHD, SDK1, SDK2, SDPR, SDR16C5, SDR16C6P, SDR39U1, SDR42E1, SDR9C7, SDS, SDSL, SEBOX, SEC11A, SEC11C, SEC13, SEC14L1, SEC14L1P1, SEC14L2, SEC14L3, SEC14L4, SEC14L5, SEC14L6, SEC16A, SEC16B, SEC1P, SEC22A, SEC22B, SEC22C, SEC23A, SEC23B, SEC23IP, SEC24A, SEC24B, SEC24B-AS1, SEC24C, SEC24D, SEC31A, SEC31B, SEC61A1, SEC61A2, SEC61B, SEC61G, SEC62, SEC63, SECISBP2, SECISBP2L, SECTM1, SEH1L, SEL1L, SEL1L2, SEL1L3, SELE, SELENBP1, SELK, SELL, SELM, SELO, SELP, SELPLG, SELT, SELV, SEMA3A, SEMA3B, SEMA3B-AS1, SEMA3C, SEMA3D, SEMA3E, SEMA3F, SEMA3G, SEMA4A, SEMA4B, SEMA4C, SEMA4D, SEMA4F, SEMA4G, SEMA5A, SEMA5B, SEMA6A, SEMA6A-AS1, SEMA6B, SEMA6C, SEMA6D, SEMA7A, SEMG1, SEMG2, SENCR, SENP1, SENP2, SENP3, SENP3-EIF4A1, SENP5, SENP6, SEN1³7, SENP8, SEP15, SEPHS1, SEPHS2, SEPN1, SEPP1, SEPSECS, SEPSECS-AS1, SEPT1, SEPT10, SEPT11, SEPT12, SEPT14, SEPT2, SEPT3, SEPT4, SEPT4-AS1, SEPT5, SEPT5-GP1BB, SEPT6, SEPT7, SEPT7-AS1, SEPT7P2, SEPT7P9, SEPT8, SEPT9, SEPW1, SERAC1, SERBP1, SERF1A, SERF1B, SERF2, SERF2-C15ORF63, SERGEF, SERHL, SERHL2, SERINC1, SERINC2, SERINC3, SERINC4, SERINC5, SERP1, SERP2, SERPINA1, SERPINA10, SERPINA11, SERPINA12, SERPINA13P, SERPINA2, SERPINA3, SERPINA4, SERPINA5, SERPINA6, SERPINA7, SERPINA9, SERPINB1, SERPINB10, SERPINB11, SERPINB12, SERPINB13, SERPINB2, SERPINB3, SERPINB4, SERPINB5, SERPINB6, SERPINB7, SERPINB8, SERPINB9, SERPINB9P1, SERPINC1, SERPIND1, SERPINE1, SERPINE2, SERPINE3, SERPINF1, SERPINF2, SERPING1, SERPINH1, SERPINI1, SERPINI2, SERTAD1, SERTAD2, SERTAD3, SERTAD4, SERTAD4-AS1, SERTM1, SESN1, SESN2, SESN3, SESTD1, SET, SETBP1, SETD1A, SETD1B, SETD2, SETD3, SETD4, SETD5, SETD6, SETD7, SETD8, SETD9, SETDB1, SETDB2, SETMAR, SETSIP, SETX, SEZ6, SEZ6L, SEZ6L2, SF1, SF3A1, SF3A2, SF3A3, SF3B1, SF3B2, SF3B3, SF3B4, SF3B5, SF3B6 SFI1, SFMBT1, SFMBT2, SFN, SEPQ, SFR1, SFRP1, SFRP2, SFRP4, SFRP5, SFSWAP, SFT2D1, SFT2D2, SFT2D3, SFTA1P, SFTA2, SFTA3, SFTPA1, SFTPA2, SFTPB, SFTPC, SFTPD, SFXN1, SFXN2, SFXN3, SFXN4, SFXN5, SGCA, SGCB, SGCD, SGCE, SGCG, SGCZ, SGIP1, SGK2, SGK223, SGK3, SGK494, SGMS1, SGMS1-AS1, SGMS2, SGOL1, SGOL1-AS1, SGOL2, SGPL1, SGPP1, SGPP2, SGSH, SGSM1, SGSM2, SGSM3, SGTA, SGTB, SH2B1, SH2B2, SH2B3, SH2D1A, SH2D1B, SH2D2A, SH2D3A, SH2D3C, SH2D4A, SH2D4B, SH2D5, SH2D6, SH2D7, SH3BGR, SH3BGRL, SH3BGRL2, SH3BGRL3, SH3BP1, SH3BP2, SH3BP4, SH3BP5, SH3BP5-AS1, SH3BP5L, SH3D19, SH3D21, SH3GL1, SH3GL1P1, SH3GL1P2, SH3GL2, SH3GL3, SH3GLB1, SH3GLB2, SH3KBP1, SH3PXD2A, SH3PXD2A-AS1, SH3PXD2B, SH3RF1, SH3RF2, SH3RF3, SH3RF3-AS1, SH3TC1, SH3TC2, SH3YL1, SHANK1, SHANK2, SHANK2-AS1, SHANK2-AS3, SHANK3, SHARPIN, SHB, SHBG, SHC1, SHC2, SHC3, SHC4, SHCBP1, SHCBP1L, SHD, SHE, SHF, SHFM1, SHH, SHISA2, SHISA3, SHISA4, SHISA5, SHISA6, SHISA7, SHISA8, SHISA9, SHKBP1, SHMT1, SHMT2, SHOC2, SHOX, SHOX2, SHPK, SHPRH, SHQ1, SHROOM1, SHROOM2, SHROOM3, SHROOM4, SI, SIAE, SIAH1, SIAH2, SIAH3, SIDT1, SIDT2, SIGIRR, SIGLEC1, SIGLEC10, SIGLEC11, SIGLEC12, SIGLEC14, SIGLEC15, SIGLEC16, SIGLEC17P, SIGLEC5, SIGLEC6, SIGLEC7, SIGLEC8, SIGLEC9, SIGLECL1, SIGMAR1, SIK1, SIK2, SIK3, SIKE1, SIL1, SIM1, SIM2, SIMC1, SIN3A, SIN3B, SIPA1, SIPA1L1, SIPA1L2, SIPA1L3, SIRPA, SIRPB1, SIRPB2, SIRPD, SIRPG, SIRPG-AS1, SIRT1, SIRT2, SIRT3, SIRT4, SIRT5, SIRT6, SIRT7, SIT1, SIVA1, SIX1, SIX2, SIX3, SIX3-AS1, SIX4, SIX5, SIX6, SKA1, SKA2, SKA3, SKAP1, SKAP2, SKI, SKIDA1, SKIL, SKINTL, SKIV2L, SKIV2L2, SKOR1, SKOR2, SKP1, SKP1P2, SKP2, SLA, SLA2, SLAIN1, SLAIN2, SLAMF1, SLAMF6, SLAMF7, SLAMF8, SLAMF9, SLBP, SLC10A1, SLC10A2, SLC10A3, SLC10A4, SLC10A5, SLC10A6, SLC10A7, SLC11A1, SLC11A2, SLC12A1, SLC12A2, SLC12A3, SLC12A4, SLC12A5, SLC12A6, SLC12A7, SLC12A8, SLC12A9, SLC13A1, SLC13A2, SLC13A3, SLC13A4, SLC13A5, SLC14A1, SLC14A2, SLC14A2-AS1, SLC15A1, SLC15A2, SLC15A3, SLC15A4, SLC15A5, SLC16A1, SLC16A10, SLC16A11, SLC16A12, SLC16A12-AS1, SLC16A13, SLC16A14, SLC16A1-AS1, SLC16A2, SLC16A3, SLC16A4, SLC16A5, SLC16A6, SLC16A7, SLC16A8, SLC16A9, SLC17A1, SLC17A2, SLC17A3, SLC17A4, SLC17A5, SLC17A6, SLC17A7, SLC17A8, SLC17A9, SLC18A1, SLC18A2, SLC18A3, SLC18B1, SLC19A1, SLC19A2, SLC19A3, SLC1A1, SLC1A2, SLC1A3, SLC1A4, SLC1A5, SLC1 A6, SLC1 A7, SLC20A1, SLC20A2, SLC22A1, SLC22A10, SLC22A11, SLC22A12, SLC22A13, SLC22A14, SLC22A15, SLC22A16, SLC22A17, SLC22A18, SLC22A18AS, SLC22A2, SLC22A20, SLC22A23, SLC22A24, SLC22A25, SLC22A3, SLC22A31, SLC22A4, SLC22A5, SLC22A6, SLC22A7, SLC22A8, SLC22A9, SLC23A1, SLC23A2, SLC23A3, SLC24A1, SLC24A2, SLC24A3, SLC24A4, SLC24A5, SLC25A1, SLC25A10, SLC25A11, SLC25A12, SLC25A13, SLC25A14, SLC25A15, SLC25A16, SLC25A17, SLC25A18, SLC25A19, SLC25A2, SLC25A20, SLC25A21, SLC25A21-AS1, SLC25A22, SLC25A23, SLC25A24, SLC25A25, SLC25A25-AS1, SLC25A26, SLC25A27, SLC25A28, SLC25A29, SLC25A3, SLC25A30, SLC25A30-AS1, SLC25A31, SLC25A32, SLC25A33, SLC25A34, SLC25A35, SLC25A36, SLC25A37, SLC25A38, SLC25A39, SLC25A3P1, SLC25A4, SLC25A40, SLC25A41, SLC25A42, SLC25A43, SLC25A44, SLC25A45, SLC25A46, SLC25A47, SLC25A48, SLC25A5, SLC25A51, SLC25A51P1, SLC25A52, SLC25A53, SLC25A5-AS1, SLC25A6, SLC26A1, SLC26A10, SLC26A11, SLC26A2, SLC26A3, SLC26A4, SLC26A4-AS1, SLC26A5, SLC26A6, SLC26A7, SLC26A8, SLC26A9, SLC27A1, SLC27A2, SLC27A3, SLC27A4, SLC27A5, SLC27A6, SLC28A1, SLC28A2, SLC28A3, SLC29A1, SLC29A2, SLC29A3, SLC29A4, SLC2A1, SLC2A10, SLC2A11, SLC2A12, SLC2A13, SLC2A14, SLC2A1-AS1, SLC2A2, SLC2A3, SLC2A4, SLC2A4RG, SLC2A5, SLC2A6, SLC2A7, SLC2A8, SLC2A9, SLC30A1, SLC30A10, SLC30A2, SLC30A3, SLC30A4, SLC30A5, SLC30A6, SLC30A7, SLC30A8, SLC30A9, SLC31A1, SLC31A2, SLC32A1, SLC33A1, SLC34A1, SLC34A2, SLC34A3, SLC35A1, SLC35A2, SLC35A3, SLC35A4, SLC35A5, SLC35B1, SLC35B2, SLC35B3, SLC35B4, SLC35C1, SLC35C2, SLC35D1, SLC35D2, SLC35D3, SLC35E1, SLC35E2, SLC35E2B, SLC35E3, SLC35E4, SLC35F1, SLC35F2, SLC35F3, SLC3SF4, SLC35F5, SLC35F6, SLC35G1, SLC35G2, SLC35G3, SLC35G4, SLC35G5, SLC35G6, SLC36A1, SLC36A2, SLC36A3, SLC36A4, SLC37A1, SLC37A2, SLC37A3, SLC37A4, SLC38A1, SLC38A10, SLC38A11, SLC38A2, SLC38A3, SLC38A4, SLC38A5, SLC38A6, SLC38A7, SLC38A8, SLC38A9, SLC39A1, SLC39A10, SLC39A11, SLC39A12, SLC39A12-AS1, SLC39A13, SLC39A14, SLC39A2, SLC39A3, SLC39A4, SLC39A5, SLC39A6, SLC39A7, SLC39A8, SLC39A9, SLC3A1, SLC3A2, SLC40A1, SLC41A1, SLC41A2, SLC41A3, SLC43A1, SLC43A2, SLC43A3, SLC44A1, SLC44A2, SLC44A3, SLC44A4, SLC44A5, SLC45A1, SLC45A2, SLC45A3, SLC45A4, SLC46A1, SLC46A2, SLC46A3, SLC47A1, SLC47A2, SLC48A1, SLC4A1, SLC4A10, SLC4A11, SLC4A1AP, SLC4A2, SLC4A3, SLC4A4, SLC4A5, SLC4A7, SLC4A8, SLC4A9, SLC50A1, SLC51A, SLC51B, SLC52A1, SLC52A2, SLC52A3, SLC5A1, SLC5A10, SLC5A11, SLC5A12, SLC5A2, SLC5A3, SLC5A4, SLC5A5, SLC5A6, SLC5A7, SLC5A8, SLC5A9, SLC6A1, SLC6A10P, SLC6A11, SLC6A12, SLC6A13, SLC6A14, SLC6A15, SLC6A16, SLC6A17, SLC6A18, SLC6A19, SLC6A1-AS1, SLC6A2, SLC6A20, SLC6A3, SLC6A4, SLC6A5, SLC6A6, SLC6A7, SLC6A8, SLC6A9, SLC7A1, SLC7A10, SLC7A11, SLC7A11-AS1, SLC7A13, SLC7A14, SLC7A2, SLC7A3, SLC7A4, SLC7A5, SLC7A5P1, SLC7A5P2, SLC7A6, SLC7A6OS, SLC7A7, SLC7A8, SLC7A9, SLC8A1, SLC8A1-AS1, SLC8A2, SLC8A3, SLC8B1, SLC9A1, SLC9A2, SLC9A3, SLC9A3R1, SLC9A3R2, SLC9A4, SLC9A5, SLC9A6, SLC9A7, SLC9A7P1, SLC9A8, SLC9A9, SLC9A9-AS1, SLC9B1, SLC9B2, SLC9C1, SLC9C2, SLCO1A2, SLCO1B1, SLCO1B3, SLCO1B7, SLCO1C1, SLCO2A1, SLCO2B1, SLCO3A1, SLCO4A1, SLCO4A1-AS1, SLCO4C1, SLCO5A1, SLCO6A1, SLED1, SLFN11, SLFN12, SLFN12L, SLFN13, SLFN14, SLFN5, SLFNL1, SLFNL1-AS1, SLIRP, SLIT1, SLIT1-AS1, SLIT2, SLIT2-IT1, SLIT3, SLITRK1, SLITRK2, SLITRK3, SLITRK4, SLITRKS, SLITRK6, SLK, SLMAP, SLMO1, SLMO2, SLMO2-ATP5E, SLN, SLPI, SLTM, SLU7, SLURP1, SLX1A, SLX1A-SULT1A3, SLX1B, SLX1B-SULT1A4, SLX4, SLX4IP, SMA4, SMA5, SMAD1, SMAD1-AS1, SMAD1-AS2, SMAD2, SMAD3, SMAD4, SMAD5, SMAD5-AS1, SMAD6, SMAD7, SMAD9, SMAGP, SMAP1, SMAP2, SMARCA1, SMARCA2, SMARCA4, SMARCA5, SMARCA5-AS1, SMARCAD1, SMARCAL1, SMARCB1, SMARCC1, SMARCC2, SMARCD1, SMARCD2, SMARCD3, SMARCE1, SMC1A, SMC1B, SMC2, SMC2-AS1, SMC3, SMC4, SMC5, SMC5-AS1, SMC6, SMCHD1, SMCO1, SMCO2, SMCO3, SMCO4, SMCP, SMCR5, SMCR8, SMDT1, SMEK1, SMEK2, SMEK3P, SMG1, SMG-1P1, SMG1P2, SMG1P3, SMG1P5, SMG1P7, SMG5, SMG6, SMG7, SMG7-AS1, SMG8, SMG9, SMIM1, SMIM10, SMIM11, SMIM12, SMIM13, SMIM14, SMIM15, SMIM17, SMIM18, SMIM19, SMIM2, SM1M20, SM1M21, SMIM22, SMIM23, SMIM24, SMIM2-AS1, SMIM2-IT1, SMIM3, SMIM4, SMIM5, SMIM6, SMIM7, SMIM8, SMIM9, SMKR1, SMLR1, SMN1, SMN2, SMNDC1, SMO, SMOC1, SMOC2, SMOX, SMPD1, SMPD2, SMPD3, SMPD4, SMPDL3A, SMPDL3B, SMPX, SMR3A, SMR3B, SMS, SMTN, SMTNL1, SMTNL2, SMU1, SMUG1, SMURF1, SMURF2, SMYD1, SMYD2, SMYD3, SMYD4, SMYD5, SNAI1, SNAI2, SNAI3, SNAI3-AS1, SNAP23, SNAP25, SNAP25-AS1, SNAP29, SNAP47, SNAP91, SNAPC1, SNAPC2, SNAPC3, SNAPC4, SNAPC5, SNAPIN, SNAR-A1, SNAR-A10, SNAR-A11, SNAR-A12, SNAR-A13, SNAR-A14, SNAR-A2, SNAR-A3, SNAR-A4, SNAR-A5, SNAR-A6, SNAR-A7, SNAR-A8, SNAR-A9, SNAR-B1, SNAR-B2, SNAR-C1, SNAR-C2, SNAR-C3, SNAR-C4, SNAR-C5, SNAR-D, SNAR-E, SNAR-F, SNAR-G1, SNAR-G2, SNAR-H, SNAR-I, SNCA, SNCA-AS1, SNCAIP, SNCB, SNCG, SND1, SND1-IT1, SNED1, SNF8, SNHG1, SNHG10, SNHG11, SNHG12, SNHG15, SNHG1.6, SNHG17, SNHG18, SNHG20, SNHG21, SNHG22, SNHG24, SNHG3, SNHG4, SNHG5, SNHG6, SNHG7, SNHG8, SNHG9, SNIP1, SNN, SNORA1, SNORA10, SNORA11, SNORA11B, SNORA11C, SNORA11D, SNORA11E, SNORA12, SNORA13, SNORA14A, SNORA14B, SNORA15, SNORA16A, SNORA16B, SNORA17, SNORA18, SNORA19, SNORA20, SNORA21, SNORA22, SNORA23, SNORA24, SNORA25, SNORA26, SNORA27, SNORA28, SNORA29, SNORA2A, SNORA2B, SNORA30, SNORA31, SNORA32, SNORA33, SNORA34, SNORA35, SNORA36A, SNORA36B, SNORA36C, SNORA37, SNORA38, SNORA38B, SNORA4, SNORA40, SNORA41, SNORA43, SNORA44, SNORA45A, SNORA45B, SNORA46, SNORA47, SNORA48, SNORA49, SNORA51, SNORA52, SNORA53, SNORA54, SNORA55, SNORA56, SNORA57, SNORA58, SNORA59A, SNORA59B, SNORA5A, SNORA5B, SNORA5C, SNORA6, SNORA60, SNORA61, SNORA62, SNORA63, SNORA64, SNORA65, SNORA66, SNORA67, SNORA68, SNORA69, SNORA70, SNORA70B, SNORA70C, SNORA70D, SNORA70E, SNORA70F, SNORA70G, SNORA71A, SNORA71B, SNORA71C, SNORA71D, SNORA71E, SNORA72, SNORA73A, SNORA73B, SNORA74A, SNORA74B, SNORA75, SNORA76A, SNORA76C, SNORA77, SNORA78, SNORA79, SNORA7A, SNORA7B, SNORA8, SNORA80A, SNORA80B, SNORA80E, SNORA81, SNORA84, SNORA9, SNORD10, SNORD100, SNORD101, SNORD102, SNORD103A, SNORD103B, SNORD104, SNORD105, SNORD105B, SNORD107, SNORD108, SNORD109A, SNORD109B, SNORD11, SNORD110, SNORD111, SNORD111B, SNORD112, SNORD113-1, SNORD113-2, SNORD113-3, SNORD113-4, SNORD113-5, SNORD113-6, SNORD113-7, SNORD113-8, SNORD113-9, SNORD114-1, SNORD114-10, SNORD114-11 SNORD114-12, SNORD114-13, SNORD114-14, SNORD114-15, SNORD114-16, SNORD114-17, SNORD114-18, SNORD114-19, SNORD114-2, SNORD114-20, SNORD114-21, SNORD114-22, SNORD114-23, SNORD114-24, SNORD114-25, SNORD114-26, SNORD114-27, SNORD114-28, SNORD114-29, SNORD114-3, SNORD114-30, SNORD114-31, SNORD114-4, SNORD114-5, SNORD114-6, SNORD114-7, SNORD114-8, SNORD114-9, SNORD115-1, SNORD115-10, SNORD115-11, SNORD115-12, SNORD115-13, SNORD115-14, SNORD115-15, SNORD115-16, SNORD115-17, SNORD115-18, SNORD115-19, SNORD115-2, SNORD115-20, SNORD115-21, SNORD115-22, SNORD115-23, SNORD115-24, SNORD115-25, SNORD115-26, SNORD115-27, SNORD115-28, SNORD115-29, SNORD115-3, SNORD115-30, SNORD115-31, SNORD115-32, SNORD115-33, SNORD115-34, SNORD115-35, SNORD115-36, SNORD115-37, SNORD115-38, SNORD115-39, SNORD115-4, SNORD115-40, SNORD115-41, SNORD115-42, SNORD115-43, SNORD115-44, SNORD115-45, SNORD115-46, SNORD115-47, SNORD115-48, SNORD115-5, SNORD115-6, SNORD115-7, SNORD115-8, SNORD115-9, SNORD116-1, SNORD116-10, SNORD116-11 SNORD116-12, SNORD116-13, SNORD116-14, SNORD116-15, SNORD116-16, SNORD116-17, SNORD116-18, SNORD116-19, SNORD116-2, SNORD116-20, SNORD116-21, SNORD116-22, SNORD116-23, SNORD116-24, SNORD116-25, SNORD116-26, SNORD116-27, SNORD116-28, SNORD116-29, SNORD116-3, SNORD116-30, SNORD116-4, SNORD116-5, SNORD116-6, SNORD116-7, SNORD116-8, SNORD116-9, SNORD117, SNORD118, SNORD119, SNORD11B, SNORD12, SNORD121A, SNORD121B, SNORD123, SNORD124, SNORD125, SNORD126, SNORD127, SNORD12B, SNORD12C, SNORD13, SNORD14A, SNORD14B, SNORD14C, SNORD14D, SNORD14E, SNORD15 A, SNORD15B, SNORD16, SNORD17, SNORD18A, SNORD18B, SNORD18C, SNORD19, SNORD19B, SNORD1A, SNORD1B, SNORD1C, SNORD2, SNORD20, SNORD21, SNORD22, SNORD23, SNORD24, SNORD25, SNORD26, SNORD27, SNORD28, SNORD29, SNORD30, SNORD31, SNORD32A, SNORD32B, SNORD33, SNORD34, SNORD35A, SNORD35B, SNORD36A, SNORD36B, SNORD36C, SNORD37, SNORD38A, SNORD38B, SNORD3A, SNORD3B-1, SNORD3B-2, SNORD3C, SNORD3D, SNORD41, SNORD42A, SNORD42B, SNORD43, SNORD44, SNORD45A, SNORD45B, SNORD45C, SNORD46, SNORD47, SNORD48, SNORD49A, SNORD49B, SNORD4A, SNORD4B, SNORD5, SNORD50A, SNORD50B, SNORD51, SNORD52, SNORD53, SNORD54, SNORD55, SNORD56, SNORD56B, SNORD57, SNORD58A, SNORD58B, SNORD58C, SNORD59A, SNORD59B, SNORD6, SNORD60, SNORD61, SNORD62A, SNORD62B, SNORD63, SNORD64, SNORD65, SNORD66, SNORD67, SNORD68, SNORD69, SNORD7, SNORD70, SNORD71, SNORD72, SNORD73A, SNORD74, SNORD75, SNORD76, SNORD77, SNORD78, SNORD79, SNORD8, SNORD80, SNORD81, SNORD82, SNORD83A, SNORD83B, SNORD84, SNORD85, SNORD86, SNORD87, SNORD88A, SNORD88B, SNORD88C, SNORD89, SNORD9, SNORD90, SNORD91A, SNORD91B, SNORD92, SNORD93, SNORD94, SNORD95, SNORD96A, SNORD96B, SNORD97, SNORD98, SNORD99, SNPH, SNRK, SNRK-AS1, SNRNP200, SNRNP25, SNRNP27, SNRNP35, SNRNP40, SNRNP48, SNRNP70, SNRPA, SNRPA1, SNRPB, SNRPB2, SNRPC, SNRPD1, SNRPD2, SNRPD2P2, SNRPD3, SNRPE, SNRPF, SNRPG, SNRPN, SNTA1, SNTB1, SNTB2, SNTG1, SNTG2, SNTN, SNRPN, SNURF, SNW1, SNX1, SNX10, SNX11, SNX12, SNX13, SNX14, SNX15, SNX16, SNX17, SNX18, SNX19, SNX2, SNX20, SNX21, SNX22, SNX24, SNX25, SNX27, SNX29, SNX29P1, SNX29P2, SNX3, SNX30, SNX31, SNX32, SNX33, SNX4, SNX5, SNX6, SNX7, SNX8, SNX9, SOAT1, SOAT2, SOBP, SOCS1, SOCS2, SOCS2-AS1, SOCS3, SOCS4, SOCS5, SOCS6, SOCS7, SOD1, SOD2, SOD3, SOGA1, SOGA3, SOHLH1, SOHLH2, SON, SORBS1, SORBS2, SORBS3, SORCS1, SORCS2, SORCS3, SORCS3-AS1, SORD, SORL1, SORT1, SOS1, SOS2, SOST, SOSTDC1, SOWAHA, SOWAHB, SOWAHC, SOWAHD, SOX1, SOX10, SOX11, SOX12, SOX13, SOX14, SOX15, SOX17, SOX18, SOX2, SOX21, SOX21-AS1, SOX2-OT, SOX3, SOX30, SOX4, SOX5, SOX6, SOX7, SOX8, SOX9, SOX9-AS1, SP1, SP100, SP110, SP140, SP140L, SP2, SP2-AS1, SP3, SP4, SP5, SP6, SP7, SP8, SP9, SPA17, SPACA1, SPACA3, SPACA4, SPACA5, SPACA5B, SPACA6P, SPACA6P-AS, SPACA7, SPAG-1, SPAG11A, SPAG11B, SPAG16, SPAG17, SPAG4, SPAG5, SPAG5-AS1, SPAG6, SPAG7, SPAG8, SPAG9, SPAM1, SPANXA1, SPANXA2, SPANXA2-OT1, SPANXB1, SPANXC, SPANXD, SPANXN1, SPANXN2, SPANXN3, SPANXN4, SPANXN5, SPARC, SPARCL1, SPAST, SPATA12, SPATA13, SPATA13-AS1, SPATA16, SPATA17, SPATA17-AS1, SPATA18, SPATA19, SPATA2, SPATA20, SPATA21, SPATA22, SPATA24, SPATA25, SPATA2L, SPATA3, SPATA31A1, SPATA31A3, SPATA31A5, SPATA31A6, SPATA31A7, SPAT A31C1, SPATA31C2, SPATA31D1, SPATA31D3, SPATA31D4, SPATA31D5P, SPATA31E1, SPATA32, SPATA33, SPATA3-AS1, SPATA4, SPATA41, SPATA42, SPATA45, SPATA5, SPATA5L1, SPATA6, SPATA6L, SPATA7, SPATA8, SPATA8-AS1, SPATA9, SPATC1, SPATC1L, SPATS1, SPATS2, SPATS2L, SPC24, SPC25, SPCS1, SPCS2, SPCS3, SPDEF, SPDL1, SPDYA, SPDYC, SPDYE1, SPDYE2, SPDYE2B, SPDYE3, SPDYE4, SPDYE5, SPDYE6, SPDYE7P, SPDYE8P, SPECC1, SPECC1L, SPECC1L-ADORA2A, SPEF1, SPEF2, SPEG, SPEM1, SPEN, SPERT, SPESP1, SPG11, SPG20, SPG20-AS1, SPG21, SPG-7, SPHAR, SPHK1, SPHK2, SPHKAP, SPI1, SPIB, SPIC, SPICE1, SPIDR, SPIN1, SPIN2A, SPIN2B, SPIN3, SPIN4, SPINK1, SPINK13, SPINK14, SPINK2, SPINK4, SPINK5, SPINK6, SPINK7, SPINK8, SPINK9, SPINT1, SPINT2, SPINT3, SPINT4, SPIRE1, SPIRE2, SPN, SPNS1, SPNS2, SPNS3, SPO11, SPOCD1, SPOCK1, SPOCK2, SPOCK3, SPON1, SPON2, SPOP, SPOPL, SPP1, SPP2, SPPL2A, SPPL2B, SPPL2C, SPPL3, SPR, SPRED1, SPRED2, SPRED3, SPRN, SPRNP1, SPRR1A, SPRR1B, SPRR2A, SPRR2B, SPRR2C, SPRR2D, SPRR2E, SPRR2F, SPRR2G, SPRR3, SPRR4, SPRTN, SPRY1, SPRY2, SPRY3, SPRY4, SPRYD3, SPRYD4, SPRYD7, SPSB1, SPSB2, SPSB3, SPSB4, SPTA1, SPTAN1, SPTB, SPTBN1, SPTBN2, SPTBN4, SPTBN5, SPTLC1, SPTLC2, SPTLC3, SPTSSA, SPTSSB, SPTY2D1, SPTY2D1-AS1, SPX, SPZ1, SQLE, SQRDL, SQSTM1, SRA1, SRBD1, SRC, SRCAP, SRCIN1, SRD5A1, SRD5A1P1, SRD5A2, SRD5A3, SRD5A3-AS1, SREBF1, SREBF2, SREK1, SREK1 IP1, SRF, SRFBP1, SRGAP1, SRGAP2, SRGAP2-AS1, SRGAP2B, SRGAP2C, SRGAP2D, SRGAP3, SRGAP3-AS3, SRGN, SRI, SRL, SRM, SRMS, SRP14, SRP14-AS1, SRP19, SRP54, SRP68, SRP72, SRP9, SRPK1, SRPK2, SRPK3, SRPR, SRPRB, SRPX, SRPX2, SRR, SRRD, SRRM1, SRRM2, SRRM2-AS1, SRRM3, SRRM4, SRRM5, SRRT, SRSF1, SRSF10, SRSF11, SRSF12, SRSF2, SRSF3, SRSF4, SRSF5, SRSF6, SRSF7, SRSF8, SRSF9, SRXN1, SS18, SS18L1, SS18L2, SSB, SSBP1, SSBP2, SSBP3, SSBP3-AS1, SSBP4, SSC4D, SSC5D, SSFA2, SSH1, SSH2, SSH3, SSMEM1, SSNA1, SSPN, SSPO, SSR1, SSR2, SSR3, SSR4, SSR4P1, SSRP1, SSSCA1, SSSCA1-AS1, SST, SSTR1, SSTR2, SSTR3, SSTR4, SSTR5, SSTR5-AS1, SSU72, SSUH2, SSX1, SSX2, SSX2B, SSX2IP, SSX3, SSR4, SSX4B, SSX5, SSX6, SSX7, SSX8, SSX9, ST13, ST13P4, ST14, ST18, ST20, ST20-AS1, ST20-MTHFS, ST3GAL1, ST3GAL2, ST3GAL3, ST3GAL4, ST3GAL4-AS1, ST3GAL5, ST3GAL5-AS1, ST3GAL6, ST3GAL6-AS1, ST5, ST6GAL1, ST6GAL2, ST6GALNAC1, ST6GALNAC2, ST6GALNAC3, ST6GALNAC4, ST6GALNAC5, ST6GALNAC6, ST7, ST7-AS1, ST7-AS2, ST7L, ST7-OT3, ST7-OT4, ST8SIA1, ST8SIA2, ST8SIA3, ST8SIA4, ST8SIA5, ST8SIA6, ST8SIA6-AS1, STAB1, STAB2, STAC, STAC2, STAC3, STAG1, STAG2, STAG3, STAG3L1, STAG3L2, STAG3L3, STAG3L4, STAG3LSP, STAG3L5P-PVRIG2P-PILRB, STAM, STAM2, STAM-AS1, STAMBP, STAMBPL1, STAP1, STAP2, STAR, STARD10, STARD13, STARD13-AS, STARD3, STARD3NL, STARD4, STARD4-AS1, STARD5, STARD6, STARD7, STARD7-AS1, STARD8, STARD9, STAT1, STAT2, STAT3, STAT4, STAT5A, STAT5B, STAT6, STATH, STAU1, STAU2, STAU2-AS1, STBD1, STC1, STC2, STEAP1, STEAP1B, STEAP2, STEAP2-AS1, STEAP3, STEAP4, STH, STIL, STIM1, STIM2, STIP1, STK10, STK11, STK11IP, STK16, STK17A, STK17B, STK19, STK24, STK25, STK26, STK3, STK31, STK32A, STK32B, STK32C, STK33, STK35, STK36, STK38, STK38L, STK39, STK4, STK40, STK4-AS1, STKLD1, STMN1, STMN2, STMN3, STMN4, STMND1, STOM, STOML1, STOML2, STOML3, STON1, STON1-GTF2A1L, STON2, STOX1, STOX2, STPG1, STPG2, STPG2-AS1, STRA13, STRA6, STRA8, STRADA, STRADB, STRAP, STRBP, STRC, STRIP1, STRIP2, STRN, STRN3, STRN4, STS, STT3A, STT3B, STUB1, STX10, STX11, STX12, STX16, STX16-NPEPL1, STX17, STX17-AS1, STX18, STX18-AS1, STX18-IT1, STX19, STX1A, STX1B, STX2, STX3, STX4, STX5, STX6, STX7, STX8, STXBP1, STXBP2, STXBP3, STXBP4, STXBP5, STXBP5-AS1, STXBP5L, STXBP6, STYK1, STYX, STYXL1, SUB1, SUCLA2, SUCLG1, SUCLG2, SUCLG2-AS1, SUCNR1, SUCO, SUDS3, SUFU, SUGCT, SUGP1, SUGP2, SUGT1, SUGT1P1, SUGT1P3, SULF1, SULF2, SULT1A1, SULT1A2, SULT1A3, SULT1A4, SULT1B1, SULT1C2, SULT1C2P1, SULT1C3, SULT1C4, SULT1E1, SULT2A1, SULT2B1, SULT4A1, SULT6B1, SUMF1, SUMF2, SUMO1, SUMO1P1, SUMO1P3, SUMO2, SUMO3, SUMO4, SUN1, SUN2, SUN3, SUN5, SUOX, SUPT16H, SUPT20H, SUPT20H1, SUPT20HL2, SUPT3H, SUPT4H1, SUPT5H, SUPT6H, SUPT7L, SUPV3L1, SURF1, SURF2, SURF4, SURF6, SUSD1, SUSD2, SUSD3, SUSD4, SUSD5, SUSD6, SUV39H1, SUV39H2, SUV420H1, SUV420H2, SUZ12, SUZ12P1, SV2A, SV2B, SV2C, SVEP1, SVIL, SVIL-AS1, SVILP1, SVIP, SVOP, SVOPL, SWAP70, SWI5, SWSAP1, SWT1, SYAP1, SYBU, SYCE1, SYCE1L, SYCE2, SYCE3, SYCN, SYCP1, SYCP2, SYCP2L, SYCP3, SYDE1, SYDE2, SYF2, SYK, SYMPK, SYN1, SYN2, SYN3, SYNC, SYNCRIP, SYNDIG1, SYNDIG1L, SYNE1, SYNE1-AS1, SYNE2, SYNE3, SYNE4, SYNGAP1, SYNGR1, SYNGR2, SYNGR3, SYNGR4, SYNJ1, SYNJ2, SYNJ2BP, SYNJ2BP-COX16, SYNJ2-IT1, SYNM, SYNPO, SYNPO2, SYNPO2L, SYNPR, SYNPR-AS1, SYNRG, SYP, SYP-AS1, SYPL1, SYPL2, SYS1, SYS1-DBNDD2, SYT1, SYT10, SYT11, SYT12, SYT13, SYT14, SYT14P1, SYT15, SYT16, SYT17, SYT2, SYT3, SYT4, SYT5, SYT6, SYT7, SYT8, SYT9, SYTL1, SYTL2, SYTL3, SYTL4, SYTL5, SYVN1, SZRD1, SZT2, T, TAAR1, TAAR2, TAAR3, TAAR5, TAAR6, TAAR8, TAAR9, TAB1, TAB2, TAB3, TAC1, TAC3, TAC4, TACC1, TACC2, TACC3, TACO1, TACR1, TACR2, TACR3, TACSTD2, TADA1, TADA2A, TADA2B, TADA3, TAF1, TAF10, TAF11, TAF12, TAF13, TAF15, TAF1A, TAF1A-AS1, TAF1B, TAF1C, TAF1D, TAF1L, TAF2, TAF3, TAF4, TAF4B, TAF5, TAF5L, TAF6, TAF6L, TAF7, TAF7L, TAF8, TAF9, TAF9B, TAGAP, TAGLN, TAGLN2, TAGLN3, TAL1, TAL2, TALDO1, TAMM41, TANC1, TANC2, TANGO2, TANGO6, TANK, TAOK1, TAOK2, TAOK3, TAP1, TAP2, TAPBP, TAPBPL, TAPT1, TAPT1-AS1, TARBP1, TARBP2, TARDBP, TARID, TARM1, TARP, TARS, TARS2, TARSL2, TAS1R1, TAS1R2, TAS1R3, TAS2R1, TAS2R10, TAS2R13, TAS2R14, TAS2R16, TAS2R19, TAS2R20, TAS2R3, TAS2R30, TAS2R31, TAS2R38, TAS2R39, TAS2R4, TAS2R40, TAS2R41, TAS2R42, TAS2R43, TAS2R46, TAS2R5, TAS2R50, TAS2R60, TAS2R7, TAS2R8, TAS2R9, TASP1, TAT, TAT-AS1, TATDN1, TATDN2, TATDN3, TAX1BP1, TAX1BP3, TAZ, TBATA, TBC1D1, TBC1D10A, TBC1D10B, TBC1D10C, TBC1D12, TBC1D13, TBC1D14, TBC1D15, TBC1D16, TBC1D17, TBC1D19, TBC1D2, TBC1D20, TBC1D21, TBC1D22A, TBC1D22A-AS1, TBC1D22B, TBC1D23, TBC1D24, TBC1D25, TBC1D26, TBC1D28, TBC1D29, TBC1D2B, TBC1D3, TBC1D30, TBC1D31, TBC1D32, TBC1D3B, TBC1D3C, TBC1D3F, TBC1D3H, TBC1D3K, TBC1D3L, TBC1D3P1-DHX40P1, TBC1D3P2, TBC1D3P5, TBC1D4, TBC1D5, TBC1D7, TBC1D8, TBC1D8B, TBC1D9, TBC1D9B, TBCA, TBCB, TBCC, TBCCD1, TBCD, TBCE, TBCEL, TBCK, TBK1, TBKBP1, TBL1X, TBL1XR1,TBL2, TBL3, TBP, TBPL1, TBPL2, TBR1, TBRG1, TBRG4, TBX1, TBX10, TBX15, TBX18, TBX19, TBX2, TBX20, TBX21, TBX22, TBX2-AS1, TBX3, TBX4, TBX5, TBX5-AS1, TBX6, TBXA2R, TBXAS1, TC2N, TCAIM, TCAM1P, TCAP, TCEA1, TCEA2, TCEA3, TCEAL1, TCEAL2, TCEAL3, TCEAL4, TCEAL5, TCEAL6, TCEAL7, TCEAL8, TCEANC, TCEANC2, TCEB1, TCEB2, TCEB3, TCEB3-AS1, TCEB3B, TCEB3C, TCEB3CL, TCEB3CL2, TCERG1, TCERG1L, TCERG1L-AS1, TCF12, TCF15, TCF19, TCF20, TCF21, TCF23, TCF24, TCF25, TCF4, TCF7, TCF7L1, TCF7L2, TCFL5, TCHH, TCHHL1, TCHP, TCIRG1, TCL1A, TCL1B, TCL6, TCN1, TCN2, TCOF1, TCP1, TCP10, TCP10L, TCP10L2, TCP11, TCP11L1, TCP11 L2, TCP11X2, TCTA, TCTE1, TCTE3, TCTEX1D1, TCTEX1D2, TCTEX1D4, TCTN1, TCTN2, TCTN3, TDG, TDGF1, TDGF1P3, TDH, TDO2, TDP1, TDP2, TDRD1, TDRD10, TDRD12, TDRD3, TDRD5, TDRD6, TDRD7, TDRD9, TDRG1, TDRKH, TDRP, TEAD1, TEAD2, TEAD3, TEAD4, TEC, TECPR1, TECPR2, TECR, TECRL, TECTA, TECTB, TEDDM1, TEF, TEFM, TEK, TEKT1, TEKT2, TEKT3, TEKT4, TEKT4P2, TEKT5, TELO2, TEN1, TEN1-CDK3, TENC1, TENM1, TENM2, TENM3, TENM4, TEP1, TEPP, TERC, TERF1, TERF2, TERF2IP, TERT, TES, TESC, TESC-AS1, TESK1, TESK2, TESPA1, TET1, TET2, TET2-AS1, TET3, TEX10, TEX101, TEX11, TEX12, TEX13A, TEX13B, TEX14, TEX15, TEX19, TEX2, TEX21P, TEX22, TEX26, TEX261, TEX264, TEX26-AS1, TEX28, TEX29, TEX30, TEX33, TEX35, TEX36, TEX36-AS1, TEX37, TEX38, TEX40, TEX41, TEX43, TEX9, TF, TFAM, TFAMP1, TFAP2A, TFAP2A-AS1, TFAP2B, TFAP2C, TFAP2D, TFAP2E, TFAP4, TFB1M, TFB2M, TFCP2, TFCP2L1, TFDP1, TFDP2, TFDP3, TFE3, TFEB, TFEC, TEF1, TFF2, TFF3, TFIP11, TFPI, TFPI2, TFPT, TFR2, TFRC, TG, TGDS, TGFA, TGFA-IT1, TGFB1, TGFB1I1, TGFB2, TGFB2-AS1, TGFB2-OT1, TGFB3, TGFB1, TGFBR1, TGFBR2, TGFBR3, TGFBR3L, TGFBRAP1, TGIF1, TGIF2, TGIF2-C20orf24, TGIF2LX, TGM1, TGM2, TGM3, TGM4, TGM5, TGM6, TGM7, TGOLN2, TGS1, TH, THADA, THAP1, THAP10, THAP11, THAP2, THAP3, THAP4, THAP5, THAP6, THAP7, THAP7-AS1, THAP8, THAP9, THAP9-AS1, THBD, THBS1, THBS2, THBS3, THBS4, THEG, THEG5, THEGL, THEM4, THEM5, THEM6, THEM1S, THEM1S2, THG1L, THNSL1, THNSL2, THOC1, THOC2, THOC3, THOC5, THOC6, THOC7, THOC7-AS1, THOP1, THPO, THRA, THRAP3, THRB, THRB-AS1, THRIL, THRSP, THSD1, THSD4, THSD4-AS1, THSD4-AS2, THSD7A, THSD7B, THTPA, THUMPD1, THUMPD2, THUMPD3, THUMPD3-AS1, THY1, THYN1, TIA1, TIAF1, TIAL1, TIAM1, TIAM2, TICAM1, TICAM2, TICRR, TIE1, TIFA, TIFAB, TIGD1, TIGD2, TIGD3, TIGD4, TIGD5, TIGD6, TIGD7, TIGIT, TIMD4, TIMELESS, TIMM10, TIMM10B, TIMM13, TIMM17A, TIMM17B, TIMM21, TIMM22, TIMM23, TIMM23B, TIMM44, TIMM50, TIMM8A, TIMM8B, TIMM9, TIMMDC1, TIMP1, TIMP2, TIMP3, TIMP4, TINAG, TINAGL1, TINCR, TINF2, TIPARP, TIPARP-AS1, TIPIN, TIPRL, TIRAP, TISP43, TJAP1, TJP1, TJP2, TJP3, TK1, TK2, TKT, TKTL1, TKTL2, TLCD1, TLCD2, TLDC1, TLDC2, TLE1, TLE2, TLE3, TLE4, TLE6, TLK1, TLK2, TLL1, TLL2, TLN1, TLN2, TLR1, TLR10, TLR2, TLR3, TLR4, TLR5, TLR6, TLR7, TLR8, TLR8-AS1, TLR9, TLX1, TLX1NB , TLX2, TLX3, TM2D1, TM2D2, TM2D3, TM4SF1, TM4SF18, TM4SF19, TM4SF19-AS1, TM4SF19-TCTEX1D2, TM4SF1-AS1, TM4SF20, TM4SF4, TM4SF5, TM6SF1, TM6SF2, TM7SF2, TM7SF3, TM9SF1, TM9SF2, TM9SF3, TM9SF4, TMA16, TMA7, TMBIM1, TMBIM4, TMBIM6, TMC1, TMC2, TMC3, TMC3-AS1, TMC4, TMC5, TMC6, TMC7, TMC8, TMCC1, TMCC1-AS1, TMCC2, TMCC3, TMCO1, TMCO2, TMCO3, TMCO4, TMCO5A, TMCO5B, TMCO6, TMED1, TMED10, TMED10P1, TMED11P, TMED2, TMD3, TMED4, TMED5, TMED6, TMED7, TMED7-TICAM2, TMED8, TMED9, TMEFF1, TMEFF2, TMEM100, TMEM101, TMEM102, TMEM104, TMEM105, TMEM106A, TMEM106B, TMEM106C, TMEM107, TMEM108, TMEM108-AS1, TMEM109, TMEM11, TMEM110, TMEM110-MUSTN1, TMEM114, TMEM115, TMEM116, TMEM117, TMEM119, TMEM120A, TMEM120B, TMEM121, TMEM123, TMEM125, TMEM126A, TMEM126B, TMEM127, TMEM128, TMEM129, TMEM130, TMEM131, TMEM132A, TMEM132B, TMEM132C, TMEM132D, TMEM132E, TMEM133, TMEM134, TMEM135, TMEM136, TMEM138, TMEM139, TMEM140, TMEM141, TMEM143, TMEM144, TMEM145, TMEM147, TMEM147-AS1, TMEM14A, TMEM14B, TMEM14C, TMEM14E, TMEM150A, TMEM150B, TMEM150C, TMEM151A, TMEM151B, TMEM154, TMEM155, TMEM156, TMEM158, TMEM159, TMEM160, TMEM161A, TMEM161B, TMEM161B-AS1, TMEM163, TMEM164, TMEM165, TMEM167A, TMEM167B, TMEM168, TMEM169, TMEM17, TMEM170A, TMEM170B, TMEM171, TMEM173, TMEM174, TMEM175, TMEM176A, TMEM176B, TMEM177, TMEM178A, TMEM178B, TMEM179, TMEM179B, TMEM18, TMEM180, TMEM181, TMEM182, TMEM183 A, TMEM183 B, TMEM184 A, TMEM184B, TMEM184C, TMEM185A, TMEM185B, TMEM186, TMEM187, TMEM189, TMEM189-UBE2V1, TMEM19, TMEM190, TMEM191A, TMEM191B, TMEM191C, TMEM192, TMEM194A, TMEM194B, TMEM196, TMEM198, TMEM198B, TMEM199, TMEM2, TMEM200A, TMEM200B, TMEM200C, TMEM201, TMEM202, TMEM203, TMEM204, TMEM205, TMEM206, TMEM207, TMEM208, TMEM209, TMEM210, TMEM211, TMEM212, TMEM212-AS1, TMEM213, TMEM214, TMEM215, TMEM216, TMEM217, TMEM218, TMEM219, TMEM220, TMEM220-AS1, TMEM221, TMEM222, TMEM223, TMEM225, TMEM229A, TMEM229B, TMEM230, TMEM231, TMEM232, TMEM233, TMEM234 TMEM235, TMEM236, TMEM237, TMEM238 TMEM239, TMEM240, TMEM241, TMEM242, TMEM243, TMEM244, TMEM245, TMEM246, TMEM246-AS1, TMEM247, TMEM248, TMEM249, TMEM25, TMEM251, TMEM252 TMEM253, TMEM254, TMEM254-AS1, TMEM255A, TMEM255B, TMEM256, TMEM256-PLSCR3, TMEM257, TMEM258, TMEM259, TMEM26, TMEM260, TMEM261, TMEM262, TMEM263, TMEM26-AS1, TMEM27, TMEM30A, TMEM30B, TMEM30C, TMEM31, TMEM33, TMEM35, TMEM37, TMEM38A, TMEM38B, TMEM39A, TMEM39B, TMEM40, TMEM41A, TMEM41B, TMEM42, TMEM43, TMEM44, TMEM44-AS1, TMEM45A, TMEM45B, TMEM47, TMEM5, TMEM50A, TMEM50B, TMEM51, TMEM51-AS1, TMEM52, TMEM52B, TMEM53, TMEM54, TMEM55A, TMEM55B, TMEM56, TMEM56-RWDD3, TMEM57, TMEM59, TMEM59L, TMEM5-AS1, TMEM60, TMEM61, TMEM62, TMEM63A, TMEM63B, TMEM63C, TMEM64, TMEM65, TMEM67, TMEM68, TMEM69, TMEM70, TMEM71, TMEM72, TMEM72-AS1, TMEM74, TMEM74B, TMEM75, TMEM79 TMEM80, TMEM81, TMEM82, TMEM86A, TMEM86B, TMEM87A, TMEM87B, TMEM88, TMEM88B, TMEM89, TMEM8A, TMEM8B, TMEM8C, TMEM9, TMEM91, TMEM92, TMEM92-AS1, TMEM95, TMEM97, TMEM98, TMEM99, TMEM9B, TMEM9B-AS1, TMF1, TMIE, TMIGD1, TMIGD2, TMIGD3, TMLHE, TMLHE-AS1, TMOD1, TMOD2, TMOD3, TMOD4, TMPO, TMPO-AS1, TMPPE, TMPRSS11A, TMPRSS11B, TMPRSS11BNL, TMPRSS11D, TMPRSS11E, TMPRSS11F, TMPRSS11GP, TMPRSS12, TMPRSS13, TMPRSS15, TMPRSS2, TMPRSS3, TMPRSS4, TMPRSS4-AS1, TMPRSS5, TMPRSS6, TMPRSS7, TMPRSS9, TMSB10, TMSB15A, TMSB15B, TMSB4X, TMTC1, TMTC2, TMTC3, TMTC4, TMUB1, TMUB2, TMX1, TMX2, TMX2-CTNND1, TMX3, TMX4, TNC, TNF, TNFAIP1, TNFAIP2, TNFAIP3, TNFAIP6, TNFAIP8, TNFAIP8L1, TNFAIP8L2, TNFAIP8L2-SCNM1 TNFAIP8L3, TNFRSF10A, TNFRSF10B, TNFRSF10C, TNFRSF10D, TNFRSF11A, TNFRSF11B, TNFRSF12A, TNFRSF13B, TNFRSF13C, TNFRSF14, TNFRSF17, TNFRSF18, TNFRSF19, TNFRSF1A, TNFRSF1B, TNFRSF21, TNFRSF25, TNFRSF4, TNFRSF6B, TNFRSF5, TNFRSF9, TNFSF10, TNFSF11, TNFSF12, TNTSF12-TNFSF13, TNFSF13, TNFSF13B, TNFSF14, TNFSF15, TNFSF18, TNFSF4, TNFSF8, TNFSF9, TNIK, TNIP1, TNIP2, TNIP3, TNK1, TNK2, TNKS, TNKS1BP1, TNKS2, TNKS2-AS1, TNMD, TNN, TNNC1, TNNC2, TNNI1, TNNI2, TNNI3, TNNI3K, TNNT1, TNNT2, TNNT3, TNP1, TNP2, TNPO1, TNPO2, TNPO3, TNR, TNRC18, TNRC18P1, TNRC6A, TNRC6B, TNRC6C, TNRC6C-AS1, TNS1, TNS3, TNS4, TNXA, TNXB, TOB1, TOB1-AS1, TOB2, TOB2P1, TOE1, TOLLIP, TOLLIP-AS1, TOM1, TOM1L1, TOM1L2, TOMM20, TOMM20L, TOMM22, TOMM34, TOMM40, TOMM40L, TOMM5, TOMM6, TOMM7, TOMM70A, TONSL, TOP1, TOP1MT, TOP1P1, TOP1P2, TOP2A, TOP2B, TOP3A, TOP3B, TOPAZ1, TOPBP1, TOPORS, TOPORS-AS1, TOR1A, TOR1AIP1, TOR1AIP2, TOR1B, TOR2A, TOR3A, TOR4A, TOX, TOX2, TOX3, TOX4, TP53, TP53AIP1, TP53BP1, TP53BP2, TP53I11, TP53I13, TP53I3, TP53INP1, TP53INP2, TP53RK, TP53TG1, TP53TG3, TP53TG3B, TP53TG3C, TP53TG3D, TP53TG5, TP63, TP73, TP73-AS1, TPBG, TPBGL, TPCN1, TPCN2, TPD52, TPD52L1, TPD52L2, TPD52L3, TPGS1, TPGS2, TPH1, TPH2, TPI1, TPI1P2, TPI1P3, TPK1, TPM1, TPM2, TPM3, TPM3P9, TPM4, TPMT, TPO, TPP1, TPP2, TPPP, TPPP2, TPPP3, TPR, TPRA1, TPRG1, TPRG1-AS1, TPRG1-AS2, TPRG1L, TPRKB, TPRN, TPRX1, TPRXL, TPSAB1, TPSB2, TPSD1, TPSG1, TPST1, TPST2, TPT1, TPT1-AS1, TPTE, TPTE2, TPTE2P1, TPTE2P3, TPTE2P5, TPTE2P6, TPTEP1, TPX2, TRA2A, TRA2B, TRABD, TRABD2A, TRABD2B, TRADD, TRAF1, TRAF2, TRAF3, TRAF3IP1, TRAF3IP2, TRAF3IP2-AS1, TRAF3IP3, TRAF4, TRAF5, TRAF6, TRAF7, TRAFD1, TRAIP, TRAK1, TRAK2, TRAM1, TRAM1L1, TRAM2, TRAM2-AS1, TRANK1, TRAP1, TRAPPC1, TRAPPC10, TRAPPC11, TRAPPC12, TRAPPC13, TRAPPC2, TRAPPC2B, TRAPPC2L, TRAPPC3, TRAPPC3L, TRAPPC4, TRAPPC5, TRAPPC6A, TRAPPC6B, TRAPPC8, TRAPPC9, TRAT1, TRDMT1, TRDN, TREH, TREM1, TREM2, TREML1, TREML2, TREML3P, TREML4, TREML5P, TRERF1, TRERNA1, TREX1, TREX2, TRG-AS1, TRH, TRHDE, TRHDE-AS1, TRHR, TRIAP1, TRIB1, TRIB2, TRIB3, TRIL, TRIM10, TRIM11, TRIM13, TRIM14, TRIM15, TRIM16, TRIM16L, TRIM17, TRIM2, TRIM21, TRIM22, TRIM23, TRIM24, TRIM25, TRIM26, TRIM27, TRIM28, TRIM29, TRIM3, TRIM31, TRIM31-AS1, TRIM32, TRIM33, TRIM34, TRIM35, TRIM36, TRIM37, TRIM38, TRIM39, TRIM39-RPP21, TRIM4, TRIM40, TRIM41, TRIM42, TRIM43, TRIM43B, TRIM44, TRIM45, TRIM46, TRIM47, TRIM48, TRIM49, TRIM49B, TRIM49C, TRIM49D1, TRIM49D2P, TRIM5, TRIM50, TRIM51, TRIM51HP, TRIM52, TRIM52-AS1, TRIM53AP, TRIM54, TRIM55, TRIM56, TRIM58, TRIM59, TRIM6, TRIM60, TRIM61, TRIM62, TRIM63, TRIM64, TRIM64B, TRIM64C, TRIM65, TRIM66, TRIM67, TRIM68, TRIM69, TRIM6-TRIM34, TRIM7, TRIM71, TRIM72, TRIM73, TRIM74, TRIM77, TRIM8, TRIM9, TRIML1, TRIML2, TRIO, TRIOBP, TRIP10, TRIP11, TRIP12, TRIP13, TRIP4, TRIP6, TR1QK, TRIT1, TRMT1, TRMT10A, TRMT10B, TRMT10C, TRMT11, TRMT112, TRMT12, TRMT13, TRMT1L, TRMT2A, TRMT2B, TRMT44, TRMT5, TRMT6, TRMT61A, TRMT61B, TRMU, TRNAU1AP, TRNP1, TRNT1, TRO, TROAP, TROVE2, TRPA1, TRPC1, TRPC2, TRPC3, TRPC4, TRPC4AP, TRPC5, TRPC5OS, TRPC6, TRPC7, TRPM1, TRPM2, TRPM2-AS, TRPM3, TRPM4, TRPM5, TRPM6, TRPM7, TRPM8, TRPS1, TRPT1, TRPV1, TRPV2, TRPV3, TRPV4, TRPV5, TRPV6, TRUB1, TRUB2, TRY2P, TSACC, TSC1, TSC2, TSC22D1, TSC22D1-AS1, TSC22D2, TSC22D3, TSC22D4, TSEN15, TSEN2, TSEN34, TSEN54, TSFM, TSG1, TSG101, TSGA10, TSGA10IP, TSGA13, TSHB, TSHR, TSHZ1, TSHZ2, TSHZ3, TSIX, TSKS, TSKU, TSL, TSLP, TSN, TSNARE1, TSNAX, TSNAX-DISC1, TSNAXIP1, TSPAN1, TSPAN10, TSPAN11, TSPAN12, TSPAN13, TSPAN14, TSPAN15, TSPAN16, TSPAN17, TSPAN18, TSPAN19, TSPAN2, TSPAN3, TSPAN31, TSPAN32, TSPAN33, TSPAN4, TSPAN5, TSPAN6, TSPAN7, TSPAN8, TSPAN9, TSPEAR, TSPEAR-AS1, TSPEAR-AS2, TSPO, TSPO2, TSPY26P, TSPYL1, TSPYL2, TSPYL4, TSPYL5, TSPYL6, TSR1, TSR2, TSR3, TSSC1, TSSC2, TSSC4, TSSK1B, TSSK2, TSSK3, TSSK4, TSSK6, TST, TSTA3, TSTD1, TSTD2, TSTD3, TTBK1, TTBK2, TTC1, TTC12, TTC13, TTC14, TTC16, TTC17, TTC19, TTC21A, TTC21B, TTC21B-AS1, TTC22, TTC23, TTC23L, TTC24, TTC25, TTC26, TTC27, TTC28, TTC28-AS1, TTC29, TTC3, TTC30A, TTC30B, TTC31, TTC32, TTC33, TTC34, TTC36, TTC37, TTC38, TTC39A, TTC39A-AS1, TTC39B, TTC39C, TTC39C-AS1, TTC3P1, TTC4, TTC5, TTC7A, TTC7B, TTC8, TTC9, TTC9B, TTC9C, TTF1, TTF2, TTI1, TTI2, TTK, TTL, TTLL1, TTLL10, TTLL11, TTLL12, TTLL13, TTLL2, TTLL3, TTLL4, TTLL5, TTLL6, TTLL7, TTLL9, TTN, TTN-AS1, TTPA, TTPAL, TTR, TTTY1, TTTY10, TTTY11, TTTY12, TTTY13, TTTY14, TTTY15, TTTY16, TTTY17A, TTTY17B, TTTY17C, TTTY18, TTTY19, TTTY1B, TTTY2, TTTY20, TTTY21, TTTY21B, TTTY22, TTTY23, TTTY23B, TTTY2B, TTTY3, TTTY3B, TTTY4, TTTY4B, TTTY4C, TTTY5, TTTY6, TTTY6B, TTTY7, TTTY7B, TTTY8, TTTY8B, TTTY9A, TTTY9B, TTYH1, TTYH2, TTYH3, TUB, TUBA1A, TUBA1B, TUBA1C, TUBA3C, TUBA3D, TUBA3E, TUBA3FP, TUBA4A, TUBA4B, TUBA8, TUBAL3, TUB-AS1, TUBB, TUBB1, TUBB2A, TUBB2B, TUBB3, TUBB4A, TUBB4B, TUBB6, TUBB8, TUBBP5, TUBD1, TUBE1, TUBG1, TUBG2, TUBGCP2, TUBGCP3, TUBGCP4, TUBGCP5, TUBGCP6, TUFM, TUFT1, TUG1, TULP1, TULP2, TULP3, TULP4, TUNAR, TUSC1, TUSC2, TUSC3, TUSC5, TUSC7, TUSC8, TUT1, TVP23A, TVP23B, TVP23C, TVP23C-CDRT4, TWF1, TWF2, TWIST1, TWIST2, TWISTNB, TWSG1, TXK, TXLNA, TXLNB, TXLNG, TXLNGY, TXN, TXN2, TXNDC11, TXNDC12, TXNDC12-AS1, TXNDC15, TXNDC16, TXNDC17, TXNDC2, TXNDC5, TXNDC8, TXNDC9, TXNIP, TXNL1, TXNL4A, TXNLAB, TXNRD1, TXNRD2, TXNRD3, TXNRD3NB, TYK2, TYMP, TYMS, TYMSOS, TYR, TYRO3, TYRO3P, TYROBP, TYRP1, TYSND1, TYW1, TYW1B, TYW3, TYW5, U2AF1, U2AF1L4, U2AF2, U2SURP, UACA, UAP1, UAP1L1, UBA1, UBA2, UBA3, UBA5, UBA52, UBA6, UBA6-AS1, UBA7, UBAC1, UBAC2, UBAC2-AS1, UBALD1, UBALD2, UBAP1, UBAP1L, UBAP2, UBAP2L, UBASH3A, UBASH3B, UBB, UBC, UBD, UBE2A, UBE2B, UBE2C, UBE2D1, UBE2D2, UBE2D3, UBE2D4, UBE2DNL, UBE2E1, UBE2E1-AS1, UBE2E2, UBE2E3, UBE2E4P, UBE2F, UBE2F-SCLY, UBE2G1, UBE2G2, UBE2H, UBE2I, UBE2J1, UBE2J2, UBE2K, UBE2L3, UBE2L6, UBE2M, UBE2MP1, UBE2N, UBE2NL, UBE2O, UBE2Q1, UBE2Q1-AS1, UBE2Q2, UBE2Q2L, UBE2Q2P1, UBE2Q2P2, UBE2QL1, UBE2R2, UBE2S, UBE2T, UBE2U, UBE2V1, UBE2V2, UBE2W, UBE2Z, UBE3A, UBE3B, UBE3C, UBE3D, UBE4A, UBE4B, UBFD1, UBIAD1, UBL3, UBL4A, UBL4B, UBL5, UBL7, UBL7-AS1, UBLCP1, UBN1, UBN2, UBOX5, UBOX5-AS1, UBP1, UBQLN1, UBQLN2, UBQLN3, UBQLN4, UBQLNL, UBR1, UBR2, UBR3, UBR4, UBR5, UBR7, UBTD1, UBTD2, UBTF, UBTFL1, UBXN1, UBXN10, UBXN11, UBXN2A, UBXN2B, UBXN4, UBXN6, UBXN7, UBXN8, UCA1, UCHL1, UCHL1-AS1, UCHL3, UCHL5, UCK1, UCK2, UCKL1, UCKL1-AS1, UCMA, UCN, UCN2, UCN3, UCP1, UCP2, UCP3, UEVLD, UFC1, UFD1L, UFL1, UFM1, UFSP1, UFSP2, UG0898H09, UGCG, UGDH, UGDH-AS1, UGGT1, UGGT2, UGP2, UGT1A1, UGT1A10, UGT1A3, UGT1A4, UGT1A5, UGT1A6, UGT1A7, UGT1A8, UGT1A9, UGT2A1, UGT2A2, UGT2A3, UGT2B10, UGT2B11, UGT2B15, UGT2B17, UGT2B28, UGT2B4, UGT2B7, UGT3A1, UGT3A2, UGT8, UHMK1, UHRF1, UHRF1 BP1, UHRF1BP1L, UHRF2, UIMC1, ULBP1, ULBP2, ULBP3, ULK1, ULK2, ULK3, ULK4, ULK4P1, ULK4P2, ULK4P3, UMAD1, UMOD, UMODL1, UMODL1-AS1, UMPS, UNC119, UNC119B, UNC13A, UNC13B, UNC13C, UNC13D, UNC45A, UNC45B, UNC50, UNC5A, UNC5B, UNC5B-AS1, UNC5C, UNC5CL, UNC5D, UNC79, UNC80, UNC93A, UNC93B1, UNCX, UNG, UNK, UNKL, UNQ6494, UOX, UPB1, UPF1, UPF2, UPF3A, UPF3B, UPK1A, UPK1 A-AS1, UPK1B, UPK2, UPK3A, UPK3B, UPK3BL, UPP1, UPP2, UPRT, UQCC1, UQCC2, UQCC3, UQCR10, UQCR11, UQCRB, UQCRBP1, UQCRC1, UQCRC2, UQCRFS1, UQCRH, UQCRHL, UQCRQ, URAD, URAHP, URB1, URB1-AS1, URB2, URGCP, URGCP-MRPS24, URI1, URM1, UROC1, UROD, UROS, USB1, USE1, USF1, USF2, USH1C, USH1G, USH2A, USHBP1, USMG5, USO1, USP1, USP10, USP11, USP12, USP12-AS1, USP12-AS2, USP13, USP14, USP15, USP16, USP17L1, USP17L10, USP17L11, USP17L12, USP17L13, USP17L15, USP17L17, USP17L18, USP17L19, USP17L2, USP17L20, USP17L21, USP17L22, USP17L24, USP17L25, USP17L26, USP17L27, USP17L28, USP17L29, USP17L3, USP17L30, USP17L4, USP17L5, USP17L6P, USP17L7, USP17L8, USP17L9P, USP18, USP19, USP2, USP20, USP21, USP22, USP24, USP25, USP26, USP27X, USP27X-AS1, USP28, USP29, USP2-AS1, USP3, USP30, USP30-AS1, USP31, USP32, USP32P1, USP32P2, USP33, USP34, USP35, USP36, USP37, USP38, USP39, USP3-AS1, USP4, USP40, USP42, USP43, USP44, USP45, USP46, USP46-AS1, USP47, USP48, USP49, USP5, USP50, USP51, USP53, USP54, USP6, USP6NL, USP7, USP8, USP9X, USPL1, UST, UTF1, UTP11L, UTP14A, UTP14C, UTP15, UTP18, UTP20, UTP23, UTP3, UTP6, UTRN, UTS2, UTS2B, UTS2R, UTY, UVRAG, UVSSA, UXS1, UXT, UXT-AS1, VAC14, VAC14-AS1, VAMP1, VAMP2, VAMP3, VAMP4, VAMP5, VAMP7, VAMP8, VANGL1, VANGL2, VAPA, VAPB, VARS, VARS2, VASH1, VASH2, VASN, VASP, VAT1, VAT1L, VAV1, VAV2, VAV3, VAV3-AS1, VAX1, VAX2, VBP1, VCAM1, VCAN, VCL, VCP, VCPIP1, VCPKMT, VCX, VCX2, VCX3A, VCX3B, VDAC1, VDAC2, VDAC3, VDR, VEGFA, VEGFB, VEGFC, VENTX, VENTXP1, VENTXP7, VEPH1, VEZF1, VEZT, VGF, VGLL1, VGLL2, VGLL3, VGLL4, VHL, VHLL, VIL1, VILL, VIM, VIM-AS1, VIMP, VIP, VIPAS39, VIPR1, VIPR1-AS1, VIPR2, VIT, VKORC1, VKORC1L1, VLDLR, VLDLR-AS1, VMA21, VMAC, VMO1, VMP1, VN1R1, VN1R10P, VN1R2, VN1R4, VN1R5, VNN1, VNN2, VNN3, VOPP1, VPRBP, VPREB1, VPREB3, VPS11, VPS13A, VPS13A-AS1, VPS13B, VPS13C, VPS13D, VPS16, VPS18, VPS25, VPS26A, VPS26B, VPS28, VPS29, VPS33A, VPS33B, VPS35, VPS36, VPS37A, VPS37B, VPS37C, VPS37D, VPS39, VPS41, VPS45, VPS4A, VPS4B, VPS51, VPS52, VPS53, VPS54, VPS72, VPS8, VPS9D1, VPS9D1-AS1, VRK1, VRK2, VRK3, VRTN, VSIG1, VSIG10, VSIG10L, VSIG2, VSIG4, VSIG8, VSNL1, VSTM1, VSTM2A, VSTM2A-OT1, VSTM2B, VSTM2L, VSTM4, VSTM5, VSX1, VSX2, VTA1, VTCN1, VT11A, VT11B, VTN, VTRNA1-1, VTRNA1-2, VTRNA1-3, VTRNA2-1, VWA1, VWA2, VWA3A, VWA3B, VWA5 A, VWA5B1, VWA5B2, VWA7, VWA8, VWA8-AS1, VWA9, VWC2, VWC2L, VWC2L-IT1, VWCE, VWDE, VWF, WAC, WAC-AS1, WAPAL, WARS, WARS2, WARS2-IT1, WAS, WASF1, WASF2, WASF3, WASH1, WASH2P, WASH3P, WASH5P, WASH7P, WASL, WBP1, WBP11, WBP11P1, WBP1L, WBP2, WBP2NL, WBP4, WBP5, WBSCR16, WBSCR17, WBSCR22, WBSCR27, WBSCR28, WDFY1, WDFY2, WDFY3, WDFY3-AS2, WDFY4, WDHD1, WDPCP, WDR1, WDR11, WDR11-AS1, WDR12, WDR13, WDR17, WDR18, WDR19, WDR20, WDR24, WDR25, WDR26, WDR27, WDR3, WDR31, WDR33, WDR34, WDR35, WDR36, WDR37, WDR38, WDR4, WDR41, WDR43, WDR44, WDR45, WDR45B, WDR46, WDR47, WDR48, WDR49, WDR5, WDR53, WDR54, WDR55, WDR59, WDR5B, WDR6, WDR60, WDR61, WDR62, WDR63, WDR64, WDR66, WDR7, WDR70, WDR72, WDR73, WDR74, WDR75, WDR76, WDR77, WDR78, WDR81, WDR82, WDR83, WDR83OS, WDR86, WDR86-AS1, WDR87, WDR88, WDR89, WDR90, WDR91, WDR92, WDR93, WDSUB1, WDTC1, WDYHV1, WEE1, WEE2, WEE2-AS1, WFDC1, WFDC10A, WFDC10B, WFDC11, WFDC12, WFDC13, WFDC2, WFDC21P, WFDC3, WFDC5, WFDC6, WFDC8, WFDC9, WFIKKN1, WFIKKN2, WFS1, WHAMM, WHAMMP1, WHAMMP2, WHAMMP3, WHSC1, WHSC1L1, WI2-2373IL2, WIBG, WIF1, WIPF1, WIPF2, WIPF3, WIPI1, WIPI2, WISP1, WISP2, WISP3, WIZ, WLS, WNK1, WNK2, WNK3, WNK4, WNT1, WNT10A, WNT10B, WNT11, WNT16, WNT2, WNT2B, WNT3, WNT3A, WNT4, WNT5A, WNT5B, WNT6, WNT7A, WNT7B, WNT8A, WNT8B, WNT9A, WNT9B, WRAP53, WRAP73, WRB, WRN, WRNIP1, WSB1, WSB2, WSCD1, WSCD2, WT1, WT1-AS, WTAP, WTAPP1, WTH3DI, WTIP, WWC1, WWC2, WWC2-AS1, WWC2-AS2, WWC3, WWOX, WWP1, WWP2, WWTR1, WWTR1-AS1, XAB2, XAF1, XAGE1B, XAGE1E, XAGE2, XAGE3, XAGE5, XBP1, XCL1, XCL2, XCR1, XDH, XG, XGY2, XIAP, XIRP1, XIRP2, XIRP2-AS1, XIST, XK, XKR3, XKR4, XKR5, XKR6, XKR7, XKR8, XKR9, XKRX, XPA, XPC, XPNPEP1, XPNPEP2, XPNPEP3, XPO1, XPO4, XPO5, XPO6, XPO7, XPOT, XPR1, XRCC1, XRCC2, XRCC3, XRCC4, XRCC5, XRCC6, XRCC6BP1, XRCC6P5, XRN1, XRN2, XRRA1, XXYLT1, XXYLT1-AS1, XXYLT1-AS2, XYLB, XYLT1, XYLT2, YAE1D1, YAF2, YAP1, YARS, YARS2, YBEY, YBX1, YBX2, YBX3, YBX3P1, YDJC, YEATS2, YEATS4, YES1, YIF1A, YIF1B, YIPF1, YIPF2, YIPF3, YIPF5, YIPF6, YIPF7, YJEFN3, YKT6, YLPM1, YME1L1, YOD1, YPEL1, YPEL2, YPEL3, YPEL4, YPEL5, YRDC, YTHDC1, YTHDC2, YTHDF1, YTHDF2, YTHDF3, YTHDF3-AS1, YWHAB, YWHAE, YWHAEP1, YWHAEP7, YWHAG, YWHAH, YWHAQ, YWHAZ, YY1, YY1AP1, YY1P2, YY2, ZACN, ZADH2, ZAK, ZAN, ZAP70, ZAR1, ZAR1L, ZASP, ZBBX, ZBED1, ZBED2, ZBED3, ZBED3-AS1, ZBED4, ZBED5, ZBED5-AS1, ZBED6, ZBED6CL, ZBED8, ZBED9, ZBP1, ZBTB1, ZBTB10, ZBTB11, ZBTB11-AS1, ZBTB12, ZBTB14, ZBTB16, ZBTB17, ZBTB18, ZBTB2, ZBTB20, ZBTB20-AS1, ZBTB20-AS3, ZBTB20-AS4, ZBTB21, ZBTB22, ZBTB24, ZBTB25, ZBTB26, ZBTB3, ZBTB32, ZBTB33, ZBTB34, ZBTB37, ZBTB38, ZBTB39, ZBTB4, ZBTB40, ZBTB41, ZBTB42, ZBTB43, ZBTB44, ZBTB45, ZBTB46, ZBTB46-AS1, ZBTB47, ZBTB48, ZBTB49, ZBTB5, ZBTB6, ZBTB7A, ZBTB7B, ZBTB7C, ZBTB8A, ZBTB8B, ZBTB8OS, ZBTB9, ZC2HC1A, ZC2HC1B, ZC2HC1C, ZC3H10, ZC3H11A, ZC3H12A, ZC3H12B, ZC3H12C, ZC3H12D, ZC3H13, ZC3H14, ZC3H15, ZC3H18, ZC3H3, ZC3H4, ZC3H6, ZC3H7A, ZC3H7B, ZC3H8, ZC3HAV1, ZC3HAV1L, ZC3HC1, ZC4H2, ZCCHC10, ZCCHC11, ZCCHC12, ZCCHC13, ZCCHC14, ZCCHC16, ZCCHC17, ZCCHC18, ZCCHC2, ZCCHC24, ZCCHC3, ZCCHC4, ZCCHC5, ZCCHC6, ZCCHC7, ZCCHC8, ZCCHC9, ZCRB1, ZCWPW1, ZCWPW2, ZDBF2, ZDHHC1, ZDHHC11, ZDHHC12, ZDHHC13, ZDHHC14, ZDHHC15, ZDHHC16, ZDHHC17, ZDHHC18, ZDHHC19, ZDHHC2, ZDHHC20, ZDHHC21, ZDHHC22, ZDHHC23, ZDHHC24, ZDHHC3, ZDHHC4, ZDHHC5, ZDHHC6, ZDHHC7, ZDHHC8, ZDHHC8P1, ZDHHC9, ZEB1, ZEB1-AS1, ZEB^{2,} ZEB²-AS1, ZER1, ZFAND1, ZFAND2A, ZFAND2B, ZFAND3, ZFAND4, ZFAND5, ZFAND6, ZFAS1, ZFAT, ZFAT-AS1, ZFC3H1, ZFHX2, ZFHX3, ZFHX4, ZFHX4-AS1, ZFP1, ZFP14, ZFP2, ZFP28, ZFP3, ZFP30, ZFP36, ZFP36L1, ZFP36L2, ZFP37, ZFP41, ZFP42, ZFP57, ZFP62, ZFP64, ZFP69, ZFP69B, ZFP82, ZFP90, ZFP91, ZFP91-CNTF, ZFP92, ZFPL1, ZFPM1, ZFPM2, ZFPM2-AS1, ZFR, ZFR2, ZFX, ZFX-AS1, ZFYVE1, ZFYVE16, ZFYVE19, ZFYVE21, ZFYVE26, ZFYVE27, ZFYVE28, ZFYVE9, ZG16, ZG16B, ZGLP1, ZGPAT, ZGRF1, ZHX1, ZHX1-C8orf76, ZHX2, ZHX3, ZIC1, ZIC2, ZIC3, ZIC4, ZIC5, ZIK1, ZIM2, ZIM2-AS1, ZIM3, ZKSCAN1, ZKSCAN2, ZKSCAN3, ZKSCAN4, ZKSCAN5, ZKSCAN7, ZKSCAN8, ZMAT1, ZMAT2, ZMAT3, ZMAT4, ZMAT5, ZMIZ1, ZMIZ1-AS1, ZMIZ2, ZMPSTE24, ZMYM1 ZMYM2, ZMYM3, ZMYM4, ZMYM5, ZMYM6, ZMYM6NB, ZMYND10, ZMYND11, ZMYND12, ZMYND15, ZMYND19, ZMYND8, ZNF10, ZNF100, ZNF101, ZNF106, ZNF107, ZNF112, ZNF114, ZNF117, ZNF12, ZNF121, ZNF124, ZNF131, ZNF132, ZNF133, ZNF134, ZNF135, ZNF136, ZNF137P, ZNF138, ZNF14, ZNF140, ZNF141, ZNF142, ZNF143, ZNF146, ZNF148, ZNF154, ZNF155, ZNF157, ZNF16, ZNF160, ZNF165, ZNF169, ZNF17, ZNF174, ZNF175, ZNF177, ZNF18, ZNF180, ZNF181, ZNF182, ZNF184, ZNF185, ZNF189, ZNF19, ZNF192P1, ZNF195, ZNF197, ZNF197-AS1, ZNF2, ZNF20, ZNF200, ZNF202, ZNF204P, ZNF205, ZNF205-AS1, ZNF207, ZNF208, ZNF211, ZNF212, ZNF213, ZNF213-AS1, ZNF214, ZNF215, ZNF217, ZNF219, ZNF22, ZNF221, ZNF222, ZNF223, ZNF224, ZNF225, ZNF226, ZNF227, ZNF229, ZNF23, ZNF230, ZNF232, ZNF233, ZNF234, ZNF235, ZNF236, ZNF239, ZNF24, ZNF248, ZNF25, ZNF250, ZNF251, ZNF252P, ZNF252P-AS1, ZNF253, ZNF254, ZNF256, ZNF257, ZNF26, ZNF260, ZNF263, ZNF264, ZNF266, ZNF267, ZNF268, ZNF271P, ZNF273, ZNF274, ZNF275, ZNF276, ZNF277, ZNF28, ZNF280A, ZNF280B, ZNF280C, ZNF280D, ZNF281, ZNF282, ZNF283, ZNF284, ZNF285, ZNF286A, ZNF286B, ZNF287, ZNF292, ZNF295-AS1, ZNF296, ZNF3, ZNF30, ZNF300, ZNF300P1, ZNF302, ZNF304, ZNF30-AS1, ZNF311, ZNF316, ZNF317, ZNF318, ZNF319, ZNF32, ZNF320, ZNF321P, ZNF322, ZNF324, ZNF324B, ZNF326, ZNF329, ZNF32-AS1, ZNF32-AS2, ZNF32-AS3, ZNF330, ZNF331, ZNF333, ZNF334, ZNF335, ZNF337, ZNF337-AS1, ZNF33A, ZNF33B, ZNF33BP1, ZNF34, ZNF341, ZNF341-AS1, ZNF343, ZNF345, ZNF346, ZNF347, ZNF35, ZNF350, ZNF350-AS1, ZNF354A, ZNF354B, ZNF354C, ZNF358, ZNF362, ZNF365, ZNF366, ZNF367, ZNF37A, ZNF37BP, ZNF382, ZNF383, ZNF384, ZNF385A, ZNF385B, ZNF385C, ZNF385D ZNF385D-AS1, ZNF385D-AS2, ZNF391, ZNF394, ZNF395, ZNF396, ZNF397, ZNF398, ZNF404, ZNF407, ZNF408, ZNF41, ZNF410, ZNF414, ZNF415, ZNF416, ZNF417, ZNF418, ZNF419, ZNF420, ZNF423, ZNF425, ZNF426, ZNF428, ZNF429, ZNF43, ZNF430, ZNF431, ZNF432, ZNF433, ZNF436, ZNF436-AS1, ZNF438, ZNF439, ZNF44, ZNF440, ZNF441, ZNF442, ZNF443, ZNF444, ZNF445, ZNF446, ZNF449, ZNF45, ZNF451, ZNF454, ZNF460, ZNF461, ZNF462, ZNF467, ZNF468, ZNF469, ZNF470, ZNF471, ZNF473, ZNF474, ZNF479, ZNF48, ZNF480, ZNF483, ZNF484, ZNF485, ZNF486, ZNF487, ZNF488, ZNF490, ZNF491, ZNF492, ZNF493, ZNF496, ZNF497, ZNF500, ZNF501, ZNF502, ZNF503, ZNF503-AS1, ZNF503-AS2, ZNF506, ZNF507, ZNF510, ZNF511, ZNF512, ZNF512B, ZNF513, ZNF514, ZNF516, ZNF517, ZNF518A, ZNF518B, ZNF519, ZNF521, ZNF524, ZNF525, ZNF526, ZNF527, ZNF528, ZNF528-AS1, ZNF529, ZNF529-AS1, ZNF530, ZNF532, ZNF534, ZNF536, ZNF540, ZNF541, ZNF542P, ZNF543, ZNF544, ZNF546, ZNF547, ZNF548, ZNF549, ZNF550, ZNF551, ZNF552, ZNF554, ZNF555, ZNF556, ZNF557, ZNF558, ZNF559, ZNF559-ZNF177, ZNF560, ZNF561, ZNF561-AS1, ZNF562, ZNF563, ZNF564, ZNF565, ZNF566, ZNF567, ZNF568, ZNF569, ZNF57, ZNF570, ZNF571, ZNF571-AS1, ZNF572, ZNF573, ZNF574, ZNF575, ZNF576, ZNF577, ZNF578, ZNF579, ZNF580, ZNF581, ZNF582, ZNF582-AS1, ZNF583, ZNF584, ZNF585A, ZNF585B, ZNF586, ZNF587, ZNF587B, ZNF589, ZNF592, ZNF593, ZNF594, ZNF595, ZNF596, ZNF597, ZNF598, ZNF599, ZNF600, ZNF605, ZNF606, ZNF607, ZNF608, ZNF609, ZNF610, ZNF611, ZNF613, ZNF614, ZNF615, ZNF616, ZNF618, ZNF619, ZNF620, ZNF621, ZNF622, ZNF623, ZNF624, ZNF625, ZNF625-ZNF20, ZNF626, ZNF627, ZNF628, ZNF629, ZNF630, ZNF630-AS1, ZNF638, ZNF639, ZNF641, ZNF644, ZNF645, ZNF646, ZNF648, ZNF649, ZNF649-AS1, ZNF652, ZNF653, ZNF654, ZNF655, ZNF658, ZNF658B, ZNF660, ZNF662, ZNF663P, ZNF664, ZNF664-FAM101A, ZNF665, ZNF667, ZNF667-AS1, ZNF668, ZNF669, ZNF670, ZNF670-ZNF695, ZNF671, ZNF672, ZNF674, ZNF674-AS1, ZNF675, ZNF676, ZNF677, ZNF678, ZNF679, ZNF680, ZNF681, ZNF682, ZNF683, ZNF684, ZNF687, ZNF688, ZNF689, ZNF69, ZNF691, ZNF692, ZNF695, ZNF696, ZNF697, ZNF699, ZNF7, ZNF70, ZNF700, ZNF701, ZNF702P, ZNF703, ZNF704, ZNF705A, ZNF705B, ZNF705D, ZNF705E, ZNF705G, ZNF706, ZNF707, ZNF708, ZNF709, ZNF71, ZNF710, ZNF711, ZNF713, ZNF714, ZNF716, ZNF717, ZNF718, ZNF720, ZNF721, ZNF724P, ZNF726, ZNF727, ZNF728, ZNF729, ZNF730, ZNF732, ZNF733P, ZNF735, ZNF736, ZNF737, ZNF738, ZNF74, ZNF740, ZNF746, ZNF747, ZNF749, ZNF750, ZNF75A, ZNF75D, ZNF76, ZNF761, ZNF763, ZNF764, ZNF765, ZNF766, ZNF767P, ZNF768, ZNF77, ZNF770, ZNF771, ZNF772, ZNF773, ZNF774, ZNF775, ZNF776, ZNF777, ZNF778, ZNF780A, ZNF780B, ZNF781, ZNF782, ZNF783, ZNF784, ZNF785, ZNF786, ZNF787, ZNF788, ZNF789, ZNF79, ZNF790, ZNF790-AS1, ZNF791, ZNF792, ZNF793, ZNF793-AS1, ZNF799, ZNF8, ZNF80, ZNF800, ZNF804A, ZNF804B, ZNF805, ZNF808, ZNF81, ZNF812, ZNF813, ZNF814, ZNF815P, ZNF816, ZNF816-ZNF321P, ZNF818P, ZNF821, ZNF823, ZNF826P, ZNF827, ZNF829, ZNF83, ZNF830, ZNF831, ZNF833P, ZNF835, ZNF836, ZNF837, ZNF839, ZNF84, ZNF841, ZNF843, ZNF844, ZNF845, ZNF846, ZNF847P, ZNF85, ZNF850, ZNF852, ZNF853, ZNF860, ZNF862, ZNF865, ZNF876P, ZNF878, ZNF879, ZNF880, ZNF883, ZNF890P, ZNF891, ZNF90, ZNF91, ZNF92, ZNF93, ZNF98, ZNF99, ZNFX1, ZNHIT1, ZNHIT2, ZNHIT3, ZNHIT6, ZNRD1, ZNRD1-AS1, ZNRF1, ZNRF2, ZNRF2P1, ZNRF2P2, ZNRF3, ZNRF3-AS1, ZNRF4, ZP1, ZP2, ZP3, ZP4, ZPBP, ZPBP2, ZPLD1, ZPR1, ZRANB1, ZRANB2, ZRANB2-AS1, ZRANB2-AS2, ZRANB3, ZRSR2, ZSCAN1, ZSCAN10, ZSCAN12, ZSCAN12P1, ZSCAN16, ZSCAN16-AS1, ZSCAN18, ZSCAN2, ZSCAN20, ZSCAN21, ZSCAN22, ZSCAN23, ZSCAN25, ZSCAN26, ZSCAN29, ZSCAN30, ZSCAN31, ZSCAN32, ZSCAN4, ZSCAN5A, ZSCAN5B, ZSCAN9, ZSWIM1, ZSWIM2, ZSWIM3, ZSWIM4, ZSWIM5, ZSWIM6, ZSWIM7, ZSWIM8, ZSWIM8-AS1, ZUFSP, ZW10, ZWILCH, ZWINT, ZXDA, ZXDB, ZXDC, ZYG11A, ZYG-11B, ZYX, ZZEF1, and ZZZ3.

[0102] Lengthy Table 1 and Lengthy Table 2 describe the target gene, the target reference ID to determine (e.g., NM_001080438 for A3GALT2), the protein encoded by the target transcript if it is coding (NP_001073907 for A3GALT2), the nature of the target transcript (e.g., Coding for A3GALT2), the location of the TSS (e.g., chr1:33321098 minus strand for A3GALT2) and the sequence identifier for the TSS core (e.g., SEQ ID NO: 1 for the TSS core for A3GALT2). The saRNA of the present invention may be produced by any suitable method, for example synthetically or by expression in cells using standard molecular biology techniques which are well-known to a person of ordinary skill in the art. For example, the saRNA of the present invention may be chemically synthesized or recombinantly produced using methods known in the art.

[0103] Lengthy Table 1 describes coding target genes and their TSS locations.

[0104] Lengthy Table 2 describes non-coding target genes and their TSS locations.

[0105] The saRNAs of the present invention may be single-stranded and comprise 14-30 nucleotides. The sequence of a single-stranded saRNA may have at least 60%, 70%, 80% or 90% identity with a sequence such as, but not limited to, SEQ ID NOs: 4048-315235, 318727-584784, 589062-913309, 917532-1241079, 1245402-1559931, 1564373-1879188, and 1889208-2585259.

[0106] In one embodiment, the single-stranded saRNA comprises a sequence such as, but not limited to, SEQ ID NOs: 4048-315235, 318727-584784, 589062-913309, 917532-1241079, 1245402-1559931, 1564373-1879188, and 1889208-2585259.

[0107] In one embodiment, the saRNA is a single-stranded saRNA which comprises an anti sense sequence such as, but not limited to any of the antisense sequences described in the sequence listing referenced at the beginning of this application.

[0108] In one embodiment, the saRNA is a single-stranded saRNA which comprises an antisense sequence such as, but not limited to any of the sense sequences described in the sequence listing referenced at the beginning of this application.

[0109] The single stranded saRNAs of the present invention may be modified or unmodified.

[0110] In one embodiment, the single-stranded saRNA may have a 3′ tail.

[0111] In one embodiment, the saRNAs may be double-stranded. The two strands form a duplex, also known as an saRNA duplex, and each strand comprises 14-30 nucleotides. The first strand of a double-stranded saRNA may have at least 60%, 70%, 80% or 90% identity with a sequence such as, but not limited to, SEQ ID NOs: 4048-315235, 318727-584784, 589062-913309, 917532-1241079, 1245402-1559931, 1564373-1879188, and 1889208-2585259. In one embodiment, the first strand of the double-stranded saRNA comprises a sequence such as, but not limited to, SEQ ID NOs: 4048-315235, 318727-584784, 589062-913309, 917532-1241079, 1245402-1559931. 1564373-1879188, and 1889208-2585259. The second strand of a double-stranded saRNA may have at least 60%, 70%, 80% or 90% identity with a sequence such as, but not limited to, SEQ ID NOs: 4048-315235, 318727-584784, 589062-913309, 917532-1241079, 1245402-1559931, 1564373-1879188, and 1889208-2585259. In one embodiment, the second. strand of the double-stranded saRNA comprises a sequence such as, but not limited to, SEQ ID NOs: 4048-315235, 318727-584784, 589062-913309, 917532-1241079, 1245402-1559931, 1564373-1879188, and 1889208-2585259. In one embodiment, the double-stranded saRNA may have a 3′ overhang on each strand.

[0112] In one embodiment, the saRNA of the present invention is an saRNA duplex. The saRNA duplex may be a pair of sense and anti sense sequences such as, but not limited to, any of the sense sequence and corresponding antisense sequences described in the sequence listing referenced at the beginning of this application. The saRNA of the present invention may be the pair of the sense sequence and antisense sequence described in the sequence listing referenced at the beginning of this application.

[0113] The double-stranded saRNA of the present invention may be modified or unmodified.

### Bifunction Oligonucleotides

[0114] Bifunction or dual-functional oligonucleotides, e.g., saRNA may be designed to up-regulate the expression of a first gene and down-regulate the expression of at least one second gene. One strand of the dual-functional oligonucleotide activates the expression of the first gene and the other strand inhibits the expression of the second gene. Each strand might further comprise a Dicer substrate sequence.

Chemical Modifications of saRNA

[0115] Herein, in saRNA, the terms “modification” or, as appropriate, “modified” refer to structural and/or chemical modifications with respect to A, G, U or C ribonucleotides.

[0116] Nucleotides in the saRNAs of the present invention may comprise non-standard nucleotides, such as non-naturally occurring nucleotides or chemically synthesized nucleotides or deoxynucleotides. The saRNA of the present invention may include any useful modification, such as to the sugar, the nucleobase, or the internucleoside linkage (e.g. to a linking phosphate/to a phosphodiester linkage/to the phosphodiester backbone). One or more atoms of a pyrimidine nucleobase may be replaced or substituted with optionally substituted amino, optionally substituted thiol, optionally substituted alkyl (e.g., methyl or ethyl), or halo (e.g., chloro or fluoro). In certain embodiments, modifications (e.g., one or more modifications) are present in each of the sugar and the internucleoside linkage. Modifications according to the present invention may be modifications of ribonucleic acids (RNAs) to deoxyribonucleic acids (DNAs), threose nucleic acids (TNAs), glycol nucleic acids (GNAs), peptide nucleic acids (PNAs), locked nucleic acids (LNAs) or hybrids thereof. In a non-limiting example, the 2′-OH of U is substituted with 2′-OMe.

[0117] In one embodiment, the saRNAs of the present inventioncomprise at least one modification described herein.

[0118] In another embodiment, the saRNA is an saRNA duplex and the sense strand and antisense sequence may independently comprise at least one modification. As a non-limiting example, the sense sequence may comprises a modification and the antisense strand may be unmodified. As another non-limiting example, the anti sense sequence may comprises a modification and the sense strand may be unmodified. As yet another non-limiting example, the sense sequence may comprises more than one modification and the antisense strand may comprise one modification. As a non-limiting example, the antisense sequence may comprises more than one modification and the sense strand may comprise one modification.

[0119] The saRNA of the present invention can include a combination of modifications to the sugar, the nucleobase, and/or the internucleoside linkage. These combinations can include any one or more modifications described herein or in International Application Publication WO2013/052523 filed Oct. 3, 2012, in particular Formulas (Ia)-(Ia-5), (Ib)-(If), (IIa)-(IIp), (IIb-1), (IIb-2), (IIc-1)-(IIc-2), (IIn-1), (IIn-2), (IVa)-(IV1), and (IXa)-(IXr), the contents of which are incorporated herein by reference in their entirety.

[0120] The saRNA of the present invention may or may not be uniformly modified along the entire length of the molecule. For example, one or more or all types of nucleotide (e.g., purine or pyrimidine, or any one or more or all of A, G, U, C) may or may not be uniformly modified in the saRNA of the invention. In some embodiments, all nucleotides X in an saRNA of the invention are modified, wherein X may be any one of nucleotides A, G, U, C, or any one of the combinations A+G, A+U, A+C, G+U, G±C, U+C, A+G+U, A+G±C, G+U+C or A+G+C.

[0121] Different sugar modifications, nucleotide modifications, and/or internucleoside linkages (e.g., backbone structures) may exist at various positions in an saRNA. One of ordinary skill in the art will appreciate that the nucleotide analogs or other modification(s) may be located at any position(s) of an saRNA such that the function of saRNA is not substantially decreased. The saRNA of the present invention may contain from about 1% to about 100% modified nucleotides (either in relation to overall nucleotide content, or in relation to one or more types of nucleotide, i.e. any one or more of A, G, U or C) or any intervening percentage (e.g., from 1% to 20%, from 1% to 25%, from 1% to 50%, from 1% to 60%, from 1% to 70%, from 1% to 80%, from 1% to 90%, from 1% to 95%, from 10% to 20%, from 10% to 25%, from 10% to 50%, from 10% to 60%, from 10% to 70%, from 10% to 80%, from 10% to 90%, from 10% to 95%, from 10% to 100%, from 20% to 25%, from 20% to 50%, from 20% to 60%, from 20% to 70%, from 20% to 80%, from 20% to 90%, from 20% to 95%, from 20% to 100%, from 50% to 60%, from 50% to 70%, from 50% to 80%, from 50% to 90%, from 50% to 95%, from 50% to 100%, from 70% to 80%, from 70% to 90%, from 70% to 95%, from 70% to 100%, from 80% to 90%, from 80% to 95%, from 80% to 100%, from 90% to 95%, from 90% to 100%, and from 95% to 100%).

[0122] In some embodiments, the saRNA of the present invention may be modified to be a spherical nucleic acid (SNA) or a circular nucleic acid. The terminals of the saRNA of the present invention may be linked by chemical reagents or enzymes, producing spherical saRNA that has no free ends. Spherical saRNA is expected to be more stable than its linear counterpart and to be resistant to digestion with RNase R exonuclease. Spherical saRNA may further comprise other structural and/or chemical modifications with respect to A, G, U or C ribonucleotides.

[0123] In some embodiments, the saRNA of the present invention may comprise inverted deoxy abasic modifications on the passenger strand. The at least one inverted deoxy abasic modification may be on 5′ end, or 3′ end, or both ends of the passenger strand. The inverted deoxy basic modification may encourage preferential loading of the guide strand.

[0124] The saRNA of the present invention may be modified with any modifications of an oligonucleotide or polynucleotide disclosed in pages 136 to 247 of PCT Publication WO2013/151666 published Oct. 10, 2013, the contents of which are incorporated herein by reference in their entirety.

saRNA Conjugates and Combinations

[0125] Conjugation may result in increased stability and/or half-life and may be particularly useful in targeting the saRNA of the present invention to specific sites in the cell, tissue or organism. The saRNA of the present invention can be designed to be conjugated to other polynucleotides, dyes, intercalating agents (e.g. acridines), cross-linkers (e.g. psoralene, mitomycin C), porphyrins (TPPC4, texaphyrin, Sapphyrin), polycyclic aromatic hydrocarbons (e.g., phenazine, dihydrophenazine), artificial endonucleases (e.g. EDTA), alkylating agents, phosphate, amino, mercapto, PEG (e.g., PEG-40K), MPEG, [MPEG]₂, polyamino, alkyl, substituted alkyl, radiolabeled markers, enzymes, haptens (e.g. biotin), transport/absorption facilitators (e.g., aspirin, vitamin E, folic acid), synthetic ribonucleases, proteins, e.g., glycoproteins, or peptides, e.g., molecules having a specific affinity for a co-ligand, or antibodies e.g., an antibody, that binds to a specified cell type such as a cancer cell, endothelial cell, or bone cell, hormones and hormone receptors, non-peptidic species, such as lipids, lectins, carbohydrates, vitamins, cofactors, or a drug. Suitable conjugates for nucleic acid molecules are disclosed in International Publication WO 2013/090648 filed Dec. 14, 2012, the contents of which are incorporated herein by reference in their entirety.

[0126] According to the present invention, saRNA of the present invention may be administered with, or further include one or more of RNAi agents, small interfering RNAs (siRNAs), small hairpin RNAs (shRNAs), long non-coding RNAs (IncRNAs), enhancer RNAs, enhancer-derived RNAs or enhancer-driven RNAs (eRNAs microRNAs (miRNAs), miRNA binding sites, antisense RNAs, ribozymes, catalytic DNA, tRNA, RNAs that induce triple helix formation, aptamers or vectors, and the like to achieve different functions. The one or more RNAi agents, small interfering RNAs (siRNAs), small hairpin RNAs (shRNAs), long non-coding RNAs (lncRNA), microRNAs (miRNAs), miRNA binding sites, antisense RNAs, ribozymes, catalytic DNA, tRNA, RNAs that induce triple helix formation, aptamers or vectors may comprise at least one modification or substitution.

[0127] In some embodiments, the modification is selected from a chemical substitution of the nucleic acid at a sugar position, a chemical substitution at a phosphate position and a chemical substitution at a base position. In other embodiments, the chemical modification is selected from incorporation of a modified nucleotide; 3′ capping; conjugation to a high molecular weight, non-immunogenic compound; conjugation to a lipophilic compound; and incorporation of phosphorothioate into the phosphate backbone. In one embodiment, the high molecular weight, non-immunogenic compound is polyalkylene glycol, or polyethylene glycol (PEG).

[0128] In one embodiment, saRNA comprising at least one modification may show efficacy in proliferating cells.

[0129] In one embodiment, saRNA of the present invention may be attached to a transgene so it can be co-expressed from an RNA polymerase II promoter. In a non-limiting example, saRNA of the present invention is attached to green fluorescent protein gene (GFP).

[0130] In one embodiment, saRNA of the present invention may be attached to a DNA or RNA aptamer, thereby producing saRNA-aptamer conjugate. Aptamers are oligonucleotides or peptides with high selectivity, affinity and stability. They assume specific and stable three-dimensional shapes, thereby providing highly specific, tight binding to target molecules. An aptamer may be a nucleic acid species that has been engineered through repeated rounds of in vitro selection or equivalently, SELEX (systematic evolution of ligands by exponential enrichment) to bind to various molecular targets such as small molecules, proteins, nucleic acids, and even cells, tissues and organisms. Nucleic acid aptatners have specific binding affinity to molecules through interactions other than classic Watson-Crick base pairing. Nucleic acid aptamers, like peptides generated by phage display or monoclonal antibodies (mAbs), are capable of specifically binding to selected targets and, through binding, block their targets' ability to function. In some cases, aptamers may also be peptide aptamers. For any specific molecular target, nucleic acid aptamers can be identified from combinatorial libraries of nucleic acids, e.g. by SELEX. Peptide aptamers may be identified using a yeast two hybrid system. A skilled person is therefore able to design suitable aptamers for delivering the saRNAs or cells of the present invention to target cells such as liver cells. DNA aptamers, RNA aptamers and peptide aptamers are contemplated. Administration of saRNA of the present invention to the liver using liver-specific aptamers is preferred.

[0131] As used herein, a typical nucleic acid aptamer is approximately 10-15 kDa in size (20-45 nucleotides), binds its target with at least nanomolar affinity, and discriminates against closely related targets. Nucleic acid aptamers may be ribonucleic acid, deoxyribonucleic acid, or mixed ribonucleic acid and deoxyribonucleic acid. Aptamers may be single-stranded ribonucleic acid, deoxyribonucleic acid or mixed ribonucleic acid and deoxyribonucleic acid. Aptamers may comprise at least one chemical modification.

[0132] A suitable nucleotide length for an aptamer ranges from about 15 to about 100 nucleotides (nt), and in various other embodiments, 15-30 nt, 20-25 nt, 30-100 nt, 30-60 nt, 25-70 nt, 25-60 nt, 40-60 nt, 25-40 nt, 30-40 nt, any of 22, 23, 24, 25, 26, 27, 28, 29, 30, 31, 32, 33, 34, 35, 36, 37, 38, 39 or 40 nt or 40-70 nt in length. However, the sequence can be designed with sufficient flexibility such that it can accommodate interactions of aptamers with two targets at the distances described herein. Aptamers may be further modified to provide protection from nuclease and other enzymatic activities. The aptamer sequence can be modified by any suitable methods known in the art.

[0133] The saRNA-aptamer conjugate may be formed using any known method for linking two moieties, such as direct chemical bond formation, linkage via a linker such as streptavidin and so on.

[0134] In one embodiment, saRNA of the present invention may be attached to an antibody. Methods of generating antibodies against a target cell surface receptor are well known. The saRNAs of the invention may be attached to such antibodies with known methods, for example using RNA carrier proteins. The resulting complex may then be administered to a subject and taken up by the target cells via receptor-mediated endocytosis.

[0135] In one embodiment, saRNA of the present invention may be conjugated with lipid moieties such as a cholesterol moiety (Letsinger et al., Proc. Natl. Acid. Sci. USA, 1989, 86: 6553-6556), cholic acid (Manoharan et al., Biorg. Med. Chem. Let., 1994, 4:1053-1060), a thioether, e.g., beryl-5-tritylthiol (Manoharan et al., Ann. N.Y. Acad. Sci., 1992, 660:306-309; Manoharan et al., Biorg. Med. Chem. Let., 1993, 3:2765-2770), a thiocholesterol (Oberhauser et al., Nucl. Acids Res., 1992, 20:533-538), an aliphatic chain, e.g., dodecandiol or undecyl residues (Saison-Behmoaras et al., EMBO J, 1991, 10:1111-1118; Kabanov et al., FEBS Lett., 1990, 259:327-330; Svinarchuk et al., Biochimie, 1993, 75:49-54), a phospholipid, e.g., di-hexadecyl-rac-glycerol or triethyl-ammonium 1,2-di-O-hexadecyl-rac-glycero-3-Hphosphonate (Manoharan et al., Tetrahedron Lett., 1995, 36:3651-3654; Shea et al., Nucl. Acids Res., 1990, 18:3777-3783), a polyamine or a polyethylene glycol chain (Manoharan et al., Nucleosides & Nucleotides, 1995, 14:969-973), or adamantane acetic acid (Manoharan et al., Tetrahedron Lett., 1995, 36:3651-3654), a palmityl moiety (Mishra et al., Biochim. Biophys. Acta, 1995, 1264:229-237), or an octadecylamine or hexylamino-carbonyloxycholesterol moiety (Crooke et al., J. Pharmacol. Exp. Ther., 1996, 277:923-937), the content of each of which is herein incorporated by reference in its entirety.

[0136] In one embodiment, the saRNA of the present invention is conjugated with a ligand. In one non-limiting example, the ligand may be any ligand disclosed in US 20130184328 to Ma.noharan et al., the contents of which are incorporated herein by reference in their entirety. The conjugate has a formula of Ligand-[linker]ₒₚₜᵢₒₙₐₗ-[tether]ₒₚₜᵢₒₙₐₗ-oligonucleotide agent. The oligonucleotide agent may comprise a subunit having formulae (I) disclosed by US 20130184328 to Manoharan et al., the contents of which are incorporated herein by reference in their entirety, In another non-limiting example, the ligand may be any ligand disclosed in US 20130317081 to Akinc et al., the contents of which are incorporated herein by reference in their entirety, such as a lipid, a protein, a hormone, or a carbohydrate ligand of Formula II-XXVI. The ligand may be coupled with the saRNA with a bivalent or traivalent branched linker in Formula XXXI-XXXV disclosed in Akinc.

[0137] Representative U.S. patents that teach the preparation of such nucleic acid/lipid conjugates include, but are not limited to, U.S. Pat. Nos. 4,828,979; 4,948,882; 5,218,105; 5,525,465; 5,541,313; 5,545,730; 5,552,538; 5,578,717, 5,580,731; 5,591,584; 5,109,124; 5,118,802; 5,138,045; 5,414,077; 5,486,603; 5,512,439; 5,578,718; 5,608,046; 4,587,044; 4,605,735; 4,667,025; 4,762,779; 4,789,737; 4,824,941; 4,835,263; 4,876,335; 4,904,582; 4,958,013; 5,082,830; 5,112,963; 5,214,136; 5,082,830; 5,112,963; 5,214,136; 5,245,022; 5,254,469; 5,258,506; 5,262,536; 5,272,250; 5,292,873; 5,317,098; 5,371,241, 5,391,723; 5,416,203, 5,451,463; 5,510,475; 5.512.667; 5,514,785; 5,565,552; 5,567,810; 5,574,142; 5,585,481; 5,587,371; 5,595,726; 5,597,696; 5,599,923; 5,599,928 and 5,688,941, the content of each of which is herein incorporated by reference in its entirety.

[0138] The saRNA of the present invention may be provided in combination with other active ingredients known to have an effect in the particular method being considered. The other active ingredients may be administered simultaneously, separately, or sequentially with the saRNA of the present invention. In one embodiment, saRNA of the present invention is administered with saRNA modulating a different target gene. Non-limiting examples include saRNA that modulates albumin, insulin or HNF4A genes. Modulating any gene may be achieved using a single saRNA or a combination of two or more different saRNAs. Non-limiting examples of saRNA that can be administered with saRNA of the present invention include saRNA modulating albumin or HNF4A disclosed in International Publication WO 2012/175958 filed Jun. 20, 2012, saRNA modulating insulin disclosed in international Publications WO 2012/046084 and WO 2012/046085 both filed Oct. 10, 2011, saRNA modulating human progesterone receptor, human major vault protein (hMVP), E-cadherin gene, p53 gene, or PTEN gene disclosed in U.S. Pat. No. 7,709,456 filed Nov. 13, 2006 and US Pat. Publication US 2010/0273863 filed Apr. 23, 2010, saRNAs targeting p21 gene disclosed in International Publication WO 2006/113246 filed Apr. 11, 2006, any nucleic acid disclosed in WO2012/065143 filed Nov. 12, 2011 that upregulates the expression of genes in Table 8 of WO 2012/065143 or increases the expression of a tumor suppressor, any oligonucleotide that activates target genes in Table 4 of WO2013/173635 filed May 16, 2013, any oligonucleotide that activates target genes in Table 4 of WO2013/173637 filed May 16, 2013, any oligonucleotide complementary to a sequence selected from the sequences in SEQ ID NOs: 1-1212 of WO2013/173652 filed May 16, 2013, any oligonucleotide modulating APOA1 and ABCA1 gene expressions disclosed in WO2013173647 filed May 16, 2013, any oligonucleotide modulating SMN family gene expressions disclosed in WO2013173638 filed May 16, 2013, any oligonucleotide modulating PTEN gene expression disclosed in WO2013173605 filed May 16, 2013, any oligonucleotide modulating MECP2 gene expression disclosed in WO2013173608 filed May 16, 2013, any oligonucleotide modulating ATP2A2 gene expression disclosed in WO2013173598 filed May 16, 2013, any oligonucleotide modulating UTRN gene expression disclosed in WO2013173645 filed May 16, 2013, any nucleic acid molecule that modulates the expression of CD97, TS-α, C/EBP delta, CDC23, PINK1, HIF1α, Gnbp3g, Adrenomedullin AM1 receptor, 3-oxoacid CoA transferase, Cathepsin W or BACE1 disclosed in U.S. Pat. No. 8,288,354 filed Dec. 28, 2006, antagoNAT with formula (I) disclosed in US 2013/0245099 filed Nov. 17, 2011, any antagoNAT that upregulates the expression of hemoglobin (HBF/HBG) polynucleotides disclosed in U.S. Pat. No. 8,318,690 filed Apr. 30, 2010, any antisense oligonucleotide that increases the expression of apolipoprotein (ApoA1) polynucleotide disclosed in U.S. Pat. No. 8,153,696 filed Oct. 2, 2009 (CURNA), the contents of each of which are incorporated herein by reference in their entirety.

[0139] In on embodiment, the saRNA is conjugated with a carbohydrate ligand, such as any carbohydrate ligand disclosed in U.S. Pat. No. 8,106,022, and 8,828,956 to Manoharan et al. (Alnylam Pharmaceuticals), the contents of which are incorporated herein by reference in their entirety. For example, the carbohydrate ligand may be monosaccharide, disaccharide, trisaccharide, tetrasaccharide, oligosaccharide, or polysaccharide. These carbohydrate-conjugated RNA agents may target the parenchymal cells of the liver. In one embodiment, the saRNA is conjugated with more than one carbohydrate ligand, preferably two or three. In one embodiment, the saRNA is conjugated with one or more galactose moiety. In another embodiment, the saRNA is conjugated at least one (e.g., two or three or more) lactose molecules (lactose is a glucose coupled to a galactose). In another embodiment, the saRNA is conjugated with at least one (e.g., two or three or more) N-Acetyl-Galactosamine (GalNAc), N-Ac-Glucosamine (GluNAc), or mannose (e.g., mannose-6-phosphate). In one embodiment, the saRNA is conjugated with at least one mannose ligand, and the conjugated saRNA targets macrophages.

[0140] In one embodiment, saRNA of the present invention is administered with a small interfering RNA or siRNA that inhibits the expression of a gene.

[0141] In one embodiment, saRNA of the present invention is administered with one or more drugs for therapeutic purposes.

### II. Composition of the Invention

[0142] One aspect of the present invention provides pharmaceutical compositions comprising a small activating RNA (saRNA) that upregulates a target gene, and at least one pharmaceutically acceptable carrier.

### Formulation, Delivery, Administration, and Dosing

[0143] Pharmaceutical formulations may additionally comprise a pharmaceutically acceptable excipient, which, as used herein, includes, but is not limited to, any and all solvents, dispersion media, diluents, or other liquid vehicles, dispersion or suspension aids, surface active agents, isotonic agents, thickening or emulsifying agents, preservatives, and the like, as suited to the particular dosage form desired. Various excipients for formulating pharmaceutical compositions and techniques for preparing the composition are known in the art (see Remington: The Science and Practice of Pharmacy, 21^{st} Edition, A. R. Gennaro, Lippincott, Williams & Wilkins, Baltimore, Md., 2006; incorporated herein by reference in its entirety). The use of a conventional excipient medium may be contemplated within the scope of the present disclosure, except insofar as any conventional excipient medium may be incompatible with a substance or its derivatives, such as by producing any undesirable biological effect or otherwise interacting in a deleterious manner with any other component(s) of the pharmaceutical composition.

[0144] In some embodiments, compositions are administered to humans, human patients or subjects. For the purposes of the present disclosure, the phrase “active ingredient” generally refers to saRNA to be delivered as described herein.

[0145] Although the descriptions of pharmaceutical compositions provided herein are principally directed to pharmaceutical compositions which are suitable for administration to humans, it will be understood by the skilled artisan that such compositions are generally suitable for administration to any other animal, e.g., to non-human animals, e.g. non-human mammals. Modification of pharmaceutical compositions suitable for administration to humans in order to render the compositions suitable for administration to various animals is well understood, and the ordinarily skilled veterinary pharmacologist can design and/or perform such modification with merely ordinary, if any, experimentation. Subjects to which administration of the pharmaceutical compositions is contemplated include, but are not limited to, humans and/or other primates; mammals, including commercially relevant mammals such as cattle, pigs, horses, sheep, cats, dogs, mice, and/or rats; and/or birds, including commercially relevant birds such as poultry, chickens, ducks, geese, and/or turkeys.

[0146] In one embodiment, the efficacy of the formulated saRNA described herein may be determined in proliferating cells.

[0147] Formulations of the pharmaceutical compositions described herein may be prepared by any method known or hereafter developed in the art of pharmacology. In general, such preparatory methods include the step of bringing the active ingredient into association with an excipient and/or one or more other accessory ingredients, and then, if necessary and/or desirable, dividing, shaping and/or packaging the product into a desired single- or multi-dose unit.

[0148] A pharmaceutical composition in accordance with the invention may be prepared, packaged, and/or sold in bulk, as a single unit dose, and/or as a plurality of single unit doses. As used herein, a “unit dose” is discrete amount of the pharmaceutical composition comprising a predetermined amount of the active ingredient. The amount of the active ingredient is generally equal to the dosage of the active ingredient which would be administered to a subject and/or a convenient fraction of such a dosage such as, for example, one-half or one-third of such a dosage.

[0149] Relative amounts of the active ingredient, the pharmaceutically acceptable excipient, and/or any additional ingredients in a pharmaceutical composition in accordance with the invention will vary, depending upon the identity, size, and/or condition of the subject treated and further depending upon the route by which the composition is to be administered. By way of example, the composition may comprise between 0.1% and 100%, e.g., between 0.5 and 50%, between 1-30%, between 5-80%, at least 80% (w/w) active ingredient.

[0150] In some embodiments, the formulations described herein may contain at least one saRNA. As a non-limiting example, the formulations may contain 1, 2, 3, 4 or 5 saRNAs with different sequences. In one embodiment, the formulation contains at least three saRNAs with different sequences. In one embodiment, the formulation contains at least five saRNAs with different sequences.

[0151] The saRNA of the present invention can be formulated using one or more excipients to: (1) increase stability; (2) increase cell transfection; (3) permit the sustained or delayed release (e.g., from a depot formulation of the saRNA); (4) alter the biodistribution (e.g., target the saRNA to specific tissues or cell types); (5) increase the translation of encoded protein in vivo; and/or (6) alter the release profile of encoded protein in vivo.

[0152] In addition to traditional excipients such as any and all solvents, dispersion media, diluents, or other liquid vehicles, dispersion or suspension aids, surface active agents, isotonic agents, thickening or emulsifying agents, preservatives, excipients of the present invention can include, without limitation, lipidoids, liposomes, lipid nanoparticles, polymers, lipoplexes, core-shell nanoparticles, peptides, proteins, cells transfected with saRNA (e.g., for transplantation into a subject), hyaluronidase, nanoparticle mimics and combinations thereof. Accordingly, the formulations of the invention can include one or more excipients, each in an amount that together increases the stability of the saRNA and/or increases cell transfection by the saRNA. Further, the saRNA of the present invention may be formulated using self-assembled nucleic acid nanoparticles. Pharmaceutically acceptable carriers, excipients, and delivery agents for nucleic acids that may be used in the formulation with the saRNA of the present invention are disclosed in International Publication WO 2013/090648 filed Dec. 14, 2012, the contents of which are incorporated herein by reference in their entirety.

[0153] In one embodiment, the saRNA of the present invention comprises two single RNA strands that are 21 nucleotides in length each that are annealed to form a double-stranded saRNA as the active ingredient. The composition further comprises a salt buffer composed of 50 mM Tris-HCl, pH 8.0, 100 mM NaCl and 5 mM EDTA.

[0154] In another embodiment, the saRNA of the present invention may be delivered with dendrimers. Dendrimers are highly branched macromolecules. In one embodiment, the saRNA of the present invention is complexed with structurally flexible poly(amidoamine) (PAMAM) dendrimers for targeted in vivo delivery. The complex is called saRNA-dendrimers. Dendrimers have a high degree of molecular uniformity, narrow molecular weight distribution, specific size and shape characteristics, and a highly-functionalized terminal surface. The manufacturing process is a series of repetitive steps starting with a central initiator core. Each subsequent growth step represents a new generation of polymers with a larger molecular diameter and molecular weight, and more reactive surface sites than the preceding generation.

[0155] PAMAM dendrimers are efficient nucleotide delivery systems that bear primary amine groups on their surface and also a tertiary amine group inside of the structure. The primary amine group participates in nucleotide binding and promotes their cellular uptake, while the buried tertiary amino groups act as a proton sponge in endosomes and enhance the release of nucleic acid into the cytoplasm. These dendrimers protect the saRNA carried by them from ribonuclease degradation and achieves substantial release of saRNA over an extended period of time via endocytosis for efficient gene targeting. The in vivo efficacy of these nanoparticles have previously been evaluated where biodistribution studies show that the dendrimers preferentially accumulate in peripheral blood mononuclear cells and live with no discernible toxicity (see Zhou et al., Molecular Ther. 2011 Vol. 19, 2228-2238, the contents of which are incorporated herein by reference in their entirety). PAMAM dendrimers may comprise a triethanolamine (TEA) core, a diaminobutane (DAB) core, a cystamine core, a diaminohexane (HEX) core, a diamonododecane (DODE) core, or an ethylenediamine (EDA) core. In one embodiment, PAMAM dendrimers comprise a TEA core or a DAB core.

### Lipidoids

[0156] The synthesis of lipidoids has been extensively described and formulations containing these compounds are particularly suited for delivery of oligonucleotides or nucleic acids (see Mahon et al., Bioconjug Chem. 2010 21:1448-1454; Schroeder et al., J Intern Med. 2010 267:9-21; Akinc et al., Nat Biotechnol. 2008 26:561-569; Love et al., Proc Natl Acad Sci USA. 2010 107:1864-1869; Siegwart et al., Proc Natl Acad Sci USA. 2011 108:12996-3001; all of which are incorporated herein in their entireties).

[0157] While these lipidoids have been used to effectively deliver double-stranded small interfering RNA molecules in rodents and non-human primates (see Akinc et al., Nat Biotechnol. 2008 26:561-569; Frank-Kamenetsky et al., Proc Natl Acad Sci USA. 2008 105:11915-11920; Akinc et al., Mol Ther. 2009 17:872-879; Love et al., Proc Natl Acad Sci USA. 2010 107:1864-1869; Leuschner et al., Nat Biotechnol. 2011 29:1005-1010; all of which is incorporated herein in their entirety), the present disclosure contemplates their formulation and use in delivering saRNA. Complexes, micelles, liposomes or particles can be prepared containing these lipidoids and therefore, can result in an effective delivery of the saRNA following the injection of a lipidoid formulation via localized and/or systemic routes of administration. Lipidoid complexes of saRNA can be administered by various means including, but not limited to, intravenous, intramuscular, or subcutaneous routes.

[0158] In vivo delivery of nucleic acids may be affected by many parameters, including, but not limited to, the formulation composition, nature of particle PEGylation, degree of loading, oligonucleotide to lipid ratio, and biophysical parameters such as, but not limited to, particle size (Akinc et al., Mol Ther. 2009 17:872-879; the contents of which are herein incorporated by reference in its entirety). As an example, small changes in the anchor chain length of poly(ethylene glycol) (PEG) lipids may result in significant effects on in vivo efficacy. Formulations with the different lipidoids, including, but not limited to penta[3-(1-laurylaminopropionyl)]-triethylenetetramine hydrochloride (TETA-5LAP; aka 98N12-5, see Murugaiah et al., Analytical Biochemistry, 401:61 (2010); the contents of which are herein incorporated by reference in its entirety), C12-200 (including derivatives and variants), and MD1, can be tested for in vivo activity.

[0159] The lipidoid referred to herein as “98N12-5” is disclosed by Akinc et al., Mol Ther. 2009 17:872-879 and the contents of which is incorporated by reference in its entirety.

[0160] The lipidoid referred to herein as “C12-200” is disclosed by Love et al., Proc Natl Acad Sci USA. 2010 107:1864-1869 and Liu and Huang, Molecular Therapy. 2010 669-670; the contents of both of which are herein incorporated by reference in their entirety. The lipidoid formulations can include particles comprising either 3 or 4 or more components in addition to the saRNA. As an example, formulations with certain lipidoids, include, but are not limited to, 98N12-5 and may contain 42% lipidoid, 48% cholesterol and 10% PEG (C14 alkyl chain length). As another example, formulations with certain lipidoids, include, but are not limited to, C12-200 and may contain 50% lipidoid, 10% disteroylphosphatidyl choline, 38.5% cholesterol, and 1.5% PEG-DMG.

[0161] In one embodiment, an saRNA formulated with a lipidoid for systemic intravenous administration can target the liver. For example, a final optimized intravenous formulation using saRNA and comprising a lipid molar composition of 42% 98N12-5, 48% cholesterol, and 10% PEG-lipid with a final weight ratio of about 7.5 to 1 total lipid to saRNA and a C14 alkyl chain length on the PEG lipid, with a mean particle size of roughly 50-60 nm, can result in the distribution of the formulation to be greater than 90% to the liver. (see, Akinc et al., Mol Ther. 2009 17:872-879; the contents of which are herein incorporated by reference in its entirety). In another example, an intravenous formulation using a C12-200 (see published international application WO2010129709, the contents of which is herein incorporated by reference in their entirety) lipidoid may have a molar ratio of 50/10/38.5/1.5 of C12-200/disteroylphosphatidyl choline/cholesterol/PEG-DMG, with a weight ratio of 7 to 1 total lipid to nucleic acid and a mean particle size of 80 nm may be effective to deliver saRNA (see, Love et al., Proc Natl Acad Sci USA. 2010 107:1864-1869, the contents of which are herein incorporated by reference in its entirety).

[0162] In another embodiment, an MD1 lipidoid-containing formulation may be used to effectively deliver saRNA to hepatocytes in vivo. The characteristics of optimized lipidoid formulations for intramuscular or subcutaneous routes may vary significantly depending on the target cell type and the ability of formulations to diffuse through the extracellular matrix into the blood stream. While a particle size of less than 150 nm may be desired for effective hepatocyte delivery due to the size of the endothelial fenestrae (see, Akinc et al., Mol Ther. 2009 17:872-879, the contents of which are herein incorporated by reference in its entirety), use of a lipidoid-formulated saRNA to deliver the formulation to other cells types including, but not limited to, endothelial cells, myeloid cells, and muscle cells may not be similarly size-limited.

[0163] Use of lipidoid formulations to deliver siRNA in vivo to other non-hepatocyte cells such as myeloid cells and endothelium has been reported (see Akinc et al., Nat Biotechnol. 2008 26:561-569; Leuschner et al., Nat Biotechnol. 2011 29:1005-1010; Cho et al., Adv. Funct. Mater. 2009 19:3112-3118; 8^{th} International Judah Volkman Conference, Cambridge, Mass. Oct. 8-9, 2010; the contents of each of which is herein incorporated by reference in its entirety). Effective delivery to myeloid cells, such as monocytes, lipidoid formulations may have a similar component molar ratio. Different ratios of lipidoids and other components including, but not limited to, disteroylphosphatidyl choline, cholesterol and PEG-DMG, may be used to optimize the formulation of saRNA for delivery to different cell types including, but not limited to, hepatocytes, myeloid cells, muscle cells, etc. For example, the component molar ratio may include, but is not limited to, 50% C12-200, 10% disteroylphosphatidyl choline, 38.5% cholesterol, and %1.5 PEG-DMG (see Leuschner et al., Nat Biotechnol 2011 29:1005-1010; the contents of which are herein incorporated by reference in its entirety). The use of lipidoid formulations for the localized delivery of nucleic acids to cells (such as, but not limited to, adipose cells and muscle cells) via either subcutaneous or intramuscular delivery, may not require all of the formulation components desired for systemic delivery, and as such may comprise only the lipidoid and saRNA.

### Liposomes, Lipoplexes, and Lipid Nanopartieles

[0164] The saRNA of the invention can be formulated using one or more liposomes, lipoplexes, or lipid nanoparticles. In one embodiment, pharmaceutical compositions of saRNA include liposomes. Liposomes are artificially-prepared vesicles which may primarily be composed of a lipid bilayer and may be used as a delivery vehicle for the administration of nutrients and pharmaceutical formulations. Liposomes can be of different sizes such as, but not limited to, a multilamellar vesicle (MLV) which may be hundreds of nanometers in diameter and may contain a series of concentric bilayers separated by narrow aqueous compartments, a small unicellular vesicle (SUV) which may be smaller than 50 nm in diameter, and a large unilamellar vesicle (LUV) which may be between 50 and 500 nm in diameter. Liposome design may include, but is not limited to, opsonins or ligands in order to improve the attachment of liposomes to unhealthy tissue or to activate events such as, but not limited to, endocytosis. Liposomes may contain a low or a high pH in order to improve the delivery of the pharmaceutical formulations.

[0165] The formation of liposomes may depend on the physicochemical characteristics such as, but not limited to, the pharmaceutical formulation entrapped and the liposomal ingredients, the nature of the medium in which the lipid vesicles are dispersed, the effective concentration of the entrapped substance and its potential toxicity, any additional processes involved during the application and/or delivery of the vesicles, the optimization size, polydispersity and the shelf-life of the vesicles for the intended application, and the batch-to-batch reproducibility and possibility of large-scale production of safe and efficient liposomal products.

[0166] In one embodiment, pharmaceutical compositions described herein may include, without limitation, liposomes such as those formed from 1,2-dioleyloxy-N,N-dimethylaminopropane (DODMA) liposomes, DiLa2 liposomes from Marina Biotech (Bothell, Wash.), 1,2-dilinoleyloxy-3-dimethylaminopropane (DLin-DMA), 2,2-dilinoleyl-4-(2-dimethylaminoethyl)-[1,3]-dioxolane (DLin-KC2-DMA), and MC3 (US20100324120; the contents of which are herein incorporated by reference in its entirety) and liposomes which may deliver small molecule drugs such as, but not limited to, DOXIL® from Janssen Biotech, Inc. (Horsham, Pa.).

[0167] In one embodiment, pharmaceutical compositions described herein may include, without limitation, liposomes such as those formed from the synthesis of stabilized plasmid-lipid particles (SDLP) or stabilized nucleic acid lipid particle (SNALP) that have been previously described and shown to be suitable for oligonucleotide delivery in vitro and in vivo (see Wheeler et al. Gene Therapy. 1999 6:271-281; Zhang et al. Gene Therapy. 1999 6:1438-1447; Jeffs et al. Pharm Res. 2005 22:362-372; Morrissey et al., Nat Biotechnol. 2005 2:1002-1007; Zimmermann et al., Nature. 2006 441:111-114; Heyes et al. J Contr Rel. 2005 107:276-287; Semple et al. Nature Biotech. 2010 28:172-176; Judge et al. J Clin Invest. 2009 119:661-673; deFougerolles Hum Gene Ther. 2008 19:125-132; the contents of each of which are incorporated herein in their entireties). The original manufacture method by Wheeler et al. was a detergent dialysis method, which was later improved by Jeffs et al. and is referred to as the spontaneous vesicle formation method. The liposome formulations may be composed of 3 to 4 lipid components in addition to the saRNA, As an example a liposome can contain, but is not limited to, 55% cholesterol, 20% disteroylphosphatidyl choline (DSPC), 10% PEG-S-DSG, and 15% 1,2-dioleyloxy-N,N-dimethylaminopropane (DODMA), as described by Jeffs et al. In another example, certain liposome formulations may contain, but are not limited to, 48% cholesterol, 20% DSPC, 2% PEG-c-DMA, and 30% cationic lipid, where the cationic lipid can be 1,2-distearloxy-N,N-dimethylaminopropane (DSDMA), DODMA, DLin-DMA, or 1,2-dilinolenyloxy-3-dimethylaminopropane (DLenDMA), as described by Heyes et al. In another example, the nucleic acid-lipid particle may comprise a cationic lipid comprising from about 50 mol % to about 85 mol % of the total lipid present in the particle; a non-cationic lipid comprising from about 13 mol % to about 49.5 mol % of the total lipid present in the particle; and a conjugated lipid that inhibits aggregation of particles comprising from about 0.5 mol % to about 2 mol % of the total lipid present in the particle as described in WO2009127060 to Maclachlan et al., the contents of which are incorporated herein by reference in their entirety. In another example, the nucleic acid-lipid particle may be any nucleic acid-lipid particle disclosed in US2006008910 to Maclachlan et al., the contents of which are incorporated herein by reference in their entirety. As a non-limiting example, the nucleic acid-lipid particle may comprise a cationic lipid of Formula I, a non-cationic lipid, and a conjugated lipid that inhibits aggregation of particles.

[0168] In one embodiment, the saRNA of the present invention may be formulated in a lipid vesicle which may have crosslinks between functionalized lipid bilayers.

[0169] In one embodiment, the liposome may contain a sugar-modified lipid disclosed in U.S. Pat. No. 5,595,756 to Bally et al., the contents of which are incorporated herein by reference in their entirety. The lipid may be a ganglioside and cerebroside in an amount of about 10 mol percent.

[0170] In one embodiment, the saRNA of the present invention may be formulated in a liposome comprising a cationic lipid. The liposome may have a molar ratio of nitrogen atoms in the cationic lipid to the phosphates in the saRNA (N:P ratio) of between 1:1 and 20:1 as described in international Publication No. WO2013006825, the contents of which are herein incorporated by reference in its entirety. In another embodiment, the liposome may have a N:P ratio of greater than 20:1 or less than 1:1.

[0171] In one embodiment, the saRNA of the present invention may be formulated in a lipid-polycation complex. The formation of the lipid-polycation complex may be accomplished by methods known in the art and/or as described in U.S. Pub. No. 20120178702, the contents of which are herein incorporated by reference in its entirety. As a non-limiting example, the polycation may include a cationic peptide or a polypeptide such as, but not limited to, polylysine, potyornithine and/or polyarginine and the cationic peptides described in international Pub. No. WO2012013326; herein incorporated by reference in its entirety. In another embodiment, the saRNA may be formulated in a lipid-polycation complex which may further include a neutral lipid such as, but not limited to, cholesterol or dioleoyl phosphatidylethanolamine (DOPE).

[0172] The liposome formulation may be influenced by, but not limited to, the selection of the cationic lipid component, the degree of cationic lipid saturation, the nature of the PEGylation, ratio of all components and biophysical parameters such as size. In one example by Semple et al. (Semple et al. Nature Biotech. 2010 28:172-176; the contents of which are herein incorporated by reference in its entirety), the liposome formulation was composed of 57.1% cationic lipid, 7.1% di palmitoylphosphatidylcholine, 34.3% cholesterol, and 1.4% PEG-c-DMA.

[0173] In some embodiments, the ratio of PEG in the lipid nanoparticle (LNP) formulations may be increased or decreased and/or the carbon chain length of the PEG lipid may be modified from C14 to C18 to alter the pharmacokinetics and/or biodistribution of the LNP formulations. As a non-limiting example, LNP formulations may contain 1-5% of the lipid molar ratio of PEG-c-DOMG as compared to the cationic lipid, DSPC and cholesterol. In another embodiment the PEG-c-DOMG may be replaced with a PEG lipid such as, but not limited to, PEG-DSG (1,2-Distearoyl-sn-glycerol, methoxypolyethylene glycol) or PEG-DPG (1,2-Dipalmitoyl-sn-glycerol, methoxypolyethylene glycol). The cationic lipid may be selected from any lipid known in the art such as, but not limited to, DLin-MC3-DMA, DLin-DMA, C12-200 and DLin-KC2-DMA.

[0174] In one embodiment, the saRNA of the present invention may be formulated in a lipid nanoparticle such as the lipid nanoparticles described in International Publication No. WO2012170930, the contents of which are herein incorporated by reference in its entirety.

[0175] In one embodiment, the cationic lipid which may be used in formulations of the present invention may be selected from, but not limited to, a cationic lipid described in International Publication Nos. WO2012040184, WO2011153120, WO2011149733, WO2011090965, WO2011043913, WO2011022460, WO2012061259, WO2012054365, WO2012044638, WO2010080724, WO201021865 and WO2008103276, U.S. Pat. Nos. 7,893,302, 7,404,969 and 8,283,333 and US Patent Publication No. US20100036115 and US20120202871; the contents of each of which is herein incorporated by reference in their entirety. In another embodiment, the cationic lipid may be selected from, but not limited to, formula A described in International Publication Nos. WO2012040184, WO2011153120, WO2011149733, WO2011090965, WO2011043913, WO2011022460, WO2012061259, WO2012054365 and WO2012044638; the contents of each of which is herein incorporated by reference in their entirety. In yet another embodiment, the cationic lipid may be selected from, but not limited to, formula CLI-CLXXIX of International Publication No. WO2008103276, formula CLI-CLXXIX of U.S. Pat. No. 7,893,302, formula CLI-CLXXXXII of U.S. Pat. No. 7,404,969 and formula I-VI of US Patent Publication No. US20100036115; the contents of each of which are herein incorporated by reference in their entirety. In yet another embodiment, the cationic lipid may be a multivalent cationic lipid such as the cationic lipid disclosed in U.S. Pat. No. 7,223,887 to Gaucheron et al., the contents of which are incorporated herein by reference in their entirety. The cationic lipid may have a positively-charged head group including two quaternary amine groups and a hydrophobic portion including four hydrocarbon chains as described in U.S. Pat. No. 7,223,887 to Gaucheron et al., the contents of which are incorporated herein by reference in their entirety. In yet another embodiment, the cationic lipid may be biodegradable as the biodegradable lipids disclosed in US20130195920 to Maier et al., the contents of which are incorporated herein by reference in their entirety. The cationic lipid may have one or more biodegradable groups located in a lipidic moiety of the cationic lipid as described in formula I-IV in US 20130195920 to Maier et al., the contents of which are incorporated herein by reference in their entirety.

[0176] As a non-limiting example, the cationic lipid may be selected from (20Z,23Z)-N,N-dimethylnonacosa-20,23-dien-10-amine, (17Z,20Z)-N,N-dimemylhexacosa-17,20-dien-9-amine, (1Z,19Z)-N5N-dimethylpentacosa-16,19-dien-8-amine, (13Z,16Z)-N,N-dimethyldocosa-13,16-dien-5-amine, (12Z,15Z)-N,N-dimethylhenicosa-12,15-dien-4-amine, (14Z,17Z)-N,N-dimethyltricosa-14,17-dien-6-amine, (15Z,18Z)-N,N-dimethyltetracosa-15,18-dien-7-amine, (18Z,21Z)-N,N-dimethylheptacosa-18,21-dien-10-amine, (15Z,18Z)-N,N-dimethyltetracosa-15,18-dien-5-amine, (14Z,17Z)-N,N-dimethyltricosa-14,17-dien-4-amine, (19Z,22Z)-N,N-dimeihyloctacosa-19,22-dien-9-amine, (18Z,21 Z)-N,N-dimethylheptacosa-18,21-dien-8-amine, (17Z,20Z)-N,N-dimethylhexacosa-17,20-dien-7-amine, (16Z,19Z)-N,N-dimethylpentacosa-16,19-dien-6-amine, (22Z,25Z)-N,N-dimethylhentriaconta-22,25-dien-10-amine, (21Z,24Z)-N,N-dimethyltriaconta-21,24-dien-9-amine, (18Z)-N,N-dimetylheptacos-18-en-10-amine, (17Z)-N,N-dimethylhexacos-17-en-9-amine, (19Z,22Z)-N,N-dimethyloctacosa-19,22-dien-7-amine, N,N-dimethylheptacosan-10-amine, (20Z,23Z)-N-ethyl-N-methylnonacosa-20,23-dien-10-amine, 1-[(11Z,14Z)-1-nonylicosa-11,14-dien-1-yl] pyrrolidine, (20Z)-N,N-dimethylheptacos-20-en-10-amine, (15Z)-N,N-dimethyl eptacos-15-en-10-amine, (14Z)-N,N-dimethylnonacos-14-en-10-amine, (17Z)-N,N-dimethylnonacos-17-en-10-amine, (24Z)-N,N-dimethyltritriacont-24-en-10-amine, (20Z)-N,N-dimethylnonacos-20-en-10-amine, (22Z)-N,N-dimethylhentriacont-22-en-10-amine, (16Z)-N,N-dimethylpentacos-16-en-8-amine, (12Z,15Z)-N,N-dimethyl-2-nonylhenicosa-12,15-dien-1-amine, (13Z,16Z)-N,N-dimethyl-3-nonyldocosa-13,16-dien-1-amine, N,N-dimethyl-1-[(1S,2R)-2-octylcyclopropyl] eptadecan-8-amine, 1-[(1S,2R)-2-hexylcyclopropyl]-N,N-dimethylnonadecan-10-amine, N,N-dimethyl-1-[(1S,2R)-2-octylcyclopropyl]nonadecan-10-amine, N,N-dimethyl-21-[(1S,2R)-2-octylcyclopropyl]henicosan-10-amine,N,N-ditnethyl-1-[(1S,2S)-2-{[(1R,2R)-2-pentylcycIopropyl]methyl}cyclopropyl]nonadecan-10-amine,N,N-dimethyl-1-[(1S,2R)-2-octylcyopropyl]hexadecan-8-amine, N,N-dimethyl-[(1R,2S)-2-undecyIcyclopropyl]tetradecan-5-amine, N,N-dimethyl-3-{7-[(1S,2R)-2-octylcyclopropyl]heptyl}dodecan-1-amine, 1-[(1R,2S)-2-heptylcyclopropyl]-N,N-dimethyloctadecan-9-amine, 1-[(1S,2R)-2-decylcyclopropyl]-N,N-dimethylpentadecan-6-amine, N,N-dimethyl-1-[(1S,2R)-2-octylcyclopropyl]pentadecan-8-amine, R—N,N-dimethyl-1-[(9Z,12Z)-octadeca-9,12-dien-1-yloxy]-3-(octyloxy)propan-2-amine, S—N,N-dimethyl-1-[(9Z,12Z)-octadeca-9,12-dien-1-yloxy]-3-(octyloxy)propan-2-amine, 1-{2-[(9Z,12Z)-octadeca-9,12-dien-1-yloxy]-1-[(octyloxy)methyl]ethyl}pyrrolidine, (2S)—N,N-dimethyl-1-[(9Z,12Z)-octadeca-9,12-dien-1-yloxy]-3-[(5Z)-oct-5-en-1-yloxy]propan-2-amine, 1-{2-[(9Z,12Z)-octadeca-9,12-dien-1-yloxy]-1-[(octyloxy)methyl]ethyl}azetidine, (2S)-1-(hexyloxy)-N,N-dimethyl-3-[(9Z,12Z)-octadeca-9,12-dien-1-yloxy]propan-2-amine, (2S)-1-(heptyloxy)-N,N-dimethyl-3-[(9Z,12Z)-octadeca-9,12-dien-1-yloxy]propan-2-amine, N,N-dimethyl-1-(nonyloxy)-3-[(9Z,12Z)-octadeca-9,12-dien-1-yloxy]propan-2-amine, N,N-dimethyl-1-[(9Z)-octadec-9-en-1-yloxyl-3-(octyloxy)propan-2-amine; (2S)—N,N-dimethyl-1-[(6Z,9Z,12Z)-octadeca-6,9,12-trien-1-yloxy]-3-(octyloxy)propan-2-amine, (2S)-1-[(11Z,14Z)-icosa-11,14-dien-1-yloxy]-N,N-dimethyl-3-(pentyloxy)propan-2-amine, (2S)-1-(hexyloxy)-3-[(11Z,14Z)-icosa-11,14-dien-1-yloxy]-N,N-dimethylpropan-2-amine, 1-[(11Z,14Z)-icosa-11,14-dien-1-yloxy]-N,N-dimethyl-3-(octyloxy)propan-2-amine, [(13Z,16Z)-docosa-13,16-dien-1-yloxy]-N,N-dimethyl-3-(octyloxy)propan-2-amine, (2S)-1-[(13Z,16Z)-docosa-13,16-dien-1-yloxy]-3-(hexyloxy)-N,N-dimethylpropan-2-amine, (2S)-1-[(13Z)-docos-13-en-1-yloxy]-3-(hexyloxy)-N,N-dimethylpropan-2-amine, 1-[(13Z)-docos-13-en-1-yloxy]-N,N-dimethyl-3-(octyloxy)propan-2-amine, 1-[(9Z)-hexadec-9-en-1-yloxy]-N,N-dimethyl-3-(octyloxy)propan-2-amine, (2R)—N,N-dimethyl-H(1-metoylo ctypoxy]-3-[(9Z,12Z)-octadeca-9,12-dien-1-yloxy]propan-2-amine, (2R)-1-[(3,7-dimethyloctyl)oxy]-N,N-dimethyl-3-[(9Z,12Z)-octadeca-9,12-dien-1-yloxy]propan-2-amine, N,N-dimethyl-1-(octyloxy)-3-({8-[(1S,2S)-2-{[(1R,2R)-2-pentylcyclopropyl]methyl}cyclopropyl]octyl}oxy)propan-2-amine, N,N-dimethyl-1-{[8-(2-oclylcyclopropyo)octyl]oxy}-3-(octyloxy)propan-2-amine and (11E,20Z,23Z)-N,N-dimethylnonacosa-11,20,2-trien-10-amine or a pharmaceutically acceptable salt or stereoisomer thereof.

[0177] In one embodiment, the lipid may be a cleavable lipid such as those described in International Publication No. WO2012170889, the contents of which are herein incorporated by reference in their entirety.

[0178] In one embodiment, the nanoparticles described herein may comprise at least one cationic polymer described herein and/or known in the art.

[0179] In one embodiment, the cationic lipid may be synthesized by methods known in the art and/or as described in International Publication Nos. WO2012040184, WO2011153120, WO2011149733, WO2011090965, WO2011043913, WO2011022460, WO2012061259, WO2012054365, WO2012044638, WO2010080724 and WO201021865; the contents of each of which is herein incorporated by reference in their entirety.

[0180] In one embodiment, the LNP formulations of the saRNA may contain PEG-c-DOMG at 3% lipid molar ratio. In another embodiment, the LNP formulations of the saRNA may contain PEG-c-DOMG at 1.5% lipid molar ratio.

[0181] In one embodiment, the pharmaceutical compositions of the saRNA may include at least one of the PEGylated lipids described in International Publication No. 2012099755, the contents of which is herein incorporated by reference in its entirety.

[0182] In one embodiment, the LNP formulation may contain PEG-DMG 2000 (1,2-dimyristoyl-sn-glycero-3-phophoethanolamine-N-[methoxy(polyethylene glycol)-2000). In one embodiment, the LNP formulation may contain PEG-DMG 2000, a cationic lipid known in the art and at least one other component. In another embodiment, the LNP formulation may contain PEG-DIM 2000, a cationic lipid known in the art, DSPC and cholesterol. As a non-limiting example, the LNP formulation may contain PEG-DMG 2000, DLin-DMA, DSPC and cholesterol. As another non-limiting example the LNP formulation may contain PEG-DMG 2000, DLin-DMA, DSPC and cholesterol in a molar ratio of 2:40:10:48 (see e.g., Geall et al., Nonviral delivery of self-amplifying RNA vaccines, PNAS 2012; PMID: 22908294; herein incorporated by reference in its entirety). As another non-limiting example, the saRNA described herein may be formulated in a nanoparticle to be delivered by a parenteral route as described in U.S. Pub. No. 20120207845; the contents of which is herein incorporated by reference in its entirety. The cationic lipid may also be the cationic lipids disclosed in US20130156845 to Manoharan et al. and US 20130129785 to Manoharan et al., WO 2012047656 to Wasan et al., WO 2010144740 to Chen et al., WO 2013086322 to Ansell et al., or WO 2012016184 to Manoharan et al., the contents of each of which are incorporated herein by reference in their entirety.

[0183] In one embodiment, the saRNA of the present invention may be formulated with a plurality of cationic lipids, such as a first and a second cationic lipid as described in US20130017223 to Hope et al., the contents of which are incorporated herein by reference in their entirety. The first cationic lipid can be selected on the basis of a first property and the second cationic lipid can be selected on the basis of a second property, where the properties may be determined as outlined in US20130017223, the contents of which are herein incorporated by reference in its entirety. In one embodiment, the first and second properties are complementary.

[0184] In another embodiment, the saRNA may be formulated with a lipid particle comprising one or more cationic lipids and one or more second lipids, and one or more nucleic acids, wherein the lipid particle comprises a solid core, as described in US Patent Publication No. US20120276209 to Cullis et al., the contents of which are incorporated herein by reference in their entirety.

[0185] In one embodiment, the saRNA of the present invention may be complexed with a cationic amphiphile in an oil-in-water (o/w) emulsion such as described in EP2298358 to Satishchandran et al., the contents of which are incorporated herein by reference in their entirety. The cationic amphiphile may be a cationic lipid, modified or unmodified spermine, bupivacaine, or benzalkonium chloride and the oil may be a vegetable or an animal oil. As a non-limiting example, at least 10% of the nucleic acid-cationic amphiphile complex is in the oil phase of the oil-in-water emulsion (see e.g., the complex described in European Publication No. EP2298358 to Satishchandran et al., the contents of which are herein incorporated by reference in its entirety).

[0186] In one embodiment, the saRNA of the present invention may be formulated with a composition comprising a mixture of cationic compounds and neutral lipids. As a non-limiting example, the cationic compounds may be formula (I) disclosed in WO 1999010390 to Ansell et al., the contents of which are disclosed herein by reference in their entirety, and the neutral lipid may be selected from the group consisting of diacylphosphatidylcholine, diacylphosphatidylethanolamine, ceramide and sphingomyelin. In another non-limiting example, the lipid formulation may comprise a cationic lipid of formula A, a neutral lipid, a sterol and a PEG or PEG-modified lipid disclosed in US 20120101148 to Akinc et al., the contents of which are incorporated herein by reference in their entirety.

[0187] In one embodiment, the LNP formulation may be formulated by the methods described in International Publication Nos. WO2011127255 or WO2008103276, each of which are herein incorporated by reference in their entirety. As a non-limiting example, the saRNA of the present invention may be encapsulated in any of the lipid nanoparticle (LNP) formulations described in WO2011127255 and/or WO2008103276; the contents of each of which are herein incorporated by reference in their entirety.

[0188] In one embodiment, the LNP formulations described herein may comprise a polycationic composition. As a non-limiting example, the polycationic composition may be selected from formula 1-60 of US Patent Publication No. US20050222064; the contents of which is herein incorporated by reference in its entirety. In another embodiment, the LNP formulations comprising a polycationic composition may be used for the delivery of the saRNA described herein in vivo and/or in vitro.

[0189] In one embodiment, the LNP formulations described herein may additionally comprise a permeability enhancer molecule. Non-limiting permeability enhancer molecules are described in US Patent Publication No. US20050222064; the contents of which is herein incorporated by reference in its entirety.

[0190] In one embodiment, the pharmaceutical compositions may be formulated in liposomes such as, but not limited to, DiLa2 liposomes (Marina Biotech, Bothell, Wash.), SMARTICLES®/NOV340 (Marina Biotech, Bothell, Wash.), neutral DOPC (1,2-dioleoyl-sn-glycero-3-phosphocholine) based liposomes (e.g., siRNA delivery for ovarian cancer (Landen et al. Cancer Biology & Therapy 2006 5(12)1708-1713); the contents of which is herein incorporated by reference in its entirety) and hyaluronan-coated liposomes (Quiet Therapeutics, Israel).

[0191] In some embodiments, the pharmaceutical compositions may be formulated with any amphoteric liposome disclosed in WO 2008/043575 to Panzner and U.S. Pat. No. 8,580,297 to Essler et al. (Marina Biotech), the contents of which are incorporated herein by reference in their entirety. The amphoteric liposome may comprise a mixture of lipids including a cationic amphiphile, an anionic amphiphile and optional one or more neutral amphiphiles. The amphoteric liposome may comprise amphoteric compounds based on amphiphilic molecules, the head groups of which being substituted with one or more amphoteric groups. In some embodiments, the pharmaceutical compositions may be formulated with an amphoteric lipid comprising one or more amphoteric groups having an isoelectric point between 4 and 9, as disclosed in US 20140227345 to Essler et al. (Marina Biotech), the contents of which are incorporated herein by reference in their entirety.

[0192] In some embodiments, the pharmaceutical composition may be formulated with liposomes comprising a sterol derivative as disclosed in U.S. Pat. No. 7312206 to Panzner et al. (Novosom), the contents of which are incorporated herein by reference in their entirety. In some embodiments, the pharmaceutical composition may be formulated with amphoteric liposomes comprising at least one amphipathic cationic lipid, at least one amphipathic anionic lipid, and at least one neutral lipid, or liposomes comprise at least one amphipathic lipid with both a positive and a negative charge, and at least one neutral lipid, wherein the liposomes are stable at pH 4.2 and pH 7.5, as disclosed in U.S. Pat. No. 7,780,983 to Panzner et al. (Novosom), the contents of which are incorporated herein by reference in their entirety. In some embodiments, the pharmaceutical composition may be formulated with liposomes comprising a serum-stable mixture of lipids taught in US 20110076322 to Panzner et al, the contents of which are incorporated herein by reference in their entirety, capable of encapsulating the saRNA of the present invention. The lipid mixture comprises phosphatidylcholine and phosphatidylethanolamine in a ratio in the range of about 0.5 to about 8. The lipid mixture may also include pH sensitive anionic and cationic amphiphiles, such that the mixture is amphoteric, being negatively charged or neutral at pH 7.4 and positively charged at pH 4. The drug/lipid ratio may be adjusted to target the liposomes to particular organs or other sites in the body. In some embodiments, liposomes loaded with the saRNA of the present invention as cargo, are prepared by the method disclosed in US 20120021042 to Panzner et al., the contents of which are incorporated herein by reference in their entirety. The method comprises steps of admixing an aqueous solution of a polyanionic active agent and an alcoholic solution of one or more atnphiphiles and buffering said admixture to an acidic pH, wherein the one or more amphiphiles are susceptible of forming amphoteric liposomes at the acidic pH, thereby to form amphoteric liposomes in suspension encapsulating the active agent.

[0193] The nanoparticle formulations may be a carbohydrate nanoparticle comprising a carbohydrate carrier and a nucleic acid molecule (e.g., saRNA). As a non-limiting example, the carbohydrate carder may include, but is not limited to, an anhydride-modified phytoglycogen or glycogen-type material, phtoglycogen octenyl succinate, phytoglycogen beta-dextrin, anhydride-modified phytoglycogen beta-dextrin. (See e.g., International Publication No. WO2012109121, the contents of which is herein incorporated by reference in its entirety).

[0194] Lipid nanoparticle formulations may be improved by replacing the cationic lipid with a biodegradable cationic lipid which is known as a rapidly eliminated lipid nanoparticle (reLNP). Ionizable cationic lipids, such as, but not limited to, DLinDMA, DLin-KC2-DMA, and DLin-MC3-DMA, have been shown to accumulate in plasma and tissues over time and may be a potential source of toxicity. The rapid metabolism of the rapidly eliminated lipids can improve the tolerability and therapeutic index of the lipid nanoparticles by an order of magnitude from a 1 mg/kg dose to a 10 mg/kg dose in rat. Inclusion of an enzymatically degraded ester linkage can improve the degradation and metabolism profile of the cationic component, while still maintaining the activity of the reLNP formulation. The ester linkage can be internally located within the lipid chain or it may be terminally located at the terminal end of the lipid chain. The internal ester linkage may replace any carbon in the lipid chain.

[0195] In one embodiment, the saRNA may be formulated as a lipoplex, such as, without limitation, the ATUPLEX™ system, the DACC system, the DBTC system and other siRNA-lipoplex technology from Silence Therapeutics (London, United Kingdom), STEMFECT™ from STEMGENT® (Cambridge, Mass.), and polyethylenimine (PEI) or protamine-based targeted and non-targeted delivery of nucleic acids (Aleku et al. Cancer Res. 2008 68:9788-9798; Strumberg et al. Int J Clin Pharmacol Ther 2012 50:76-78; Santel et al., Gene Ther 2006 13:1222-1234; Santel et al., Gene Ther 2006 13:1360-1370; Gutbier et al., Pulm Pharmacol. Ther. 2010 23:334-344; Kaufmann et al. Microvasc Res 2010 80:286-293Weide et al. J Immunother. 2009 32:498-507; Weide et al. J Immunother. 2008 31:180-188; Pascolo Expert Opin. Biol. Ther. 4:1285-1294; Fotin-Mleczek et al., 2011 J. Immunother. 34:1-15; Song et al., Nature Biotechnol, 2005, 23:709-717; Peer et al., Proc Natl Acad Sci USA. 2007 6;104:4095-4100; deFougerolles Hum Gene Ther. 2008 19:125-132; the contents of each of which are incorporated herein by reference in its entirety).

[0196] In one embodiment such formulations may also be constructed or compositions altered such that they passively or actively are directed to different cell types in vivo, including but not limited to hepatocytes, immune cells, tumor cells, endothelial cells, antigen presenting cells, and leukocytes (Akinc et al. Mol Ther. 2010 18:1357-1364; Song et al., Nat Biotechnol. 2005 23:709-717; Judge et al., J Clin Invest. 2009 119:661-673; Kaufmann et al., Microvasc Res 2010 80:286-293; Santel et al., Gene Ther 2006 13:1222-1234; Santel et al., Gene Ther 2006 13:1360-1370; Gutbier et al., Pulm Pharmacol. Ther. 2010 23:334-344; Basha et al., Mol. Ther. 2011 19:2186-2200; Fenske and Cullis, Expert Opin Drug Deliv. 2008 5:25-44; Peer et al., Science. 2008 319:627-630; Peer and Lieberman, Gene Ther. 2011 18:1127-1133; the contents of each of which are incorporated herein by reference in its entirety). One example of passive targeting of formulations to liver cells includes the DLin-DMA, DLin-KC2-DMA and DLin-MC3-DMA-based lipid nanoparticle formulations which have been shown to bind to apolipoprotein E and promote binding and uptake of these formulations into hepatocytes in vivo (Akinc et al. Mol Ther. 2010 18:1357-1364; the contents of which is herein incorporated by reference in its entirety). Formulations can also be selectively targeted through expression of different ligands on their surface as exemplified by, but not limited by, folate, transferrin, N-acetylgalactosamine (GalNAc), and antibody targeted approaches (Kolhatkar et al., Curr Drug Discov Technol. 2011 8:197-206; Musacchio and Torchilin, Front Biosci. 2011 16:1388-1412; Yu et al., Mol Membr Biol. 2010 27:286-298; Patil et al., Crit Rev Ther Drug Carrier Syst. 2008 25:1-61; Benoit et al., Biomacromolecules. 2011 12:2708-2714; Zhao et al., Expert Opin Drug Deliv. 2008 5:309-319; Akinc et al., Mol Ther. 2010 18:1357-1364; Srinivasan et al., Methods Mol Biol. 2012 820:105-116; Ben-Arie et al., Methods Mol Biol. 2012 757:497-507; Peer 2010 J Control Release. 20:63-68; Peer et al., Proc Natl Acad Sci USA. 2007 104:4095-4100; Kim et al., Methods Mol Biol. 2011 721:339-353; Subramanya et al., Mol Ther. 2010 18:2028-2037; Song et al., Nat Biotechnol. 2005 23:709-717; Peer et al., Science. 2008 319:627-630; Peer and Lieberman, Gene Ther. 2011 18:1127-1133; the contents of each of which are incorporated herein by reference in its entirety).

[0197] In one embodiment, the saRNA is formulated as a solid lipid nanoparticle. A solid lipid nanoparticle (SLN) may be spherical with an average diameter between 10 to 1000 nm. SLN possess a solid lipid core matrix that can solubilize lipophilic molecules and may be stabilized with surfactants and/or emulsifiers. In a further embodiment, the lipid nanoparticle may be a self-assembly lipid-polymer nanoparticle (see Zhang et al., ACS Nano, 2008, 2 (8), pp 1696-1702; the contents of which are herein incorporated by reference in its entirety).

[0198] In one embodiment, the saRNA of the present invention can be formulated for controlled release and/or targeted delivery. As used herein, “controlled release” refers to a pharmaceutical composition or compound release profile that conforms to a particular pattern of release to effect a therapeutic outcome. In one embodiment the saRNA may be encapsulated into a delivery agent described herein and/or known in the art for controlled release and/or targeted delivery. As used herein, the term “encapsulate” means to enclose, surround or encase. As it relates to the formulation of the compounds of the invention, encapsulation may be substantial, complete or partial. The term “substantially encapsulated” means that at least greater than 50, 60, 70, 80, 85, 90, 95, 96, 97, 98, 99, 99.9, 99.9 or greater than 99.999% of the pharmaceutical composition or compound of the invention may be enclosed, surrounded or encased within the delivery agent. “Partially encapsulated” means that less than 10, 10, 20, 30, 40 50 or less of the pharmaceutical composition or compound of the invention may be enclosed, surrounded or encased within the delivery agent. Advantageously, encapsulation may be determined by measuring the escape or the activity of the pharmaceutical composition or compound of the invention using fluorescence and/or electron micrograph. For example, at least 1, 5, 10, 20, 30, 40, 50, 60, 70, 80, 85, 90, 95, 96, 97, 98, 99, 99.9, 99.99 or greater than 99.99% of the pharmaceutical composition or compound of the invention are encapsulated in the delivery agent.

[0199] In another embodiment, the saRNA may be encapsulated into a lipid nanoparticle or a rapidly eliminated lipid nanoparticle and the lipid nanoparticles or a rapidly eliminated lipid nanoparticle may then be encapsulated into a polymer, hydrogel and/or surgical sealant described herein and/or known in the art. As a non-limiting example, the polymer, hydrogel or surgical sealant may be PLGA, ethylene vinyl acetate (EVAc), poloxamer, GELSITE® (Nanotherapeutics, Inc. Alachua, Fla.), HYLENEX® (Halozyme Therapeutics, San Diego Calif.), surgical sealants such as fibrinogen polymers (Ethicon Inc. Cornelia, Ga.), TISSELL® (Baxter International, Inc., Deerfield, Ill.), PEG-based sealants, and COSEAL® (Baxter International, Inc., Deerfield, Ill.).

[0200] In another embodiment, the lipid nanoparticle may be encapsulated into any polymer known in the art which may form a gel when injected into a subject. As another non-limiting example, the lipid nanoparticle may be encapsulated into a polymer matrix which may be biodegradable.

[0201] In one embodiment, the saRNA formulation for controlled release and/or targeted delivery may also include at least one controlled release coating. Controlled release coatings include, but are not limited to, OPADRY®, polyvinylpyrrolidone/vinyl acetate copolymer, polyvinylpyrrolidone, hydroxypropyl methylcellulose, hydroxypropyl cellulose, hydroxyethyl cellulose, EUDRAGIT RL®, EUDRAGIT RS® and cellulose derivatives such as ethylcellulose aqueous dispersions (AQUACOAT® and SURELEASE®).

[0202] In one embodiment, the controlled release and/or targeted delivery formulation may comprise at least one degradable polyester which may contain polycationic side chains. Degradeable polyesters include, but are not limited to, poly(serine ester), poly(L-lactide-co-L-lysine), poly(4-hydroxy-L-proline ester), and combinations thereof. In another embodiment, the degradable polyesters may include a PEG conjugation to form a PEGylated polymer.

[0203] In one embodiment, the saRNA of the present invention may be formulated with a targeting lipid with a targeting moiety such as the targeting moieties disclosed in US20130202652 to Manoharan et al., the contents of which are incorporated herein by reference in their entirety. As a non-limiting example, the targeting moiety of formula I of US 20130202652 to Manoharan et al. may selected in order to favor the lipid being localized with a desired organ, tissue, cell, cell type or subtype, or organelle. Non-limiting targeting moieties that are contemplated in the present invention include transferrin, anisamide, an RGD peptide, prostate specific membrane antigen (PSMA), fucose, an antibody, or an aptamer.

[0204] In one embodiment, the saRNA of the present invention may be encapsulated in a therapeutic nanoparticle. Therapeutic nanoparticles may be formulated by methods described herein and known in the art such as, but not limited to, international Pub Nos. WO2010005740, WO2010030763, WO2010005721, WO2010005723, WO2012054923, US Pub. Nos. US20110262491, US20100104645, US20100087337, US20100068285, US20110274759, US20100068286 and US20120288541 and U.S. Pat. Nos. 8,206,747, 8,293,276, 8,318,208 and 8,318,211; the contents of each of which are herein incorporated by reference in their entirety. In another embodiment, therapeutic polymer nanoparticles may be identified by the methods described in US Pub No. US20120140790, the contents of which are herein incorporated by reference in its entirety.

[0205] In one embodiment, the therapeutic nanoparticle may be formulated for sustained release. As used herein, “sustained release” refers to a pharmaceutical composition or compound that conforms to a release rate over a specific period of time. The period of time may include, but is not limited to, hours, days, weeks, months and years. As a non-limiting example, the sustained release nanoparticle may comprise a polymer and a therapeutic agent such as, but not limited to, the saRNA of the present invention (see International Pub No. 2010075072 and US Pub No. US20100216804, US20110217377 and US20120201859, the contents of each of which are herein incorporated by reference in their entirety).

[0206] In one embodiment, the therapeutic nanoparticles may be formulated to be target specific. As a non-limiting example, the therapeutic nanoparticles may include a corticosteroid (see International Pub. No. WO2011084518; the contents of which are herein incorporated by reference in its entirety). In one embodiment, the therapeutic nanoparticles may be formulated to be cancer specific. As a non-limiting example, the therapeutic nanoparticles may be formulated in nanoparticles described in International Pub No. WO2008121949, WO2010005726, WO2010005725, WO2011084521 and US Pub No. US20100069426, US20120004293 and US20100104655, the contents of each of which are herein incorporated by reference in their entirety.

[0207] In one embodiment, the nanoparticles of the present invention may comprise a polymeric matrix. As a non-limiting example, the nanoparticle may comprise two or more polymers such as, but not limited to, polyethylenes, polycarbonates, polyanhydrides, polyhydroxyacids, polypropylfumerates, polycaprolactones, polyamides, polyacetals, polyethers, polyesters, poly(orthoesters), polycyanoacrylates, polyvinyl alcohols, polyurethanes, polyphosphazenes, polyacrylates, polymethacrylates, polycyanoacrylates, polyureas, polystyrenes, polyamines, polylysine, poly(ethylene imine), poly(serine ester), poly(L-lactide-co-L-Iysine), poly(4-hydroxy-L-proline ester) or combinations thereof.

[0208] In one embodiment, the therapeutic na.noparticle comprises a diblock copolymer. In one embodiment, the diblock copolymer may include PEG in combination with a polymer such as, but not limited to, polyethylenes, potycarbonates, polyanhydrides, polyhydroxyacids, polypropylfumerates, polycaprolactones, polyamides, polyacetals, polyethers, polyesters, poly(orthoesters), polycyanoacrylates, polyvinyl alcohols, polyurethanes, polyphosphazenes, polyacrylates, polymethacrylates, polycyanoacrylates, polyureas, polystyrenes, polyamines, palylysirie poly(ethylene imine), poly(serine ester), poly(L-lactide-co-L-lysine), poly(4-hydroxy-L-proline ester) or combinations thereof.

[0209] As a non-limiting example the therapeutic nanoparticle comprises a PLGA-PEG block copolymer (see US Pub. No. US20120004293 and U.S. Pat. No. 8,236,330, each of which is herein incorporated by reference in their entirety). In another non-limiting example, the therapeutic nanoparticle is a stealth nanoparticle comprising a diblock copolymer of PEG and PLA or PEG and PLGA (see U.S. Pat. No 8,246,968 and International Publication No. WO2012166923, the contents of each of which is herein incorporated by reference in its entirety).

[0210] In one embodiment, the therapeutic nanoparticle may comprise a multiblock copolymer such as, but not limited to the multibilock copolymers described in U.S. Pat. Nos. 8,263,665 and 8,287,910; the contents of each of which are herein incorporated by reference in its entirety.

[0211] In one embodiment, the block copolymers described herein may be included in a poiyion complex comprising a non-polymeric micelle and the block copolymer. (See e.g., U.S. Pub. No. 20120076836; the contents of which are herein incorporated by reference in its entirety).

[0212] In one embodiment, the therapeutic nanoparticle may comprise at least one acrylic polymer. Acrylic polymers include but are not limited to, acrylic acid, methacrylic acid, acrylic acid and methacrylic acid copolymers, methyl methacrylate copolymers, ethoxyethyl methacrylates, cyanoethyl methacrylate, amino alkyl methacrylate copolymer, poly(acrylic acid), poly(methacrylic acid), polycyanoacrylates and combinations thereof.

[0213] In one embodiment, the therapeutic nanoparticles may comprise at least one amine-containing polymer such as, but not limited to polylysine, polyethylene imine, poly(amidoamine) dendrimers, poly(beta-amino esters) (See e.g., U.S. Pat. No. 8,287,849; the contents of which are herein incorporated by reference in its entirety) and combinations thereof.

[0214] In one embodiment, the therapeutic nanoparti cies may comprise at least one degradable polyester which may contain polycationic side chains. Degradable polyesters include, but are not limited to, poly(serine ester), poly(L-lactide-co-L-lysine), poly(4-hydroxy-L-proline ester), and combinations thereof In another embodiment, the degradable polyesters may include a PEG conjugation to form a PEGylated polymer,

[0215] In another embodiment, the therapeutic nanoparticle may include a conjugation of at least one targeting ligand. The targeting ligand may be any ligand known in the art such as, but not limited to, a monoclonal antibody, (Kirpotin et al, Cancer Res. 2006 66:6732-6740; the contents of which are herein incorporated by reference in its entirety).

[0216] In one embodiment, the therapeutic nanoparticle may be formulated in an aqueous solution which may be used to target cancer (see International Pub No. WO2011084513 and US Pub No. US20110294717, the contents of each of which is herein incorporated by reference in their entirety).

[0217] In one embodiment, the saRNA may be encapsulated in, linked to and/or associated with synthetic nanocarriers. Synthetic nanocarriers include, but are not limited to, those described in International Pub. Nos. WO2010005740, WO2010030763, WO201213501, WO2012149252, WO2012149255, WO2012149259, WO2012149265, WO2012149268, WO2012149282, WO2012149301, WO2012149393, WO2012149405, WO2012149411, WO2012149454 and WO2013019669, and US Pub. Nos. US20110262491, US20100104645, US20100087337 and US20120244222, the contents of each of which are herein incorporated by reference in their entirety. The synthetic nanocarriers may be formulated using methods known in the art and/or described herein. As a non-limiting example, the synthetic nanocarriers may be formulated by the methods described in International Pub Nos. WO2010005740, WO2010030763 and WO201213501and US Pub. Nos. US20110262491, US20100104645, US20100087337 and US201202442, the contents of each of which are herein incorporated by reference in their entirety. In another embodiment, the synthetic na.nocarrier formulations may be lyophilized by methods described in International Pub. No. WO2011072218 and U.S. Pat. No. 8,211,473; the contents of each of which are herein incorporated by reference in their entirety.

[0218] In one embodiment, the synthetic nanocarriers may contain reactive groups to release the saRNA described herein (see International Pub. No. WO20120952552 and US Pub No. US20120171229, the contents of each of which are herein incorporated by reference in their entirety).

[0219] In one embodiment, the synthetic nanocarriers may be formulated for targeted release. In one embodiment, the synthetic nanocarrier may be formulated to release the saRNA at a specified pH and/or after a desired time interval. As a non-limiting example, the synthetic nanoparticle may be formulated to release the saRNA after 24 hours and/or at a pH of 4.5 (see International Pub. Nos. WO2010138193 and WO2010138194 and US Pub Nos. US20110020388 and US20110027217, the contents of each of which is herein incorporated by reference in their entireties)

[0220] In one embodiment, the synthetic nanocarriers may be formulated for controlled and/or sustained release of the saRNA described herein. As a non-limiting example, the synthetic nanocarriers for sustained release may be formulated by methods known in the art, described herein and/or as described in International Pub No. WO2010138192 and US Pub No. 20100303850, the contents each of which is herein incorporated by reference in their entirety.

[0221] In one embodiment, the nanoparticle may be optimized for oral administration. The nanoparticle may comprise at least one cationic biopolymer such as, but not limited to, chitosan or a derivative thereof. As a non-limiting example, the nanoparticle may be formulated by the methods described in U.S. Pub. No. 20120282343; the contents of which are herein incorporated by reference in its entirety.

[0222] In one embodiment, the saRNA of the present invention may be formulated in a modular composition such as described in U.S. Pat. No. 8,575,123 to Manoharan et al., the contents of which are herein incorporated by reference in their entirety. As a non-limiting example, the modular composition may comprise a nucleic acid, e.g., the saRNA of the present invention, at least one endosomolytic component, and at least one targeting ligand. The modular composition may have a formula such as any formula described in U.S. Pat. No. 8,575,123 to Manoharan et al., the contents of which are herein incorporated by reference in their entirety.

[0223] In one embodiment, the saRNA of the present invention may be encapsulated in the lipid formulation to form a stable nucleic acid-lipid particle (SNALP) such as described in U.S. Pat. No. 8,546,554 to de Fougerolles et al., the contents of which are incorporated here by reference in their entirety. The lipid may be cationic or non-cationic. In one non-limiting example, the lipid to nucleic acid ratio (mass/mass ratio) (e.g., lipid to saRNA ratio) will be in the range of from about 1:1 to about 50:1, from about 1:1 to about 25:1, from about 3:1 to about 15:1, from about 4:1 to about 10:1, from about 5:1 to about 9:1, or about 6:1 to about 9:1, or 5:1, 6:1, 7:1, 8:1, 9:1, 10:1, or 11:1. In another example, the SNALP includes 40% 2,2-Dilinoleyl-4-dimethylaminoethyl-[1,3]-dioxolane (Lipid A), 10% dioleoylphosphatidylcholine (DSPC), 40% cholesterol, 10% polyethyleneglycol (PEG)-C-DOMG (mole percent) with a particle size of 63.0±20 nm and a 0.027 nucleic acid/lipid ratio. In another embodiment, the saRNA of the present invention may be formulated with a nucleic acid-lipid particle comprising an endosomal membrane destabilizer as disclosed in U.S. Pat. No. 7,189,705 to Lam et al., the contents of which are incorporated herein by reference in their entirety. As a non-limiting example, the endosomal membrane destabilizer may be a Ca²⁺ ion.

[0224] In one embodiment, the saRNA of the present invention may be formulated with formulated lipid particles (FLiPs) disclosed in U.S. Pat. No. 8,148,344 to Akinc et al., the contents of which are herein incorporated by reference in their entirety. Akinc et al. teach that FLiPs may comprise at least one of a single or double-stranded oligonucleotide, where the oligonucleotide has been conjugated to a lipophile and at least one of an emulsion or liposome to which the conjugated oligonucleotide has been aggregated, admixed or associated. These particles have surprisingly been shown to effectively deliver oligonucleotides to heart, lung and muscle disclosed in U.S. Pat. No. 8,148,344 to Akinc et al., the contents of which are herein incorporated by reference in their entirety.

[0225] In one embodiment, the saRNA of the present invention may be delivered to a cell using a composition comprising an expression vector in a lipid formulation as described in U.S. Pat. No. 6,086,913 to Tam et al., the contents of which are incorporated herein by reference in their entirety. The composition disclosed by Tam is serum-stable and comprises an expression vector comprising first and second inverted repeated sequences from an adeno associated virus (AAV), a rep gene from AAV, and a nucleic acid fragment. The expression vector in Tam is complexed with lipids.

[0226] In one embodiment, the saRNA of the present invention may be formulated with a lipid formulation disclosed in US 20120270921 to de Fougerolles et al., the contents of which are incorporated herein by reference in their entirety. In one non-limiting example, the lipid formulation may include a cationic lipid having the formula A described in US 20120270921, the contents of which are herein incorporated by reference in its entirety. In another non-limiting example, the compositions of exemplary nucleic acid-lipid particles disclosed in Table A of US 20120270921, the contents of which are incorporated herein by reference in their entirety, may be used with the saRNA of the present invention.

[0227] In one embodiment, the saRNA of the present invention may be fully encapsulated in a lipid particle disclosed in US 20120276207 to Maurer et al., the contents of which are incorporated herein by reference in their entirety. The particles may comprise a lipid composition comprising preformed lipid vesicles, a charged therapeutic agent, and a destabilizing agent to form a mixture of preformed vesicles and therapeutic agent in a destabilizing solvent, wherein the destabilizing solvent is effective to destabilize the membrane of the preformed lipid vesicles without disrupting the vesicles.

[0228] In one embodiment, the saRNA of the present invention may be formulated with a conjugated lipid. In a non-limiting example, the conjugated lipid may have a formula such as described in US 20120264810 to Lin et al., the contents of which are incorporated herein by reference in their entirety. The conjugate lipid may form a lipid particle which further comprises a cationic lipid, a neutral lipid, and a lipid capable of reducing aggregation.

[0229] In one embodiment, the saRNA of the present invention may be formulated in a neutral liposomal formulation such as disclosed in US 20120244207 to Fitzgerald et al., the contents of which are incorporated herein by reference in their entirety. The phrase “neutral liposomal formulation” refers to a liposomal formulation with a near neutral or neutral surface charge at a physiological pH. Physiological pH can be, e.g., about 7.0 to about 7.5, or, e.g., about 7.5, or, e.g., 7.0, 7.1, 7.2, 7.3, 7.4, or 7.5, or, e.g., 7.3, or, e.g., 7.4. An example of a neutral liposomal formulation is an ionizable lipid nanoparticle (iLNP). A neutral liposomal formulation can include an ionizable cationic lipid, e.g., DLin-KC2-DMA.

[0230] In one embodiment, the saRNA of the present invention may be formulated with a charged lipid or an amino lipid. As used herein, the term “charged lipid” is meant to include those lipids having one or two fatty acyl or fatty alkyl chains and a quaternary amino head group. The quaternary amine carries a permanent positive charge. The head group can optionally include an ionizable group, such as a primary, secondary, or tertiary amine that may be protonated at physiological pH. The presence of the quaternary amine can alter the pKa of the ionizable group relative to the pKa of the group in a structurally similar compound that lacks the quaternary amine (e.g., the quaternary amine is replaced by a tertiary amine) In some embodiments, a charged lipid is referred to as an “amino lipid.” In a non-limiting example, the amino lipid may be any amino lipid described in US20110256175 to Hope et al., the contents of which are incorporated herein by reference in their entirety. For example, the amino lipids may have the structure disclosed in Tables 3-7 of Hope, such as structure (II), DLin-K-C2-DMA, DLin-K2-DMA, DLin-K6-DMA, etc. The resulting pharmaceutical preparations may be lyophilized according to Hope. In another non-limiting example, the amino lipids may be any amino lipid described in US 20110117125 to Hope et al., the contents of which are incorporated herein by reference in their entirety, such as a lipid of structure (I), DLin-K-DMA, DLin-C-DAP, DLin-DAC, DLin-MA, DLin-S-DMA, etc. In another non-limiting example, the amino lipid may have the structure (I), (II), (III), or (IV), or 4-(R)-DUn-K-DMA (VD, 4-(S)-DUn-K-DMA (V) as described in WO2009132131 to Manoharan et al., the contents of which are incorporated herein by reference in their entirety. In another non-limiting exa.mple, the charged lipid used in any of the formulations described herein may be any charged lipid described in EP2509636 to Manoharan et al., the contents of which are incorporated herein by reference in their entirety.

[0231] In one embodiment, the saRNA of the present invention may be formulated with an association complex containing lipids, liposomes, or lipoplexes. In a non-limiting example, the association complex comprises one or more compounds each having a structure defined by formula (I), a PEG-lipid having a structure defined by formula (XV), a steroid and a nucleic acid disclosed in U.S. Pat. No. 8,034,376 to Manoharan et al., the contents of which are incorporated herein by reference in their entirety. The saRNA may be formulated with any association complex described in U.S. Pat. No. 8,034,376, the contents of which are herein incorporated by reference in its entirety.

[0232] In one embodiment, the saRNA of the present invention may be formulated with reverse head group lipids. As a non-limiting example, the saRNA may be formulated with a zwitterionic lipid comprising a headgroup wherein the positive charge is located near the acyl chain region and the negative charge is located at the distal end of the head group, such as a lipid having structure (A) or structure (I) described in WO2011056682 to Leung et al., the contents of which are incorporated herein by reference in their entirety.

[0233] In one embodiment, the saRNA of the present invention may be formulated in a lipid bilayer carrier. As a non-limiting example, the saRNA may be combined with a lipid-detergent mixture comprising a lipid mixture of an aggregation-preventing agent in an amount of about 5 mol % to about 20 mol %, a cationic lipid in an amount of about 0.5 mol % to about 50 mol %, and a fusogenic lipid and a detergent, to provide a nucleic acid-lipid-detergent mixture; and then dialyzing the nucleic acid-lipid-detergent mixture against a buffered salt solution to remove the detergent and to encapsulate the nucleic acid in a lipid bilayer carrier and provide a lipid Mayer-nucleic acid composition, wherein the buffered salt solution has an ionic strength sufficient to encapsulate of from about 40% to about 80% of the nucleic acid, described in WO1999018933 to Cullis et al., the contents of which are incorporated herein by reference in their entirety.

[0234] In one embodiment, the saRNA of the present invention may be formulated in a nucleic acid-lipid particle capable of selectively targeting the saRNA to a heart, liver, or tumor tissue site. For example, the nucleic acid-lipid particle may comprise (a) a nucleic acid; (b) 1.0 mole % to 45 mole % of a cationic lipid; (c) 0.0 mole % to 90 mole % of another lipid; (d) 1.0 mole % to 10 mole % of a bilayer stabilizing component; (e) 0.0 mole % to 60 mole % cholesterol; and (f) 0.0 mole % to 10 mole % of cationic polymer lipid as described in EP1328254 to Cullis et al., the contents of which are incorporated herein by reference in their entirety. Cullis teaches that varying the amount of each of the cationic lipid, bilayer stabilizing component, another lipid, cholesterol, and cationic polymer lipid can impart tissue selectivity for heart, liver, or tumor tissue site, thereby identifying a nucleic acid-lipid particle capable of selectively targeting a nucleic acid to the heart, liver, or tumor tissue site.

### Polymers, Biodegradable Nanoparticles, and Core-Shell Nanoparticles

[0235] The saRNA of the invention can be formulated using natural nd/or synthetic polymers. Non-limiting examples of polymers which may be used for delivery include, but are not limited to, DYNAMIC POLYCONJUGATE® (Arrowhead Research Corp, Pasadena, Calif.) formulations from WRVS® Bio (Madison, Wis.) and Roche Madison (Madison, Wis.), PHASERX™ polymer formulations such as, without limitation, SMARTT POLYMER TECHNO:LOG™ (PHASERX®, Seattle, Wash.), DMRI/DOPE, poloxamer, VAXIFECTIN®, adjuvant from Vical (San Diego, Calif.), chitosan, cyclodextrin from Calando Pharmaceuticals (Pasadena, Calif.), dendrimers and poly(lactic-co-glycolic acid) (PLGA) polymers. RONDEL™ (RNAi/Oligonucleotide Nanoparticle Delivery) polymers (Arrowhead Research Corporation, Pasadena, Calif.) and pH responsive co-block polymers such as, but not limited to, PHASERA® (Seattle, Wash.).

[0236] A non-limiting example of chitosan formulation includes a core of positively charged chitosan and an outer portion of negatively charged substrate (U.S. Pub. No. 20120258176; herein incorporated by reference in its entirety). Chitosan includes, but is not limited to N-trimethyl chitosan, mono-N-carboxymethyl chitosan (MCC), N-palmitoyl chitosan (NPCS), EDTA-chitosan, low molecular weight chitosan, chitosan derivatives, or combinations thereof.

[0237] In one embodiment, the polymers used in the present invention have undergone processing to reduce and/or inhibit the attachment of unwanted substances such as, but not limited to, bacteria, to the surface of the polymer. The polymer may be processed by methods known and/or described in the art and/or described in International Pub. No. WO2012150467, herein incorporated by reference in its entirety.

[0238] A non-limiting example of PLGA formulations include, but are not limited to, PLGA injectable depots (e.g., ELIGARD® which is formed by dissolving PLGA in 66% N-methyl-2-pyrrolidone (NMP) and the remainder being aqueous solvent and leuprolide. Once injected, the PLGA and leuprolide peptide precipitates into the subcutaneous space).

[0239] Many of these polymer approaches have demonstrated efficacy in delivering oligonucleotides in vivo into the cell cytoplasm (reviewed in de Fougerolles Hum Gene Ther. 2008 19:125-132; herein incorporated by reference in its entirety). Two polymer approaches that have yielded. robust in vivo delivery of nucleic acids, in this case with small interfering RNA (siRNA), are dynamic polyconjugates and cyclodextiin-based nanoparticles. The first of these delivery approaches uses dynamic polyconjugates and has been shown in vivo in mice to effectively deliver siRNA and silence endogenous target mRNA in hepatocytes (Rozema et al., Proc Natl Acad Sci USA. 2007 104:12982-12887; herein incorporated by reference in its entirety). This particular approach is a multicomponent polymer system whose key features include a membrane-active polymer to which nucleic acid, in this case siRNA, is covalently coupled via a disulfide bond and where both PEG (for charge masking) and N-acetylgalactosamine (for hepatocyte targeting) groups are linked via pH-sensitive bonds (Rozema et al., Proc Natl Acad Sci USA. 2007 104:12982-12887; herein incorporated by reference in its entirety). On binding to the hepatocyte and entry into the endosome, the polymer complex disassembles in the low-pH environment, with the polymer exposing its positive charge, leading to endosomal escape and cytoplasmic release of the siRNA from the polymer. Through replacement of the N-acetylgalactosamine group with a mannose group, it was shown one could alter targeting from asialoglycoprotein receptor-expressing hepatocytes to sinusoidal endothelium and Kupffer cells. Another polymer approach involves using transferrin-targeted cyclodextrin-containing polycation nanoparticles. These nanoparticles have demonstrated targeted silencing of the EWS-FLIl gene product in transferrin receptor-expressing Ewing's sarcoma tumor cells (Hu-Lieskovan et al., Cancer Res. 2005 65: 8984-8982; herein incorporated by reference in its entirety) and siRNA formulated in these nanoparticles was well tolerated in non-human primates (Heidel et al., Proc Natl Acad Sci USA 2007 104:5715-21; herein incorporated by reference in its entirety). Both of these delivery strategies incorporate rational approaches using both targeted delivery and endosomal escape mechanisms.

[0240] The polymer formulation can permit the sustained or delayed release of saRNA (e.g., following intramuscular or subcutaneous injection). The altered release profile for the saRNA can result in, for example, translation of an encoded protein over an extended period of time. Biodegradable polymers have been previously used to protect nucleic acids from degradation and been shown to result in sustained release of payloads in vivo (Rozema et al., Proc Natl Acad Sci USA. 2007 104:12982-12887; Sullivan et Expert Opin Drug Deliv. 2010 7:1433-1446; Convertine et al., Biomacromolecules. 2010 Oct 1; Chu et al., Acc Chem Res. 2012 Jan. 13; Manganiello et al., Biomaterials. 2012 33:2301-2309; Benoit et al., Biomacromolecules. 2011 12:2708-2714; Singha et al., Nucleic Acid Ther. 2011 2:133-147; de Fougerolles Hum Gene Ther. 2008 19:125-132; Schaffert and Wagner, Gene Ther. 2008 16:1131-1138; Chaturvedi et al., Expert Opin Drug Deliv. 2011 8:1455-1468; Davis, Mol Pharm. 2009 6:659-668; Davis, Nature 2010 464:1067-1070; each of which is herein incorporated by reference in its entirety).

[0241] In one embodiment, the pharmaceutical compositions may be sustained release formulations. In a further embodiment, the sustained release formulations may be for subcutaneous delivery. Sustained release formulations may include, but are not limited to, PLGA microspheres, ethylene vinyl acetate (EVAc), poloxamer, GELSITE® (Nanotherapeutics, Inc. Alachua, Fla.), HYLENEX® (Hal ozyme Therapeutics, San Diego Calif.), surgical sealants such as fibrinogen polymers (Ethicon Inc. Cornelia, Ga.), TISSELL® (Baxter International, Inc Deerfield, Ill.), PEG-based sealants, and COSEAL® (Baxter international, Inc Deerfield, Ill.).

[0242] As a non-limiting example saRNA may be formulated in PLGA microspheres by preparing the PLGA microspheres with tunable release rates (e.g., days and weeks) and encapsulating the saRNA in the PLGA microspheres while maintaining the integrity of the saRNA during the encapsulation process. EVAc are non-biodegradeable, biocompatible polymers which are used extensively in pre-clinical sustained release implant applications (e.g., extended release products Ocusert a pilocarpine ophthalmic insert for glaucoma or progestasert a sustained release progesterone intrauterine device; transdermal delivery systems Testoderm, Duragesic and Selegiline; catheters). Poloxamer E-407 NF is a hydrophilic, non-ionic surfactant triblock copolymer of polyoxyethylene-polyoxypropylene-polyoxyethylene having a low viscosity at temperatures less than 5° C. and forms a solid gel at temperatures greater than 15° C. PEG-based surgical sealants comprise two synthetic PEG components mixed in a delivery device which can be prepared in one minute, seals in 3 minutes and is reabsorbed within 30 days. GELSITE® and natural polymers are capable of in-situ gelation at the site of administration. They have been shown to interact with protein and peptide therapeutic candidates through ionic ineraction to provide a stabilizing effect.

[0243] Polymer formulations can also be selectively targeted through expression of different ligands as exemplified by, but not limited by, folate, transferrin, and N-acetylgalactosamine (GalNAc) (Benoit et al., Biomacromolecules. 2011 12:2708-2714; Rozema et al., Proc Natl Acad Sci USA. 2007 104:12982-12887; Davis, Mol Pharm. 2009 6:659-668; Davis, Nature 2010 464:1067-1070; each of which is herein incorporated by reference in its entirety).

[0244] The saRNA of the invention may be formulated with or in a polymeric compound. The polymer may include at least one polymer such as, but not limited to, polyethenes, polyethylene glycol (PEG), poly(l-lysine)(PLL), PEG grafted to PLL, cationic lipopolymer, biodegradable cationic lipopolymer, polyethyleneimine (PEI), cross-linked branched poly(alkylene imines), a polyamine derivative, a modified poloxamer, a biodegradable polymer, elastic biodegradable polymer, biodegradable block copolymer, biodegradable random copolymer, biodegradable polyester copolymer, biodegradable polyester block copolymer, biodegradable polyester block random copolymer, multiblock copolymers, linear biodegradable copolymer, poly[α-(4-aminobutyl)-L-glycolic acid) (PAGA), biodegradable cross-linked cationic multi-block copolymers, polycarbonates, polyanhydrides, polyhydroxyacids, polypropylfumerates, polycaprolactones, polyamides, polyacetals, polyethers, polyesters, poly(orthoesters), polycyanoacrylates, polyvinyl alcohols, polyurethanes, polyphosphazenes, polyacrylates, polymethacrylates, polycyanoacrylates, polyureas, polystyrenes, polyamines, polylysine, poly(ethylene imine), poly(serine ester), poly(L-lactide-colysine), poly(4-hydroxy-L-proline ester), acrylic polymers, amine-containing polymers, dextran polymers, dextran polymer derivatives or combinations thereof.

[0245] As a non-limiting example, the saRNA of the invention may be formulated with the polymeric compound of PEG grafted with PLL as described in U.S. Pat. No. 6,177,274; herein incorporated by reference in its entirety. The formulation may be used for transfecting cells in vitro or for in vivo delivery of the saRNA. In another example, the saRNA may be suspended in a solution or medium with a cationic polymer, in a dry pharmaceutical composition or in a solution that is capable of being dried as described in U.S. Pub. Nos. 20090042829 and 20090042825; each of which are herein incorporated by reference in their entireties.

[0246] As another non-limiting example the saRNA of the invention may be formulated with a PLGA-PEG block copolymer (see US Pub. No. US20120004293 and U.S. Pat. No. 8,236,330, herein incorporated by reference in their entireties) or PLGA-PEG-PLGA block copolymers (See U.S. Pat. No. 6,004,573, herein incorporated by reference in its entirety). As a non-limiting example, the saRNA of the invention may be formulated with a diblock copolymer of PEG and PLA or PEG and PLGA (see U.S. Pat. No. 8,246,968, herein incorporated by reference in its entirety).

[0247] A polyamine derivative may be used to deliver nucleic acids or to treat and/or prevent a disease or to be included in an implantable or injectable device (U.S. Pub. No. 20100260817 herein incorporated by reference in its entirety). As a non-limiting example, a pharmaceutical composition may include the saRNA and the polyamine derivative described in U.S. Pub. No. 20100260817 (the contents of which are incorporated herein by reference in its entirety. As a non-limiting example the saRNA of the present invention may be delivered using a polyaminde polymer such as, but not limited to, a polymer comprising a 1,3-dipolar addition polymer prepared by combining a carbohydrate diazide monomer with a dilkyne unite comprising oligoamines (U.S. Pat. No. 8,236,280; herein incorporated by reference in its entirety).

[0248] In one embodiment, the saRNA of the present invention may be formulated with at least one polymer and/or derivatives thereof described in International Publication Nos. WO2011115862, WO2012082574 and WO2012068187 and U.S. Pub. No. 20120283427, the contents of each of which are herein incorporated by reference in their entireties. In another embodiment, the saRNA of the present invention may be formulated with a polymer of formula Z as described in WO2011115862, herein incorporated by reference in its entirety. In yet another embodiment, the saRNA may be formulated with a polymer of formula Z, Z′ or Z″ as described in International Pub. Nos. WO2012082574 or WO2012068187 and U.S. Pub. No. 2012028342, the contents of each of which are herein incorporated by reference in their entireties. The polymers formulated with the saRNA of the present invention may be synthesized by the methods described in International Pub. Nos. WO2012082574 or WO2012068187, the contents of each of which are herein incorporated by reference in their entireties.

[0249] The saRNA of the invention may be formulated with at least one acrylic polymer. Acrylic polymers include but are not limited to, acrylic acid, methacrylic acid, acrylic acid and methacrylic acid copolymers, methyl methacrylate copolymers, ethoxyethyl methacrylates, cyanoethyl methacrylate, amino alkyl tnethacrylate copolymer, poly(acrylic acid), poly(methacrylic acid), polycyanoacrylates and combinations thereof.

[0250] Formulations of saRNA of the invention may include at least one amine-containing polymer such as, but not limited to polylysine, polyethylene imine, poly(amidoamine) dendrimers or combinations thereof.

[0251] For example, the saRNA of the invention may be formulated in a pharmaceutical compound including a poly(alkylene imine), a biodegradable cationic lipopolymer, a biodegradable block copolymer, a biodegradable polymer, or a biodegradable random copolymer, a biodegradable polyester block copolymer, a biodegradable polyester polymer, a biodegradable polyester random copolymer, a linear biodegradable copolymer, PAGA, a biodegradable cross-linked cationic multi-block copolymer or combinations thereof. The biodegradable cationic lipopolymer may be made by methods known in the art and/or described. in U.S. Pat. No. 6,696,038, U.S. App. Nos. 20030073619 and 20040142474 each of which is herein incorporated by reference in their entireties. The poly(alkylene imine) may be made using methods known in the art and/or as described in U.S. Pub. No. 20100004315, herein incorporated by reference in its entirety. The biodegradable polymer, biodegradable block copolymer, the biodegradable random copolymer, biodegradable polyester block copolymer, biodegradable polyester polymer, or biodegradable polyester random copolymer may be made using methods known in the art and/or as described in U.S. Pat. Nos. 6,517,869 and 6,267,987, the contents of which are each incorporated herein by reference in their entirety. The linear biodegradable copolymer may be made using methods known in the art and/or as described in U.S. Pat. No. 6,652,886. The PAGA polymer may be made using methods known in the art and/or as described in U.S. Pat. No. 6,217,912 herein incorporated by reference in its entirety. The RAGA polymer may be copolymerized to form a copolymer or block copolymer with polymers such as but not limited to, poly-L-ysine, polyargine, polyornithine, histones, avidin, protamines, polylactides and poly(lactide-co-glycolides). The biodegradable cross-linked cationic multi-block copolymers may be made my methods known in the art and/or as described in U.S. Pat. No. 8,057,821 or U.S. Pub. No. 2012009145 each of which are herein incorporated by reference in their entireties. For example, the multi-block copolymers may be synthesized. using linear polyethyleneimine (LPEI) blocks which have distinct patterns as compared to branched polyethyleneimines. Further, the composition or pharmaceutical composition may be made by the methods known in the art, described herein, or as described in U.S. Pub. No. 20100004315 or U.S. Pat. Nos. 6,267,987 and 6,217,912 each of which are herein incorporated by reference in their entireties.

[0252] The saRNA of the invention may be formulated with at least one degradable polyester which may contain polycationic side chains. Degradeable polyesters include, but are not limited to, poly(serine ester), poly(L-lactide-co-L-lysine), poly(4-hydroxy-L-proline ester), and combinations thereof. In another embodiment, the degradable polyesters may include a PEG conjugation to form a PEGylated polymer.

[0253] The saRNA of the invention may be formulated with at least one crosslinkable polyester. Crosslinkable polyesters include those known in the art and described in US Pub. No. 20120269761, herein incorporated by reference in its entirety.

[0254] In one embodiment, the polymers described herein may be conjugated to a lipid-terminating PEG. As a non-limiting example, PLGA may be conjugated to a lipid-terminating PEG forming PLGA-DSPE-PEG. As another non-limiting example, PEG conjugates for use with the present invention are described in International Publication No. WO2008103276, herein incorporated by reference in its entirety. The polymers may be conjugated using a ligand conjugate such as, but not limited to, the conjugates described in U.S. Pat. No. 8,273,363, herein incorporated by reference in its entirety.

[0255] In one embodiment, the saRNA described herein may be conjugated with another compound. Non-limiting examples of conjugates are described in U.S. Pat. Nos. 7,964,578 and 7,833,992, each of which are herein incorporated by reference in their entireties. In another embodiment, saRNA of the present invention may be conjugated with conjugates of formula 1-122 as described in U.S. Pat. Nos. 7,964,578 and 7,833,992, each of which are herein incorporated by reference in their entireties. The saRNA described herein may be conjugated with a metal such as, but not limited to, gold. (See e.g., Giljohann et al. Journ. Amer. Chem. Soc. 2009 131(6): 2072-2073; herein incorporated by reference in its entirety). In another embodiment, the saRNA described herein may be conjugated and/or encapsulated in gold-nanoparticles. (International Pub. No. 10201216269 and U.S. Pub. No. 20120302940; each of which is herein incorporated by reference in its entirety).

[0256] As described in U.S. Pub. No. 20100004313, herein incorporated by reference in its entirety, a gene delivery composition may include a nucleotide sequence and a poloxamer. For example, the saRNA of the present invention may be used in a gene delivery composition with the poloxamer described in U.S. Pub. No. 20100004313.

[0257] In one embodiment, the polymer formulation of the present invention may be stabilized by contacting the polymer formulation, which may include a cationic carrier, with a cationic lipopolymer which may be covalently linked to cholesterol and polyethylene glycol groups. The polymer formulation may be contacted with a cationic lipopolymer using the methods described in U.S. Pub. No. 20090042829 herein incorporated by reference in its entirety.

[0258] The cationic carrier may include, but is not limited to, polyethylenimine, poly(trimethylenimine), poly(tetramethylenimine), polypropylenimine, aminoglycoside-polyamine, dideoxy-diamino-b-cyclodextrin, spermine, spermidine, poly(2-dimethylamino)ethyl methacrylate, poly(lysine), poly(histidine), poly(arginine), cationized gelatin, dendrimers, chitosan, 1,2-Dioleoyl-3-Trimethylammonium-Propane (DOTAP), N-[1-(2,3-dioleoyloxy)propyl]-N,N,N-trimethylammonium chloride (DOTMA), 1-[2-(oleoyloxy)ethyl]-2-oleyl-3-(2-hydroxyethyl)imidazolinium chloride (DOTIM), 2,3-dioleyloxy-N-[2(sperminecarboxamido)ethyl]-N,N-dimethyl-1-propanaminium trifluoroacetate (DOSPA), 3B-[N—(N′,N′-Dimethylaminoethane)-carbamoyl]Cholesterol Hydrochloride (DC-Cholesterol HCl) diheptadecylamidoglycyl spermidine (DOGS), N,N-distearyl-N,N-dimethylammonium bromide (DDRB), N-(1,2-dimyristyloxyprop-3-yl)-N,N-dimethyl-N-hydroxyethyl ammonium bromide (DMRIE), N,N-dioleyl-N,N-dimethylammonium chloride DODAC) and combinations thereof.

[0259] The saRNA of the invention may be formulated in a polyplex of one or more polymers (U.S. Pub. No. 20120237565 and 20120270927; each of which is herein incorporated by reference in its entirety). In one embodiment, the polyplex comprises two or more cationic polymers. The cationic polymer may comprise a poly(ethylene imine) (PEI) such as linear PEI.

[0260] The saRNA of the invention can also be formulated as a nanoparticle using a combination of polymers, lipids, and/or other biodegradable agents, such as, but not limited to, calcium phosphate. Components may be combined in a core-shell, hybrid, and/or layer-by-layer architecture, to allow for fine-tuning of the nanoparticle so to delivery of the saRNA may be enhanced (Wang et al., Nat Mater. 2006 5:791-796; Fuller et al., Biomaterials. 2008 29:1526-1532; DeKoker et al., Adv Drug Deliv Rev. 2011 63:748-761; Endres et al., Biomaterials. 2011 32:7721-7731; Su et al., Mol Pharm. 2011 Jun. 6; 8(3):774-87; herein incorporated by reference in its entirety). As a non-limiting example, the nanoparticle may comprise a plurality of polymers such as, but not limited to hydrophilic-hydrophobic polymers (e.g., PEG-PLGA), hydrophobic polymers (e.g., PEG) and/or hydrophilic polymers (International Pub. No. WO20120225129; herein incorporated by reference in its entirety).

[0261] Biodegradable calcium phosphate nanoparticles in combination with lipids and/or polymers may be used to deliver saRNA in vivo. In one embodiment, a lipid coated calcium phosphate nanoparticle, which may also contain a targeting ligand such as anisamide, may be used to deliver the saRNA of the present invention. For example, to effectively deliver siRNA in a mouse metastatic lung model a lipid coated calcium phosphate nanoparticle was used (Li et al., J Contr Rel. 2010 142: 416-421; Li et al., J Contr Rel. 2012 158:108-114; Yang et al., Mol Ther. 2012 20:609-615; herein incorporated by reference in its entirety). This delivery system combines both a targeted nanoparticle and a component to enhance the endosomal escape, calcium phosphate, in order to improve delivery of the siRNA.

[0262] In one embodiment, calcium phosphate with a PEG-polyanion block copolymer may be used to delivery saRNA. (Kazikawa et al., J Contr Rel. 2004 97:345-356; Kazikawa et al., J Contr Rel. 2006 111:368-370; herein incorporated by reference in its entirety).

[0263] In one embodiment, a PEG-charge-conversional polymer (Pitelia et al., Biomaterials. 2011 32:3106-3114) may be used to form a nanoparticle to deliver the saRNA of the present invention. The PEG-charge-conversional polymer may improve upon the PEG-polyanion block copolymers by being cleaved into a polycation at acidic pH, thus enhancing endosomal escape.

[0264] The use of core-shell nanoparticles has additionally focused on a high-throughput approach to synthesize cationic cross-linked nanogel cores and various shells (Siegwart et al., Proc Natl Acad Sci USA. 2011 108:12996-13001). The complexation, delivery, and internalization of the polymeric nanoparticles can be precisely controlled by altering the chemical composition in both the core and shell components of the nanoparticle. For example, the core-shell nanoparticles may efficiently deliver saRNA to mouse hepatocytes after they covalently attach cholesterol to the nanoparticle.

[0265] In one embodiment, a hollow lipid core comprising a middle PLGA layer and an outer neutral lipid layer containing PEG may be used to delivery of the saRNA of the present invention. As a non-limiting example, in mice bearing a luciferase-expressing tumor, it was determined that the lipid-polymer-lipid hybrid nanoparticle significantly suppressed luciferase expression, as compared to a conventional lipoplex (Shi et al., Angew Chem Int Ed. 2011 50:7027-7031; herein incorporated by reference in its entirety).

[0266] In one embodiment, the lipid nanoparticles may comprise a core of the saRNA disclosed herein and a polymer shell. The polymer shell may be any of the polymers described herein and are known in the art. In an additional embodiment, the polymer shell may be used to protect the modified nucleic acids in the core.

[0267] Coreshell nanoparticles for use with the saRNA of the present invention may be formed by the methods described in U.S. Pat. No. 8,313,777 herein incorporated by reference in its entirety.

[0268] In one embodiment, the core-shell nanoparticles may comprise a core of the saRNA disclosed herein and a polymer shell. The polymer shell may be any of the polymers described herein and are known in the art. In an additional embodiment, the polymer shell may be used to protect the saRNA in the core. As a non-limiting example, the core-shell nanoparticle may be used to treat an eye disease or disorder (See e.g. US Publication No. 20120321719, herein incorporated by reference in its entirety).

[0269] In one embodiment, the polymer used with the formulations described herein may be a modified polymer (such as, but not limited to, a modified polyacetal) as described in International Publication No. WO2011120053, herein incorporated by reference in its entirety.

### Delivery

[0270] The present disclosure encompasses the delivery of saRNA for any of therapeutic, prophylactic, pharmaceutical, diagnostic or imaging by any appropriate route taking into consideration likely advances in the sciences of drug delivery. Delivery may be naked or formulated.

[0271] The saRNA of the present invention may be delivered to a cell naked. As used herein in, “naked” refers to delivering saRNA free from agents which promote transfection. For example, the saRNA delivered to the cell may contain no modifications. The naked saRNA. may be delivered to the cell using routes of administration known in the art and described herein.

[0272] The saRNA of the present invention may be formulated, using the methods described herein. The formulations may contain saRNA which may be modified and/or unmodified. The formulations may further include, but are not limited to, cell penetration agents, a pharmaceutically acceptable carrier, a delivery agent, a bioerodible or biocompatible polymer, a solvent, and a sustained-release delivery depot. The formulated saRNA may be delivered to the cell using routes of administration known in the art and described herein.

[0273] The compositions may also be formulated for direct delivery to an organ or tissue in any of several ways in the art including, but not limited to, direct soaking or bathing, via a catheter, by gels, powder, ointments, creams, gels, lotions, and/or drops, by using substrates such as fabric or biodegradable materials coated or impregnated with the compositions, and the like. The saRNA of the present invention may also be cloned into a retroviral replicating vector (RRV) and transduced to cells.

### Administration

[0274] The saRNA of the present invention may be administered by any route which results in a therapeutically effective outcome. These include, but are not limited to enteral, gastroenteral, epidural, oral, transdermal, epidural (peridural), intracerebral (into the cerebrum), intracerebroventricular (into the cerebral ventricles), epicutaneous (application onto the skin), intradermal, (into the skin itself), subcutaneous (under the skin), nasal administration (through the nose), intravenous (into a vein), intraarterial (into an artery), intramuscular (into a muscle), intracardiac (into the heart), intraosseous infusion (into the bone marrow), intrathecal (into the spinal canal), intraperitoneal, (infusion or injection into the peritoneum), intravesical infusion, intravitreal, (through the eye), intracavernous injection, (into the base of the penis), intravaginal administration, intrauterine, extra-amniotic administration, transdermal (diffusion through the intact skin for systemic distribution), transmucosal (diffusion through a mucous membrane), insufflation (snorting), sublingual, sublabial, enema, eye drops (onto the conjunctiva), or in ear drops. In specific embodiments, compositions may be administered in a way which allows them cross the blood-brain barrier, vascular barrier, or other epithelial barrier. Routes of administration disclosed in International Publication WO 2013/090648 filed Dec. 14, 2012, the contents of which are incorporated herein by reference in their entirety, may be used to administer the saRNA of the present invention.

### Dosage Forms

[0275] A pharmaceutical composition described herein can be formulated into a dosage form described herein, such as a topical, intranasal, intratracheal, or injectable (e.g., intravenous, intraocular, intravitreal, intramuscular, intracardiac, intraperitoneal, subcutaneous). Liquid dosage forms, injectable preparations, pulmonary forms, and solid dosage forms described in international Publication WO 2013/090648 filed Dec. 14, 2012, the contents of which are incorporated herein by reference in their entirety may be used as dosage forms for the saRNA of the present invention.

### III. Methods of Use

[0276] One aspect of the present invention provides methods of using saRNA of the present invention and pharmaceutical compositions comprising the saRNA and at least one pharmaceutically acceptable carrier. The saRNA of the present invention modulates the expression of its target gene. In one embodiment is provided a method of regulating the expression of a target gene in vitro and/or in vivo comprising administering the saRNA of the present invention. In one embodiment, the expression of the target gene is increased by at least 5, 10, 20, 30, 40%, or at least 45, 50, 55, 60, 65, 70, 75%, or at least 80% in the presence of the saRNA of the present invention compared to the expression of the target gene in the absence of the saRNA of the present invention. In a further embodiment, the expression of the target gene is increased by a factor of at least 2, 3, 4, 5, 6, 7, 8, 9, 10, or by a factor of at least 15, 20, 25, 30, 35, 40, 45, 50, or by a factor of at least 60, 70, 80, 90, 100, in the presence of the saRNA of the present invention compared to the expression of the target gene in the absence of the saRNA of the present invention.

[0277] In one embodiment, the increase in gene expression of the saRNA descried herein is shown in proliferating cells.

[0278] The target gene may be any gene of the human genome. As a non-limiting example, the target gene may be any of the coding target genes listed in Lengthy Table 1 or any of the non-coding genes listed in Lengthy Table 2.

[0279] In one embodiment, the saRNA described herein may be used as a spacer in a CRISPR (clustered regularly interspaced palindromic repeats) system, such as a CRIPR/Cas9 system. The CRISPR system comprising saRNA described herein may be used to cleave and edit a target gene.

[0280] In one embodiment, the saRNA described herein may be used to treat blood disorders such as disorders affecting red blood cells (e.g., anemia, Thalassemia, sickle cell anemia and polycythemia vera), disorder affecting white blood cells (e.g., lymphoma, leukemia, multiple myeloma and myelodysplasitc syndrome), disorders affecting platelets (e.g., thrombocytopenia, idiopathic thrombocytopenic purpura, heparin-induced thrombocytopenia, thrombotic thrombocytopenic purpura and essential thrombocytosis), disorders affecting blood plasma (e.g., sepsis, hemophilia, von Willebrand disease, hypercoagulable state, deep venous thrombosis and disseminated intravascular coagulation (DIC)).

[0281] In one embodiment, the saRNA described herein may be used to treat albumin disorders such as analbuminaemia, bisalbuminemia, familial dysalbuminemic hyperthyroxinemia and hypoalbuminemia.

[0282] In one embodiment, the saRNA described herein may be used to treat coagulopathies such as haemophilia, activated protein C resistance, amyloid purpura, antiphospholipid syndrome, antithrombin III deficiency, Bernard-Soulier syndrome, bleeding diathesis, cavernous sinus thrombosis, coagulopathy, congenital afibrinogenemia, congenital amegakaryocytic thrombocytopenia, deep vein thrombosis, disseminated intravascular coagulation, dyfibrinogenemia, essential thrombocythaemia, Evans syndrome, factor I deficiency, factor V leiden, factor XIII deficiency, Fechtners syndrome, giant platelet disorder, Glanzmann's thrombasthenia, gray platelet syndrome, Harris platelet syndrome, heparain-induced thrombocytopenia, Hermansky-Pudlak Syndrome, hyperprothrombinemia, hypoprothrombinemia, idiopathic thrombocytopenic purpura, Kasabach-Merritt syndrome, May-Hegglin anomaly, neonatal alloimmune thrombocytopenia, Onyalai, phlebothrombosis, platelet storage pool deficiency, platelet transfusion refractoriness, Prett Test, primary fibrinogenolysis, protein C deficiency, protein S deficiency, prothrombin G20210A, pseudo gray platelet syndrome, purpura fulminans, Quebec platelet disorder, Scott syndrome, sticky platelet syndrome, superficial vein thrombosis, thrombocytopenia, thrombocytopenic purpura, thrombocytosis, thrombophilia, thrombotic microangiopathy, thrombotic thrombocytopenic purpura, Upshaw-Schulman syndrome and Von Willebrand disease.

[0283] In one embodiment, the saRNA described herein may be used to treat blood disease and disorders such as anemia, leukemia, lymphoma, multiple myeloma, sepsis and sickle-cell disease, atypical hemolytic uremic syndrome, chomeia, cytopenia, elliptocyte, fibrinogenolysis, hematolic disease, Hemolytic-uremic syndrome, hepatic veno-occlusive disease, hypervisocity syndrome, leukemoid reaction, leukocytosis, leukopenia, light chain deposition diease, macroglobulinemia, ornithinaemia, pancytopenia, panmyelosis, pseudothrombocytopenia, Shwachman-Diamond syndrome and tumor lysis syndrome.

[0284] In one embodiment, the saRNA described herein may be used to treat hemorrhagic and hematological disorders of the fetus and newborn such as ABO, anti-Kell, anti-Rhc, anti-RhE, kernicterus, neonatal jaundice, placental insufficiency, polycythemia and Rh disease.

[0285] In one embodiment, the saRNA described herein may be used to treat hematologic neoplasms such as hematologic malignant neoplasms (e.g., leukemia, lymphoma, multiple myeloma) and myeloid neoplasia (e.g., myeloid leukemia).

[0286] In one embodiment, the saRNA described herein may be used to treat histocytosis related conditions such as Erdheim-Chester disease, Hemophagocytic lymphohistiocytosis, Langerhans cell histiocytosis, malignant histiocytosis, Non-Langerhans cell histiocytosis, Non-X histiocytosis, and X-type histiocytosis.

[0287] In one embodiment, the saRNA described herein may be used to treat lymphocytic disorders such as lymphocytic immune system disorders (e.g., autoimmune lymphoproliferative syndrome, hypergammaglobulinemia, hypogammaglobulinemia, lymphorproliferative disorders, paraproteinemia, persistent polyclonal B-cell lymphocytosis and RASopathy) lymphocytic leukemia (e.g., acute lymphocytic leukemia and chronic lymphocytic leukemia) and lymphoma.

[0288] In one embodiment, the saRNA described herein may be used to treat monocyte and granulocyte disorders such as Agranulocytosis, Autoimmune neutropenia, Bandemia, Basopenia, Basophilia, Eosinopenia, Eosinophilia, Febrile neutropenia, Granulocytosis, hypereosinophilia, Hypereosinophilic syndrome, Hypersegmented neutrophil, Monocytopenia, Monocytosis, Morning pseudoneutropeni a, Neutropenia and Neutrophilia.

[0289] In one embodiment, the saRNA described herein may be used to treat red blood cell disorders such as anemia, African iron overload, Aldolase A deficiency, Atransferrinemia, Bahima disease, Congenital dyserythropoietic anemia, Erythroid dysplasia, Haemochromatosis type 3, Hemoglobin Lepore syndrome, Hemoglobin variants, Hemoglobinemia, Hemosiderinuria, Hereditary pyropoikilocytosis, HFE hereditary haemochromatosis, Iron deficiency, Latent iron deficiency, McLeod syndrome, Methemoglobinemia, Microcytosis, Myomatous erythrocytosis syndrome, Poikilocytosis, Polychromasia, Polycythemia, Porphyria, Reticulocytopenia, Rh deficiency syndrome, Sick cell syndrome, Spherocytosis, Sulfhemoglobinernia, and Transient erythroblastopenia of childhood.

[0290] In one embodiment, the saRNA described herein may be used to treat breast disorders such as breast neoplasia (e.g., breast cancer), breast cyst, breast disease, breast engorgement, breast hematoma, breast lump, Duct ectasia of breast, Hypertrophy of breast, Inverted nipple, Fissure of the nipple, Mammary myofibroblastoma, Mastitis, Mastodynia, Mondor's disease, Nonpuerperal mastitis, Pseudoangiomatous stromal hyperplasia, Ptosis (breasts), Subareolar abscess, Tuberous breasts, and Zuska's disease

[0291] In one embodiment, the saRNA described herein may be used to treat cardiovascular diseases such as cardiogenetic disorders, congenital disorders of the circulatory system congenital heart disease, congenital vascular defects), pericardium disease (e.g., mesothelial hyperplasia), heart disease and vascular disease.

[0292] In one embodiment, the saRNA described herein may be used to treat cardiogenetic disorders such as Alagille syndrome, Brugada syndrome, dilated cardiomyopathy, Familial atrial fibrillation, Hypertrophic cardiomyopathy, Long QT syndrome, McLeod syndrome, Sakati-Nyhan-Tisdale syndrome, Short QT syndrome, Smith Martin Dodd syndrome and Timothy syndrome.

[0293] In one embodiment, the saRNA described herein may be used to treat heart disease such as cardiac dysrhythmia, cardiomegaly, cardiomyopathy, cardiopulmonary resuscitation, chronic rheumatic heart disease, congenital heart disease, heart neoplasia, ischemic heart disease, pericardial disorder, valvular heart disease, Acute decompensated heart failure, Aneurysm of heart, Arteriosclerotic heart disease, Athletic heart syndrome, Atrioventricular fistula, Autoimmune heart disease, Brown atrophy of the heart, Cardiac amyloidosis, Cardiac asthma, Cardiac contractility modulation, Cardiac syndrome X, Cardiogenic shock, Cardiophobia, Cardiorenal syndrome, Cardiotoxicity, Carditis, Coronary artery aneurysm, Coronary artery anomaly, Coronary artery disease, Coronary artery ectasia, Coronary occlusion, Coronary thrombosis, Coronary vasospasm, Coeur en sabot, Coxsackievirus-induced cardiomyopathy, Diastolic heart failure, Dressler's syndrome, Duroziez's disease, Eisenmenger's syndrome, Embryocardia, Endocardial fibroelastosis, Heart failure, High-output cardiac failure, Hyperdynamic precordium, Idiopathic giant-cell myocarditis, Interventricular dyssynchrony, Intraventricular dyssynchrony, Isolated atrial amyloidosis, Keshan disease, Kounis syndrome, Mydicar, Myocardial bridge, Myocardial disarray, Myocardial rupture, Myocardial scarring, Myocardial stunning, Myocarditis, Nonbacterial thrombotic endocarditis, Ostial disease, Phosphorus and non-atherosclerotic heart disease, Postpericardiotomy syndrome, Right axis deviation, Roemheld syndrome, Shone's syndrome, Traumatic cardiac arrest, Ventricular aneurysm, Viral cardiomyopathy, and Waon therapy.

[0294] In one embodiment, the saRNA described herein may be used to treat vascular disease such as cerebrovascular disease, congenital vascular defect, disease of the arteries, arterioles and capillaries, disease of the aorta, disease of veins, lymphatic vessels and lymph nodes, hypertension, ischemia, vascular neoplasia, Aggressive angiomyxoma, Anemic infarct, Aneurysm, Angiodysplasia, Angiopathy, Annuloaortic ectasia, Aortitis, Aortoiliac occlusive disease, Arterial stiffness, Arteriolosclerosis, Arteriosclerosis, Atheroma, Atherosclerosis, Brain ischemic, Thromboangiitis obliterans, Capillaritis, Carotid artery stenosis, Carotid bruit, Cerebral amyloid angiopathy, Cholesterol embolism, Chronic cerebrospinal venous insufficiency, Chronic venous insufficiency, Circulating endothelial cell, CLOVES syndrome, Collapsed vein, Corona phlebectatica, Degos disease, Diabetic angiopathy, Diabetic nephropathy, Dural arteriovenous fistula, Endothelial dysfunction, Endotheliitis, Familial aortic dissection, Fatty streak, Fibro-Adipose Vascular Anomaly, Fibromuscular dysplasia, Flammer syndrome, Hemorrhagic infarct, Hereditary cystatin C amyloid angiopathy, Hollenhorst plaque, Hot aches, Hyaline arteriolosclerosis, Hyperplastic arteriolosclerosis, Hypotension, Inferior vena cava syndrome, intermittent claudication, Intradural pseudoaneurysm, Jugular vein ectasia, Kawasaki disease, Loeys-Dietz syndrome, Lupus vasculitis, Macrovascular disease, Metanephric dysplastic hematoma of the sacral region, Monckeberg's arteriosclerosis, Obliterating endarteritis, Orthostatic hypertension, Orthostatic hypotension, Orthostatic intolerance, PagetSchroetter disease, Paradoxical embolism, Peripheral vasculopathy, Phlebitis, Phlegmasia alba dolens, Phlegmasia cerulea dolens, Portacaval anastomosis, Portal vein thrombosis, Postural orfhostatic tachycardia syndrome, Pseudothrombophlebitis, Pulmonic regurgitation, Pylephlebitis, Rasmussen's aneurysm, Sack-Barabas syndrome, Stewart-Treves syndrome, Superior mesenteric artery syndrome, Susac's syndrome, Takayasu's arteritis, Thoracic aortic aneurysm, Thrombophlebitis, Varicocele, Vascular anomaly, Vascular disease, Vascular malformation, Vaso-occlusive crisis, Vegetative-vascular dystonia, Venous ulcer, Vertebral artery dissection, and Vertebrobasilar insufficiency.

[0295] In one embodiment, the saRNA described herein may be used to treat cutaneous conditions such as acneiform eruptions, Autoinflammatory syndromes, Chronic blistering cutaneous conditions, Conditions of the mucous membranes, Conditions of the skin appendages, Conditions of the subcutaneous fat, Connective tissue diseases (e.g., cutaneous lupus erythematosus and systemic connective tissue disorders), Cutaneous congenital anomalies (e.g., genodermatoses), Dermal and subcutaneous growths, Dermatitis (e.g., atopic dermatitis, contact dermatitis, eczema, pustular dermatitis, sehorrheic dermatitis), Disturbances of human pigmentation, Drug eruptions, Endocrine-related cutaneous conditions, Eosinophilic cutaneous conditions , Epidermal nevi, Epidermal neoplasms, Epidermal cysts, Erythemas, Integumentary neoplasia, Lymphoid-related cutaneous conditions, Melanocytic nevi and neoplasms (e.g., melanoma), Monocyte- and macrophage-related cutaneous conditions, Mucinoses, Neurocutaneous conditions, Noninfectious immunodeficiency-related cutaneous conditions, Papulosquamous disorders (e.g., Lichenoid eruptions and psoriasis), Papulosquamous hyperkeratotic cutaneous conditions (e.g., palmoplantar keratodermas), Pregnancy-related cutaneous conditions, Pruritic skin conditions, Reactive neutrophilic cutaneous conditions, Recalcitrant palmoplantar eruptions, Skin conditions resulting from errors in metabolism, Skin conditions resulting from physical factors (e.g., burns, immersion foot syndrome, ionizing radiation-induced cutaneous conditions), Urticaria and angioedema, Vascular-related cutaneous conditions, atrophia maculosa varioliformis cutis, and dermatopathic lymphadenopathy.

[0296] In one embodiment, the saRNA described herein may be used to treat digestive diseases such as accessory digestive gland disorders (e.g., diseases of the liver, gallbladder, binary tract and pancreas, Alagille syndrome, biliary fever, Dubin-Johnson syndrome and Gilbert's syndrome), gastrointestinal cancer, tongue disorders, mesothelial hyperplasia, colitis, diseases of the appendix, diseases of the intestine, disease of the oesophagus, stomas and duodenum, steatorrhea-related diseases, peritoneum disorders, Alvarez' syndrome, Heyde's syndrome, Reynolds syndrome, Roemheld syndrome, Abdominal epilepsy, Aerophagia, Ameboma, Anorectal abscess, Anismus, Anorectal disorder, Bezoar, Bile acid malabsorption, Blind loop syndrome, Bowel infarction, Bowel obstruction, Callous ulcer, Cameron lesions, Campylobacteriosis, Cholera, Coeliac disease, CronkhiteCanada syndrome, Cryptitis, Dientamoebiasis, Distal intestinal obstruction syndrome, Duodenal atresia, Dysphagia, Enteric neuropathy, Enterolith, Enteropathy, Eosinophilic gastroenteritis, Epiploic appendagitis, Fibrosing colonopathy, Functional constipation, Functional gastrointestinal disorder, Fundic gland polyposis, Gallstone ileus, Gastrointestinal bleeding, Gastrojejunocolic fistula, Globus pharyngis, Hematochezia, High-altitude flatus expulsion, Hirschsprung's disease, Hyperchlorhydria, Ileosigmoid knot, Inflammatory bowel disease, Intestinal metaplasia, Intestinal neuronal dysplasia, Intestinal spirochetosis, Intestinal varices, Keriorrhea, Lower gastrointestinal bleeding, Malabsorption, Megacolon, Megarectum, Melanosis coli, Microspoddiosis, Microvillous inclusion disease, Mucositis, Necrotizing enterocolitis, Pancolitis, Perianal hematoma, Peutz-Jeghers syndrome, Pharyngitis, Pneumatosis intestinalis, Pouchitis, Proctocolitis, Protein losing enteropathy, Pseudodiarrhea, Radiation enteropathy, Radiation proctitis, Rectal bleeding, Rectal hemorrhage, Sandifer syndrome, Splenic flexure syndrome, Steatorrhea, Stercoral perforation, Stercoral ulcer, Stress ulcer, Superior mesenteric artery syndrome, Tropical sprue and Whipple's disease.

[0297] In one embodiment, the saRNA described herein may be used to treat diseases of the ear and mastoid process such as Autoimmune inner ear disease, Balance disorder, Bilateral vestibulopathy, Cauliflower ear, Cryptotia, Ear disease, Earache, Enlarged vestibular aqueduct, riemotympanum, Hyperacusis, Macrotia, Mastoidectomy, Mastoiditis, Microtia, Misophonia, Mondini dysplasia, Otalgia, Otomycosis, Sopite syndrome, Superior canal dehiscence, Surfer's ear, Tinnitus, Usher syndrome, and Vestibular hyperacusis.

[0298] In one embodiment, the saRNA described herein may be used to treat endocrine disease such as adrenal gland disorders, congenital disorders of the endocrine system, disorders of the endocrine pancreas (e.g., diabetes), endocrine gonad disorders, endocrine neoplasia (e.g., thyroid cancer), endocrine-related cutaneous conditions, hypothalamus disorders, parathyroid disorders, pituitary disorders, thyroid disease (e.g., thyroid cancer and thyroid tumor), Acute infectious thyroiditis, Autoimmune thyroiditis, Colloid nodule, Congenital hypothyroidism, Cretinism, De Quervain's thyroiditis, Euthyroid, Euthyroid sick syndrome, Familial dysalbuminemic hyperthyroxinemia, Goitre, Goitrogen, Graves' disease, Graves' ophthalmopathy, Hashimoto's thyroiditis, Hashitoxicosis, Hyperthyroidism, Hyperthyroxinemia, Hypothyroidistn, Maternal hypothyroidism, Myxedema coma, Myxedematous psychosis, Ord's thyroiditis, Palpation thyroiditis, Polar T3 syndrome, Postpartum thyroiditis, Radiation-induced thyroiditis, Radioactive iodine uptake test, Riedel's thyroiditis, Subacute lymphocytic thyroiditis, Subacute thyroiditis, Thyroid disease, Thyroid dyshormonogenesis, Thyroid hormone resistance, Thyroid neoplasm, Thyroid nodule, Thyroid storm, Thyroidectomy, Thyroiditis, Thyroidologist, Thyrotoxic periodic paralysis, Thyrotoxicosis factitia, Toxic multinodular goitre, Toxic nodular goiter, Van Wyk and Grumbach syndrome, Winter-over syndrome, Congenital hyperinsulinism, Hyperglycemia, Hyperinsulinemia, Hyperinsulinemic hypoglycemia, Hyperinsulinism, Hyperproinsulinemia, Hypoglycemia, Idiopathic hypoglycemia, Impaired fasting glucose, Impaired glucose tolerance, Insulitis, Ketotic hypoglycemia, Nesidioblastosis, Oxyhyperglycemia, Reactive hypoglycemia, Spontaneous hypoglycemia, Stress hyperglycemia, ZollingerEllison syndrome, Achard-Thiers syndrome, Adenosis, Adipsia, Autoimmune polyendocrine syndrome, Autoimmune polyendocrine syndrome type 1, Autoimmune polyendocrine syndrome type 2, Autoimmune polyendocrine syndrome type 3, Autosomal dominant hypophosphatemic rickets, Cerebral salt-wasting syndrome, Chondrodysplasia Blomstrand, Diabetes insipidus, Endemic goitre, Endocrine bone disease, Galactorrhea hyperprolactinemia, Goitre, Gynecomastia, Idiopathic short stature, Incidentaloma, Metabolic syndrome, Morgagni Stewart Morel syndrome, Osteoporosis, Pickardt syndrome, Pituitary Pars Intermedia Dysfunction, POEMS syndrome, Postural orfhostatic tachycardia syndrome, and Pseudo-Cushing's syndrome.

[0299] In one embodiment, the saRNA described herein may be used to treat metabolic diseases such as, acid-base disturbances, albinism, amyloidosis, electrolyte disturbances, gout, inborn errors of metabolism (e.g., amino acid metabolism disorders, cholesterol and steroid metabolism disorders, eicosanoid metabolism disorder, fatty-acid metabolism disorders, glycoprotein metabolism disorders, glycoprotein metabolism disorders, heme metabolism disorders, lipid metabolism disorders, lysosomal storage diseases, phospholipid metabolism disorders, proteoglycan metabolism disorders, TCA and ETC metabolism disorders), leukodysrophies, lipid disorders (e.g., lipid metabolism disorders and lipid storage disorders), obesity, senescence, Abnormal basal metabolic rate, Danon disease, Exercise-associated hyponatreniia, High anion gap metabolic acidosis, MDP syndrome, Metabolic myopathy, Pansteatitis, Refeeding syndrome, Winchester syndrome, X-linked hypophosphatemia, Combined hyperlipidemia, Dyslipidemia, Hyperlipidemia, Hypocholesterolemia, 1-lypolipoproteinemia, Acid lipase disease, Batten disease, Canavan disease, Cerebrotendineous xanthomatosis, Cholesteryl ester storage disease, Fabry disease, Farber disease, Gangliosidosis, Gaucher's disease, GM1 gangliosidoses, GM2 gangliosidoses, Infantile neuronal ceroid lipofuscinosis, Jansky-Bielschowsky disease, Krabbe disease, Lysosomal Acid Lipase Deficiency, Metachromatic leukodystrophy, Multiple sulfatase deficiency, Neuronal ceroid lipofuscinosis, Niemann-Pick disease (e.g., Niemann-Pick disease, SMPDI-associated or Niemann-Pick disease, type C), Pelizaeus-Merzbacher disease, Sandhoff disease, Schindler disease, Sphingolipidoses, Sulfatidosis, Tay-Sachs disease, and Wolman disease.

[0300] In one embodiment, the saRNA described herein may be used to treat lysosomal storage diseases such as Activator Deficiency/GM2 Gangliosidosis, Alpha-mannosidosis, Aspartylglucosaminuria, Cholesteryl ester storage disease, Chronic Hexosaminidase A Deficiency, Cystinosis, Danon disease, Fabry disease, Farber disease, Fucosidosis, Galactosialidosis, Gaucher Disease (e.g., Gaucher Disease Type I, Gaucher Disease Type II, Gaucher Disease Type III), GM1 gangliosidosis (e.,g Infantile, Late infantile/Juvenile, Adult/Chronic), I-Cell disease/Mucolipidosis II, Infantile Free Sialic Acid Storage Disease/ISSD, Juvenile Hexosaminidase A Deficiency, Krabbe disease (e.g., Infantile Onset, Late Onset), Lysosomal acid lipase deficiency (e.g., Early onset, Late onset), Metachromatic Leukodystrophy, Mucopolysaccharidoses disorders (e.g., Pseudo-Hurler polydystrophy/Mucolipidosis IIIA, MPSI Hurler Syndrome, MPSI Scheie Syndrome, MPS I Hurler-Scheie Syndrome, MPS II Hunter syndrome, Sanfilippo syndrome Type A/MPS III A, Sanfilippo syndrome Type B/MPS III B, Sanfilippo syndrome Type A/MPS III C, Sanfilippo syndrome Type D/MPS III D, Morquio Type A/MPS IVA, Morquio Type B/MPS IVB, MPS IX Hyaluronidase Deficiency, MPS VI Maroteaux-Lamy, MPS VII Sly Syndrome, Mucolipidosis I/Sialidosis, Mucolipidosis Mucolipidosis type IV), Multiple sulfatase deficiency, Niemann-Pick Disease (e.g., Type A, Type B, Type C), Neuronal Ceroid Lipofuscinoses (e.g., CLN6 disease—Atypical Late Infantile, Late Onset variant, Early Juvenile, Batten-Spielmeyer-Vogt/Juvenile NCL/CLN3 disease, Finnish Variant Late Infantile CLN5, Jansky-Bielschowsky disease/Late infantile CLN2/TPP1 Disease, Kufs/Adult-onset NCL/CLN4 disease, Northern Epilepsy/variant late infantile CLN8, Santavuori-Haltia/Infantile CLN1/PPT disease, Beta-mannosidosis), Pompe disease/Glycogen storage disease type II, Pycnodysostosis, Sandhoff disease/Adult Onset/GM2. Gangliosidosis, Sandhoff disease/GM2 gangliosidosis-Infantile, Sandhoff disease/GM2 gangliosidosis-Juvenile, Schindler disease, Salla disease/Sialic Acid Storage Disease, Tay-Sachs/GM2 gangliosidosis and Wolman disease.

[0301] In one embodiment, the saRNA described herein may be used to treat nutritional diseases such as nutritional deficiencies, hyperalimentation and malnutrition.

[0302] In one embodiment, the saRNA described herein may be used to treat diseases of the eye and adnexa such as disorders of the choroid and retina, congenital disorders of the eyes, disorders of the conjunctiva, disorders of the eyelid, lacrimal system and orbit, glaucoma, disorders of the iris and ciliary body, disorders of the lens, disorders of the ocular muscles, binocular movement, accommodation and refraction, ocular neoplasia, disorders of the optic nerve and visual pathways, peri orbital conditions, disorders of the sclera and cornea, disorders of the vitreous body and globe, Actinic conjunctivitis, Acute hemorrhagic conjunctivitis, Acute posterior multifocal placoid pigment epitheliopathy, Acute zonal occult outer retinopathy, Amaurosis, Amaurosis fugax, Angioid streaks, Anisocoria, Anterior segment mesenchymal dysgenesis, Argyll Robertson pupil, Arlt's line, Arteritic anterior ischemic optic neuropathy, Asteroid hyalosis, Autoimmune optic neuropathy, Bálint's syndrome, Bardet-Biedl syndrome, Bitot's spots, Blast-related ocular trauma, Boehm syndrome, Boston's sign, Brushfield spots, Bullous keratopathy, Buphthalmos, Cerebral achromatopsia, Chemosis, Chiasmal syndrome, Closed-eye hallucination, Cogan syndrome, Coloboma, Coloboma of optic nerve, Computer vision syndrome, Cone dystrophy, Conjugate gaze palsy, Corectopia, Cornea plana 1, Cornea plana 2, Cornea verticillata, Corneal abrasion, Corneal ectatic disorders, Corneal hydrops, Corneal perforation, Dacryocystocele, Dermatochalasis, Dermoid cyst, Diffuse lamellar keratitis, Dissociated vertical deviation, Distorted vision, Drusen, Eales disease, Endophthalmitis, Enophthalmia, Epiblepharon, Periorbital dark circles, Eye disease, Eye injuries during general anaesthesia, Eye injury, Fixation disparity, Hammer syndrome, Fleischer ring, Flexner-Wintersteiner rosette, Foster-Kennedy syndrome, Fuchs heterochromic iridocyclitis, Fuchs spot, Giant-cell arteritis, Graves' ophthalmopathy, Heterochromia iridum, Horner's syndrome, Hypopyon, Hypotelorism, Idiopathic intracranial hypertension, Idiopathic orbital inflammatory disease, Infantile esotropia, Infiltrative ophthalmopathy, Interstitial keratitis, Intraocular hemorrhage, Intraocular schwannoma, Intraretinal microvascular abnormalities, Iridocorneal endothelial syndrome, Iridoplegia, Irvine-Gass syndrome, Keratoconus, Keratomalacia, Khodadoust line, Krukenberg's spindle, Late congenital syphilitic oculopathy, Lattice degeneration, Lecithin cholesterol acyltransferase deficiency, Leukocoria, Limbal nodule, Loa loa filariasis Macropsia, Macular hole, Macular hypoplasia, Macular telangiectasia, Maculopathy, Marcus Gunn pupil, Marshall syndrome, Mechanical anisocoria, Microcoria, Micropsia, Miosis, Mirhosseini-Holmes-Walton syndrome, Mitochondrial optic neuropathies, Monofixation syndrome, Moore's lightning streaks, Munson's sign, Mydriasis, Neonatal conjunctivitis, Nuclear sclerosis, Nystagmus, Ocular albinism type 1, Ocular larva migrans, Ocular melanosis, Ocular myasthenia, Ocular neurosis, Ocular rosacea, Oculomotor apraxia, Optic disc pit, Optic nerve hypoplasia, Optic neuropathy, Optic papillitis, Panophthalmitis, Parinaud's syndrome, Pelopsia, Persistent hyperplastic primary vitreous, Persistent tunica vasculosa lentis, Phantom eye syndrome, Phlyctenule, Photopsia, Physiological anisocoria, Pigment dispersion syndrome, Pneumosinus dilatans, Polycoria, Post-LASIK ectasia, Posterior ischemic optic neuropathy, Posterior vitreous detachment, Presumed ocular histoplasmosis syndrome, Progressive outer retinal necrosis, Proliferative vitreoretinopathy, Pseudoexfoliation syndrome, Pseudomyopia, Pseudophakic photic phenomena, Pseudostrabismus, Punctate epithelial erosions, Recurrent corneal erosion, Retinal degeneration (rhodopsin mutation), Retinal dysplasia, Roth's spot, Sclerocornea, Septo-optic dysplasia, Siegrist streaks, Skew deviation, Solar retinopathy, Staphyloma, Stargardt disease, Stickler syndrome, Sudden acquired retinal degeneration, Superior limbic keratoconjunctivitis, Superior oblique myokymia, Sympathetic ophthalmia, Synchysis scintillans, Teleopsia, Tenonitis, Terrien's marginal degeneration, Terson syndrome, Toxic anterior segment syndrome, Trachoma, Trochleitis, Uveoparotitis, Vernal keratoconjunctivitis, Vision loss, Visual impairment, Visual looming syndrome, Vitreoretinopathy, Vitreous touch syndrome, Vossius ring, Wagner's disease, Weill-Marchesani syndrome, White dot syndromes, cataract, persistent fetal vasculature, and X-linked congenital stationary night blindness.

[0303] In one embodiment, the saRNA described herein may be used to treat foot diseases such as immersion foot syndrome, trench foot, Achilles bursitis, Ainhum, Athlete's foot, Blue toe syndrome, Brachymetatarsia, Bunion, Burning feet syndrome, Calcaneal spur, Callus, Chilblains, Equinovalgus, Haglund's deformity, Haglund's syndrome, Hallux varus, Janeway lesion, Metatarsophalangeal joint sprain, Morton's neuroma, Morton's toe, Palmoplantar keratoderma, Plantar calcaneal bursitis, Plantar fasciitis, Plantar wart, Ship foot, Syndesmosis procedure, Tailor's bunion, Tarsal coalition, Tarsal tunnel syndrome and Toe walking.

[0304] In one embodiment, the saRNA described herein may be used to treat genitourinary system disease such as gynecologic disorders, male genital disorders, urological conditions, bulbar urethral necrosis, Frasier syndrome and reproductive system disease.

[0305] In one embodiment, the saRNA described herein may be used to treat gynecologic disorders such as congential disorders of the female genital organs, gynecologic neoplasia (e.g., gynecological cancer), infertility, inflammatory diseases of the female pelvic organ, noninflamtnatory disorders of the female genital tract (e.g., menstrual disorders) and sexually transmitted diseases and infections, Asherman's syndrome, Breakthrough bleeding, Cervical motion tenderness, Cryptomenorrhea, Dermoid cyst, Endosalpingiosis, Esthiomene, Female genital disease, Fitz-Hugh-Curtis syndrome, Gynecologic hemorrhage, Hematocolpos, Hyperestrogenism, Hypergonadism, Hypogonadism, Labial fusion, Lipschutz ulcer, Meigs' syndrome, Metrophlebitis, Mixed gonadal dysgenesis, Ovarian apoplexy, Ovarian vein syndrome, Papillary hidradenoma, Persistent genital arousal disorder, Polycystic ovary syndrome, Pelvic floor dysfunction, Premature ovarian failure, Premenstrual dysphoric disorder, Rokitansky nodule, Round ligament pain, XY gonadal dysgenesis, Tight hymenal ring, Vaginismus, Vulvar vestibulitis, Vulvodynia and XX gonadal dysgenesis.

[0306] In one embodiment, the saRNA described herein may be used to treat gynecological cancer such as Adenomyoma, Chorioblastoma, Chorioepithelioma, Dysgerminoma, Embryonal carcinoma, Endometrial intraepithelial neoplasia, Gestational choriocarcinoma, Gonadoblastoma, Hereditary leiomyomatosis and renal cell cancer syndrome, Mixed Mullerian tumor, Mucinous tumor, Ovarian fibroma, Ovarian serous cystadenoma, Peutz-Jeghers syndrome, Polyembryoma, Thecoma, Trophoblastic neoplasm, Uterine fibroid, Vaginal intraepithelial neoplasia, and Vulvar intraepithelial neoplasia.

[0307] In one embodiment, the saRNA described herein may be used to treat noninflammatory disorders of the female genital tract such as menstrual disorders, Adenomyosis, Asherman's syndrome, Atrophic vaginitis, Atypical polypoid adenomyoma, Cervical incompetence, Cervical intraepithelial neoplasia, Cervical polyp, Corpus luteum cyst, Cystocele, Dysfimctional uterine bleeding, Dyspareunia, Dyspla.sia, Endometrial hyperplasia, Endometrial polyp, Endometriosis, Endometriosis of ovary, Enterocele, Fallopian tube obstruction, Female genital prolapse, Female infertility, Follicular cyst of ovary, Gonadal torsion, Recurrent miscarriage, Hematometra, Hematosalpinx, Kraurosis vulvae, Leukorrhea, Mittelschmerz, Obstetric fistula, Ovarian apoplexy, Ovarian cyst, Ovarian disease, Ovarian hyperstimulation syndrome, Ovarian torsion, Paraovarian cyst, Pelvic congestion syndrome, Persistent genital arousal disorder, Rectocele, Rectovaginal fistula, Retroverted uterus, Salpingitis isthmica nodosa, Sigmoidocele, Stenosis of uterine cervix, Theca lutein cyst, Urethrocele, Uterine prolapse, Vaginal bleeding, Vaginismus, Van Wyk and Grumbach syndrome and Vesicovaginal fistula.

[0308] In one embodiment, the saRNA described herein may be used to treat male genital disorders such as congenital disorders of the male genital organs, epididymis disorders, male genital neoplasia (e.g., prostate cancer), penis disorders, prostate disorders, sexually transmitted diseases and infections and testicle disorders.

[0309] In one embodiment, the saRNA described herein may be used to treat male genital neoplasia such as Bowen's disease, Penile cancer, Choriocarcinoma, Embryoma, Embryonal carcinoma, Endodermal sinus tumor, Extramammary Paget's disease, Germ cell tumor, Germinoma, Gonadoblastoma, Granulosa cell tumor, Gynandroblastoma, High-grade prostatic intraepithelial neoplasia, Intratubular germ cell neoplasia, Leydig cell tumour, Mule spinners' cancer, Prostate cancer, Reinke crystals, Seminoma, Sertoli cell tumour, Sertoli-Leydig cell tumour, Sex cord-gonadal stromal tumour, Spermatocytic seminoma and Teratoma.

[0310] In one embodiment, the saRNA described herein may be used to treat urological conditions such as Bladder stone, Emphysematous cystitis, Enuresis, Eosinophilic cystitis, Fournier gangrene, Hydrocele, Kidney stone, Loin pain hematuri a syndrome, Lower urinary tract symptoms, Malakoplakia, Micturition syncope, Nephrogenic adenoma, Obstructive uropathy, Ovarian vein syndrome, Paruresis, Pelvic myoneuropathy, Peutz-Jeghers syndrome, Pneumaturia, Pseudodyssynergia, Purohit-Blaivas Staging System, Renal colic, Renal stone formation in space, Retroperitoneal fibrosis, Sedoanalgesia, Transurethral resection of the prostate syndrome, Urinary tract infection, Urinary tract obstruction, Urinoma, Urolithiasis, Uropathy, Vesicouretic reflux, and Zellweger syndrome.

[0311] In one embodiment, the saRNA described herein may be used to treat hair disease such as Alopecia areata, Alopecia totalis, Alopecia universalis, Androgenic alopecia, Black piedra, Bubble hair deformity, Hair disease, Hair follicle nevus, Hair loss, Hypertrichosis, Hypotrichosis, Kinking hair, Loose anagen syndrome, Monilethrix, Pili annulati, Pili torti, Plica neuropathica, Telogen effluvium, Tinea capitis and Trichotillomania.

[0312] In one embodiment, the saRNA described herein may be used to treat immune system disorder such as asthma, autoimmune diseases, chronic fatigue syndrome, human MHC mediate diseases, hypersensitivity, immunodeficiency lymphocytic immune system disorders, Aagenaes syndrome, Animal allergy, Arthus reaction, Asplenia, Autoimmune heart disease, Autosplenectomy, Caspase-8 deficiency state, Castleman's disease, Chronic fatigue syndrome, Cryofibrinogenemia, Cutaneous small-vessel vasculitis, Cytokine release syndrome, Cytokine storm, Dennie-Morgan fold, Ectopic thymus, Extracutaneous mastocytoma, Familial Mediterranean fever, Gleich's syndrome, Graft-versus-host disease, Gulf War syndrome, Heavy chain disease, History of chronic fatigue syndrome, HLA-B27, Hyper-IgM syndrome type 1, Hyper-IgM syndrome type 5, Ichthyosis acquisita, Idiopathic CD4± lymphocytopenia, Immune disorder, Immune dysregulation, Immune reconstitution inflammatory syndrome, Immune-mediated inflammatory diseases, Immunoproliferative disorder, Kimura's disease, Lymphocytopenia, Mastocytosis, Mortimer's disease, Oral allergy syndrome, Paraneoplastic syndrome, RAS-associated autoimmune leukoproliferative disorder, Seabather's eruption, Systemic inflammatory response syndrome, T cell deficiency, Thymus hyperplasia, Transplant rejection and XMEN disease.

[0313] In one embodiment, the saRNA described herein may be used to treat asthma such as Acute severe asthma, Aspirin-induced asthma, Asthmagen, Baker's asthma, Brittle asthma, Bronchial thermoplasty, Bronchospasm, Cough-variant asthma, Dynamic hyperinflation, Exercise-induced bronchoconstriction, Occupational asthma, and Reactive airway disease.

[0314] In one embodiment, the saRNA described herein may be used to treat mouth diseases such as chronic sclerosing sialadenitis and sialadenitis.

[0315] In one embodiment, the saRNA described herein may be used to treat musculoskeletal disorders such as chrondropathies, congenital disorders of the muscoskeletal system (e.g., arthrogryposis and phocemelia), crystal deposition diseases, joint disorders (e.g., gout), muscular disorders, myoneural junction and neuromuscular diseases (e.g., motor neuron disease and muscular dystrophy), osteopathies (e.g., osteitis and osteonecrosis), skeletal disorders (e.g., osseous and chrondromatous neoplasia), soft tissue disorders, systemic connective tissue disorders, Achard syndrome, Acropachy, Ankylosing hyperostosis, Arterial tortuosity syndrome, Attenuated patella alta, Baker's cyst, BlackBerry thumb, Bone cyst, Bone disease, Cervical spinal stenosis, Cervical spine disorder, Chondrocalcinosis, Condylar resorption, Copenhagen disease, Costochondritis, Dead arm syndrome, Dentomandibular Sensorimotor Dysfunction, Diffuse idiopathic skeletal hyperostosis, Disarticulation, Dolichostenomelia, Du Bois sign, Enthesopathy, Enthesophyte, FACES syndrome, Facet syndrome, Foot drop, Genu recurvatum, Giant-cell tumor of the tendon sheath, Grisel's syndrome, Hanhart syndrome, Heavy legs, Hill-Sachs lesion, injection fibrosis, Intersection syndrome, Intervertebral disc disorder, Joint effusion, Khan Kinetic Treatment, Knee effusion, Knee pain, Lumbar disc disease, Meromelia, Microtrauma, Myelonecrosis, Neuromechanics of idiopathic scoliosis, Osteolysis, Pellegrini-Stieda syndrome, Pigmented villonodular synovitis, Piriformis syndrome, Potassium-aggravated myotonia, Primary Spine Practitioner, Pseudarthrosis, Radial tunnel syndrome, Radicular pain, List of repetitive strain injury software, Repetitive strain injury, Saber shin, Sacroiliac joint dysfunction, Seal finger, Sever's disease, Snapping hip syndrome, Spinal decompression, Spinal enthesopathy, Spondyloarthropathy, Sternal cleft, Subungual exostosis, Synovial sarcoma, Tailor's bunion, Temporomandibular joint dysfunction, Tension myositis syndrome, Tietze syndrome, Traumatic spondylopathy, Ulnar nerve entrapment, Ulnar tunnel syndrome, Unicameral bone cyst, Winged scapula, Yoga foot drop and Zenker's paralysis.

[0316] In one embodiment, the saRNA described herein may be used to treat neurological disorders such as epilepsy, headaches, sleep disorders, stroke, central nervous system disorders, peripheral nervous system disorders, Tay-Sachs disease, dyslexia, Tourettes syndrome, Acute flaccid myelitis, Adrenoleukodystrophy, Aicardi syndrome, Alexander disease, Amblyaudia, Asperger syndrome, User:ParanoidLemmings/sandbox, Autism, Batten disease, Canavan disease, Cerebral palsy, Childhood disintegrative disorder, Epilepsy, Idiopathic childhood occipital epilepsy of Gastaut, Krabbe disease, Leigh's disease, Lysosomal storage disease, Metachromatic leukodystrophy, Myoclonic astatic epilepsy, Panayiotopoulos syndrome, Paroxysmal tonic upgaze, Pervasive developmental disorder, Pleomorphic xanthoastrocytoma, Progressive rubella panencephalitis, Rett syndrome, Sensory Dysfunction Disorder, Severe myoclonic epilepsy of infancy, Stereotypic movement disorder, Tay-Sachs disease and Transient hyperammonemia of the newborn.

[0317] In one embodiment, the saRNA described herein may be used to treat central nervous system disorders such as brain disorders, demyelinating diseases of CNS and spinal cord disorders, Anterior horn disease, Cavernous sinus thrombosis, Central nervous system depression, Central nervous system disease, Central nervous system fatigue, Choroid plexus cyst, Encephalomyelitis, Hippocampal sclerosis, Meningoencephalitis, Misophonia, G.H. Tvlonrad Krohn, Musical hallucinations, Periventricular leukomalacia, Pineal gland cyst, and Thalamocortical dysrhythmia.

[0318] In one embodiment, the saRNA described herein may be used to treat brain disorders such as agnosia, aphasias, brain tumor, hypothalamus disorders, leukodystrophies, neurological brain disorder, pituitary disorder, Acquired brain injury, Acute cerebellar ataxia of childhood, Aqueductal stenosis, Basal ganglia disease, Brain abscess, Cerebellopontine angle syndrome, Cerebral amyloid angiopathy, Cerebral hypoxia, Cerebral softening, Cerebral vasospasm, Cerebritis, Cerebrospinal fluid leak, Childhood acquired brain injury, Cortical blindness, Cortical visual impairment, Encephalopathy, Ethylmalonic encephalopathy, Frontotemporal dementia and parkinsonism linked to chromosome 17, Glial scar, Gliosis, Hashimoto's encephalopathy, Hepatic encephalopathy, Holmes rebound phenomenon, Hypertensive leukoencephalopathy, La Crosse encephalitis, Leukoencephalopathy, Leukoencephalopathy with neuroaxonal spheroids, Medial medullary syndrome, Meningioangiomatosis, Micropolygyria, Normal pressure hydrocephalus, Olivopontocerebellar atrophy, Pediatric acquired brain injury, Pleomorphic xanthoastrocytoma, Primary and secondary brain injury, Progressive multifocal leukoencephalopathy, Right hemisphere brain damage, Sarnat staging, Sports-related traumatic brain injury, Temporal lobe necrosis, and Ventriculitis.

[0319] In one embodiment, the saRNA described herein may be used to treat demyelinating diseases of CNS such as multiple sclerosis, CNS demyelinating autoimmune diseases, Adrenoleukodystrophy, Alexander disease, Alpers' disease, Balo concentric sclerosis, CAMFAK syndrome, Canavan disease, Central pontine myelinolysis, Experimental autoimmune encephalomyelitis, Hereditary CNS demyelinating disease, Krabbe disease, Leukoencephalopathy with vanishing white matter, MarchiafavaBignami disease, Megalencephalic leukoencephalopathy with subcortical cysts, Metachromatic leukodystrophy, Neuromyelitis optica, Pelizaeus-Merzbacher disease, and Diffuse myelinoclastic sclerosis.

[0320] In one embodiment, the saRNA described herein may be used to treat peripheral nervous system disorders such as cranial nerve disorders, nerve disorder, nerve root disorder, plexus disorders, PNS neoplasia, Accessory nerve disorder, Anesthesia dolorosa, Anti-MAG peripheral neuropathy, Autonomic dysreflexia, Axillary nerve dysfunction, Axillary nerve palsy, Chorcot-Marie-Tooth disease, Chemotherapy-induced peripheral neuropathy, Chronic solvent-induced encephalopathy, CMV polyradiculomyelopathy, Congenital insensitivity to pain with anhidrosis, Denervation, Diabetic neuropathy, Dysautonomia, Facial nerve paralysis, Familial dysautonomia, Hereditary sensory and autonomic neuropathy, Hereditary sensory and autonomic neuropathy type I, Horner's syndrome, Multiple system atrophy, Nerve compression syndrome, Nerve injury, Orthostatic hypotension, Orthostatic intolerance, Paroxysmal sympathetic hyperactivity, Peripheral neuropathy, Piriformis syndrome, Plexopathy, Polyneuropathy, Postural orthostatic tachycardia syndrome, Primary autonomic failure, Pronator teres syndrome, Proximal diabetic neuropathy, Pudendal nerve entrapment, Pure autonomic failure, Radial neuropathy, Radiculopathy, Sciatica, Thoracic outlet syndrome, Ulnar neuropathy, Vegetative-vascular dystonia, Villaret's syndrome, and Wartenberg's Syndrome.

[0321] In one embodiment, the saRNA described herein may be used to treat orthopedic problems such as Articular cartilage damage, Bankart lesion, Blount's disease, Calcific tendinitis, Dactylitis, Diastematomyelia, Failed back syndrome, Flat feet, Hill-Sachs lesion, Knee pain, Larsen syndrome, Myelopathy, Perthes Lesion, Pigeon toe, Shoulder problem and Spondylitis.

[0322] In one embodiment, the saRNA described herein may be used to treat respiratory diseases such as congenital disorders of the respiratory system, diseases of pleura (e.g., mesothelioma, pleura neoplasia), lower respiratory tract diseases (e.g., asthma, acute lower respiratory diseases, bronchus disorders, chronic lower respiratory disease, lung disorders), pulmonary heart disease and disease of pulmonary circulation, pulmonary lesion, pulmonary tumor, respiratory and cardiovascular disorders specific to the perinatal period, respiratory system neoplasia and upper respiratory track disease.

[0323] In one embodiment, the saRNA described herein may be used to treat lung disorders such as tuberculosis, Alcoholic lung disease, Alpha 1-antitrypsin deficiency, Alveolar capillary dysplasia, Alveolar lung disease, Antisynthetase syndrome, Asbestosis, Aspergilloma, Atypical pulmonary carcinoid tumor, Baritosis, Brown induration, Cavitation (biology), Chalicosis, ChurgStrauss syndrome, Combined pulmonary fibrosis and emphysema, Cystic fibrosis, Flash pulmonary edema, Flock worker's lung, Ghon's complex, Granulomatosis with polyangiitis, Hepatization of lungs, High-altitude pulmonary edema, Honeycombing, Idiopathic pulmonary haemosiderosis, Indium lung, Interstitial lung disease, Lung abscess, Lung disease, Lycoperdonosis, Lymphangioleiomyomatosis, Obstructive lung disease, Occupational lung disease, Pneumonia alba, Progressive massive fibrosis, Pulmonary alveolar proteinosis, Pulmonary aspiration, Pulmonary capillary hemangiomatosis, Pulmonary contusion, Pulmonary cyst, Pulmonary fibrosis, Pulmonary hematoma, Pulmonary hemorrhage, Pulmonary hyperplasia, Pulmonary laceration, Pulmonary toxicity, Pulmonary-renal syndrome, Respiratory bronchiolitis interstitial lung disease, Restrictive lung disease, Rheumatoid lung disease, Sarcoidosis, Surfactant metabolism dysfunction, Swimming-induced pulmonary edema, Swyer-James syndrome, Transfusion-related acute lung injury, Tumor-like disorders of the lung pleura, Ventilation perfusion mismatch, and Ventilator-associated lung injury.

[0324] In one embodiment, the saRNA described herein may be used to treat sexual disorders such as erectile dysfunction, persistent genital arousal disorder, sexual masochism disorder, sexual sadism disorder and spermatorrhea.

[0325] In one embodiment, the saRNA described herein may be used to treat voice disorders such as Bogart-Bacall syndrome, chroditis, laryngitis, muteness, Reinke's edema, spasmodic dysphonia, vocal cord paresis, vocal fold cyst and vocal fold nodule.

[0326] In one embodiment, the saRNA described herein may be used to treat immune system disorders such as asthma, autoimmune diseases, chronic fatigue syndrome, human MHC mediate disease, hypersensitivity, immunodeficiency and lymphocytic immune system disorders.

[0327] In one embodiment, the saRNA described herein may be used to treat autoimmune diseases such as Acute disseminated encephalomyelitis, Alopecia areata, Alopecia universalis, Ankylosing spondylitis, Antiphospholipid syndrome, Antisynthetase syndrome, Aplastic anemia, Apolipoprotein H, Arthritis mutilans, Atrophic gastritis, Autoimmune enteropathy, Autoimmune gastrointestinal dysmotility, Autoimmune hemolytic anemia, Autoimmune hypophysitis, Autoimmune inner ear disease, Autoimmune Oophoritis, Autoimmune pancreatitis, Autoimmune polyendocrine syndrome, Autoimmune polyendocrine syndrome type 1, Autoimmune polyendocrine syndrome type 2, Autoimmune polyendocrine syndrome type 3, Autoimmune/inflammatory syndrome induced by adjuvants, Balo concentric sclerosis, Behcet's disease, BENTA disease, Bickerstaff's encephalitis, Bullous pemphigoid, Chronic inflammatory demyelinating polyneuropathy, Churg-Strauss syndrome, Cicatricial pemphigoid, CNS demyelinating autoimmune diseases, Coeliac disease, Cogan syndrome, Cold agglutinin disease, CREST syndrome, Crohn's disease, Cutaneous manifestations of sarcoidosis, Dermatitis, Dermatomyositis, Diabetes Health, Diabetes mellitus type I, Drug-induced lupus erythematosus, Eosinophilic fasciitis, Erythema nodosum, Gestational pemphigoid, Goodpasture syndrome, Granulomatosis with polyangiitis, Graves' disease, Graves' ophthalmopathy, Guillain-Barré syndrome, Hashimoto's encephalopathy, Hashimoto's thyroiditis, Heerfordt's syndrome, Henoch-Schönlein purpura, Hughes-Stovin syndrome, Idiopathic granulomatous hepatitis, idiopathic inflammatory demyelinating diseases of the central nervous system, IgA nephropathy, Inflammatory bowel disease, IPEX syndrome, Lambert-Eaton myasthenic syndrome, Latent autoimmune diabetes of adults, Pathophysiology of multiple sclerosis, Lichen planus, Linear IgA bullous dermatosis, Lofgren syndrome, Lupus erythematosus, Lupus pernio, Marburg's variant multiple sclerosis, Marie Antoinette syndrome, McDonald criteria, Mixed connective tissue disease, Morphea, Multiple sclerosis, Myasthenia gravis, Neuro-Behcet's disease, Neurological fatigue, Neuromyelitis optica, Neurosarcoidosis, Ocular myasthenia, Opsoclonus myoclonus syndrome, Optic neuritis Ord's thyroiditis, Overlap syndrome, Palindromic rheumatism, Paraneoplastic pemphigus, Pemphigoid, Pemphigus, Poser criteria, Primary biliary cirrhosis, Primary sclerosing cholangitis, Proctitis, Progressive inflammatory neuropathy, Psoriatic arthritis, RAS-associated autoimmune leukoproliferative disorder, Raynaud's phenomenon, Reactive arthritis, Relapsing polychondritis, Reynolds syndrome, Rheumatoid arthritis, Riedel's thyroiditis, Samoyed hereditary glomerulopathy, Sarcoidosis, Satoyoshi syndrome, Diffuse myelinoclastic sclerosis, Scleroderma, Scleromyositis, Sebaceous adenitis, Sjögren's syndrome, Susac's syndrome, Sympathetic ophthalmia, Graves' disease, Systemic lupus erythematosus, Systemic scleroderma, Thrombotic thrombocytopenic purpura, Transverse myelitis, Uhthoffs phenomenon, Ulcerative colitis, Undifferentiated connective tissue disease, Vitiligo and Warm autoimmune hemolytic anemia.

[0328] In one embodiment, the saRNA described herein may be used to treat lymphoma such as Adult T-cell leukemia/lymphoma, Aggressive lymphoma, AIDS-related lymphoma, ALK+ large B-cell lymphoma, Anaplastic large-cell lymphoma, Angioimmunoblastic lymphoma, B-cell CLL/lymphoma, B-cell lymphoma, Blastic NK cell lymphoma, Burkitt's lymphoma, CD30+ cutaneous T-cell lymphoma, Cutaneous B-cell lymphoma, Cutaneous lymphoma, Cutaneous T cell lymphoma, Diffuse large B-cell lymphoma, Enteropathy-associated T-cell lymphoma, Extranodal NK/T-cell lymphoma, Follicular large-cell lymphoma, Follicular lymphoma, Gastric lymphoma, Germinal center B-cell like diffuse large B-cell lymphoma, Gray zone lymphoma, Hepatosplenic T-cell lymphoma, Intraocular lymphoma, Intravascular large B-cell lymphoma, Large B-cell lymphoma arising in HHV8-associated multicentric Castleman's disease, Large-cell lymphoma, Lennert lymphoma, Lymphoblastic lymphoma, Lymphoma cutis, MALT lymphoma, Mantle cell lymphoma, Marginal zone B-cell lymphoma, Mixed-cell lymphoma, Nodal marginal zone B cell lymphoma, Non-Hodgkin lymphoma, Non-mycosis fungoides CD30− cutaneous large T-cell lymphoma, Orbital lymphoma, Peripheral T-cell lymphoma, Plasmablastic lymphoma, Post-transplant lymphoproliferative disorder, Precursor T-lymphoblastic lymphoma, Primary central nervous system lymphoma, Primary cutaneous follicle center lymphoma, Primary cutaneous immunocytoma, Primary cutaneous marginal zone lymphoma, Primary effusion lymphoma, Primary mediastinal (thymic) large B cell lymphoma, Primary mediastinal B-cell lymphoma, Endoexoenteric, Secondary cutaneous CD30+ large-cell lymphoma, Sézary disease, Splenic lymphoma with villous lymphocytes, Splenic marginal zone lymphoma, Splenic tumor, T-cell lymphoma, T-lymphoblastic leukemia/lymphoma, Thyroid lymphoma and Waldenstrom's macroglobulinemia.

[0329] In one embodiment, the saRNA described herein may be used to treat cancers such as Acute Lymphoblastic Leukemia (ALL), Acute Myeloid Leukemia (AML), Adrenocortical Carcinoma, AIDS-Related Cancers (e.g., Kaposi Sarcoma and AIDS-Related Lymphoma), Anal Cancer, Appendix Cancer, Astrocytomas, Childhood, Atypical Teratoid/Rhabdoid Tumor, Childhood, Central Nervous System, Basal Cell Carcinoma, Extrahepatic Bile Duct Cancer, Bladder Cancer, Bone Cancer (e.g., Ewing Sarcoma Family of Tumors, Osteosarcoma and Malignant Fibrous Histiocytoma), Brain Stem Glioma, Childhood, Brain Tumor (e.g., Astrocytoma, Brain Stem Glioma, Central Nervous System Atypical Teratoid/Rhabdoid Tumor, Central Nervous System Embryonal Tumors, Central Nervous System Germ Cell Tumors, Craniopharyngioma, Ependymoma), Breast Cancer, Bronchial Tumors, Burkitt Lymphoma, Carcinoid Tumor (e.g., childhood, Gastrointestinal), Carcinoma of Unknown Primary, Cardiac (Heart) Tumors, Childhood, Central Nervous System (e.g., Atypical Teratoid/Rhabdoid Tumor, Embryonal Tumors, Germ Cell Tumor and Lymphoma), Cervical Cancer, Chordoma, Childhood, Chronic Lymphocytic Leukemia (CLL), Chronic Myelogenous Leukemia (CML), Chronic Myeloproliferative Neoplasms, Colon Cancer, Colorectal Cancer, Craniopharyngioma, Cutaneous T-Cell Lymphoma, Duct, Bile, Extrahepatic, Ductal Carcinoma in Situ (DCIS), Embryonal Tumors, Central Nervous System, Endometrial Cancer, Ependymoma, Esophageal Cancer, Esthesioneuroblastoma, Childhood, Ewing Sarcoma, Extracranial Germ Cell Tumor, Childhood, Extragonadal Germ Cell Tumor, Extrahepatic Bile Duct Cancer, Eye Cancer (e.g., Intraocular Melanoma and Retinoblastoma), Fallopian Tube Cancer, Fibrous Histiocytoma of Bone, Malignant, and Osteosarcoma, Gallbladder Cancer, Gastric (Stomach) Cancer, Gastrointestinal Carcinoid Tumor, Gastrointestinal Stromal Tumors (GIST), Germ Cell Tumor (e.g., Central Nervous System, Childhood, Extracranial, Childhood, Extragonadal, Ovarian, Testicular), Gestational Trophoblastic Disease, Glioma, Hairy Cell Leukemia, Head and Neck Cancer, Heart Cancer, Hepatocellular (Liver) Cancer, Histiocytosis, Langerhans Cell, Hodgkin Lymphoma, Hypopharyngeal Cancer, Intraocular Melanoma, Pancreatic Neuroendocrine Tumors, Islet Cell Tumors, Kaposi Sarcoma, Kidney (e.g., Renal Cell and Wilms Tumor and Other Childhood Kidney Tumors), Langerhans Cell Histiocytosis, Laryngeal Cancer, Leukemia (Acute Lymphoblastic (ALL), Acute Myeloid (AMD, Chronic Lymphocytic (CLL), Chronic Myelogenous (CML) and Hairy Cell), Lip and Oral Cavity Cancer, Liver Cancer Lung Cancer (e.g., Childhood, Non-Small Cell, Small Cell), Lymphoma (e.g., AIDS-Related, Burkitt, Cutaneous T-Cell, Hodgkin, Non-Hodgkin and Primary Central Nervous System (CNS)), Macroglobulinemia, Waldenström, Male Breast Cancer, Malignant Fibrous Histiocytoma of Bone and. Osteosarcoma, Melanoma, Melanoma Intraocular (Eye), Merkel Cell Carcinoma, Malignant Mesothelioma, Metastatic Squamous Neck Cancer with Occult Primary, Midline Tract Carcinoma Involving NUT Gene, Mouth Cancer, Multiple Endocrine Neoplasia Syndromes, Childhood, Multiple Myeloma/Plasma Cell Neoplasm, Mycosis Fungoides, Myelodysplastic Syndromes, Myelodysplastic/Myeloproliferative Neoplasms, Myelogenous Leukemia, Chronic (CML), Myeloid Leukemia, Acute (AML), Multiple Myeloma, Chronic Myeloproliferative Neoplasms, Nasal Cavity and Paranasal Sinus Cancer, Nasopharyngeal Cancer, Neuroblastoma, Non-Hodgkin Lymphoma, Non-Small Cell Lung Cancer, Oral Cancer, Lip and Oral Cavity Cancer, Oropharyngeal Cancer, Osteosarcoma and Malignant Fibrous Histiocytoma of Bone, Ovarian Cancer Childhood, Epithelial, Germ Cell Tumor, Low Malignant Potential Tumor), Pancreatic Cancer, Pancreatic Neuroendocrine Tumors (Islet Cell Tumors), Papillomatosis, Childhood, Paraganglioma, Paranasal Sinus and Nasal Cavity Cancer, Parathyroid Cancer, Penile Cancer, Pharyngeal Cancer, Pheochromocytoma, Pituitary Tumor, Plasma Cell Neoplasm/Multiple Myeloma, Childhood Pleuropulmonary Blastoma, Primary Central Nervous System (CNS) Lymphoma, Primary Peritoneal Cancer, Prostate Cancer, Rectal Cancer, Renal Cell (Kidney) Cancer, Retinoblastoma, Childhood Rhabdomyosarcoma, Salivary Gland Cancer, Childhood, Sarcoma (e.g., Ewing, Kaposi, Osteosarcoma (Bone Cancer), Rhabdomyosarcoma, Soft Tissue and Uterine), Sézary Syndrome, Skin Cancer (e.g., childhood, Melanoma, Merkel Cell Carcinoma and Nonmelanoma), Small Cell Lung Cancer, Small Intestine Cancer, Soft Tissue Sarcoma, Squamous Cell Carcinoma Metastatic Squamous Neck Cancer with Occult Primary, Stomach (Gastric) Cancer, Cutaneous T-Cell Lymphoma, Testicular Cancer, Throat Cancer, Thymoma and Thymic Carcinoma, Thyroid Cancer, Transitional Cell Cancer of the Renal Pelvis and Ureter, Transitional Cell Cancer of the Ureter and Renal Pelvis, Urethral Cancer, Endometrial Uterine Cancer, Uterine Sarcoma, Vaginal Cancer, Vulvar Cancer, Waldenstrom Macroglobulinemia, and Wilms Tumor.

[0330] Additional disease and disorders which may be treated using the saRNA of the present invention including, but are not limited to, Pel-Ebstein fever, plasma cell dyscrasia, plasmacytoma, smouldering myeloma, Waldenstrom's macroglobulinemia, Chromosome 5q deletion syndrome, Myelofibrosis, Refractory anemia, Refractory cytopenia, Sideroblastic anemia, Bing-Neel syndrome, Actinic granuloma, Annular elastolytic giant-cell granuloma, Benign cephalic histiocytosis, Birbeck granules, Congenital self-healing reticulohistiocytosis, Darier-Roussy disease, Darier-Roussy saroid, Eruptive histiocytoma, Generalized eruptive histiocytoma, Generalized franuloma annulare, Giant cell elastophagocytosis, Giant-cell retichlohistiocytoma, Granuloma nulare, Granuloma multiforme, Hand-Schuller-Christian disease, Hashimoto-Pritzker disease, Heerfordt's syndrome, Hereditary progressive mucinous histiocytosis, Indeterminate cell histiocytosis, Letterer-Siew disease, Localized granuloma annulare, Lofgren syndrome, Macular granuloma annulare, Meischer's granuloma, Montgomery syndrome, Multicentric reticulohistiocytosis, Necrobiotic xanthogranuloma, O'Brien granuloma, Papular xanthoma, Patch-type granuloma annulare, Perforating granuloma annulare, Progressive nodular histiocytosis, Pseudorheumatoid nodule, Reticulohistiocytoma, Reticulohistiocytosis, Sea-blue histiocytosis, Solitary reticulohistiocytoma, Solitary reticulohistiocytosis, Subcutaneous granuloma annulare, Systemic sarcoidosis, Cellular fibroadenoma, Cyst of Montgomery, Fibroadenoma, Fibrocystic breast changes, Fibrosclerosis of breast, Galactocele, and Galactorrhea, Granulomatous mastitis.

### IV. Kits and Devices

### Kits

[0331] The invention provides a variety of kits for conveniently and/or effectively carrying out methods of the present invention. Typically kits will comprise sufficient amounts and/or numbers of components to allow a user to perform multiple treatments of a subject(s) and/or to perform multiple experiments.

[0332] In one embodiment, the present invention provides kits for regulate the expression of genes in vitro or in vivo, comprising saRNA of the present invention or a combination of saRNA of the present invention, saRNA modulating other genes, siRNAs, miRNAs or other oligonucleotide molecules.

[0333] The kit may further comprise packaging and instructions and/or a delivery agent to form a formulation composition. The delivery agent may comprise a saline, a buffered solution, a lipidoid, a dendrimer or any delivery agent disclosed herein.

[0334] Non-limiting examples of genes are described herein in Lengthy Table 1.

[0335] In one embodiment, the kits comprising snRNA described herein may be used with proliferating cells to show efficacy.

[0336] In one non-limiting example, the buffer solution may include sodium chloride, calcium chloride, phosphate and/or EDTA. In another non-limiting example, the buffer solution may include, but is not limited to, saline, saline with 2 mM calcium, 5% sucrose, 5% sucrose with 2 mM calcium. 5% Mannitol, 5% Mannitol with 2 mM calcium, Ringer's lactate, sodium chloride, sodium chloride with 2 mM calcium and mannose (See U.S. Pub. No. 20120258046; herein incorporated by reference in its entirety). In yet another non-limiting example, the buffer solutions may be precipitated or it may be lyophilized. The amount of each component may be varied to enable consistent, reproducible higher concentration saline or simple buffer formulations, The components may also be varied in order to increase the stability of saRNA in the buffer solution over a period of time and/or under a variety of conditions.

### Devices

[0337] The present invention provides for devices which may incorporate saRNA of the present invention. These devices contain in a stable formulation available to be immediately delivered to a subject in need thereof, such as a human patient.

[0338] Non-limiting examples of the devices include a pump, a catheter, a needle, a transdermal patch, a pressurized olfactory delivery device, iontophoresis devices, multi-layered microfluidic devices. The devices may be employed to deliver saRNA of the present invention according to single, multi- or split-dosing regiments. The devices may be employed to deliver saRNA of the present invention across biological tissue, intradermal, subcutaneously, or intramuscularly. More examples of devices suitable for delivering oligonucleotides are disclosed in International Publication WO 2013/090648 filed Dec. 14, 2012, the contents of which are incorporated herein by reference in their entirety.

### Definitions

[0339] For convenience, the meaning of certain terms and phrases used in the specification, examples, and appended claims, are provided below. If there is an apparent discrepancy between the usage of a term in other parts of this specification and its definition provided in this section, the definition in this section shall prevail.

[0340] About: As used herein, the term “about” means +/−10% of the recited value.

[0341] Administered in combination: As used herein, the term “administered in combination” or “combined administration” means that two or more agents are administered to a subject at the same time or within an interval such that there may be an overlap of an effect of each agent on the patient. In some embodiments, they are administered within about 60, 30, 15, 10, 5, or 1 minute of one another. In some embodiments, the administrations of the agents are spaced sufficiently close together such that a combinatorial (e.g., a synergistic) effect is achieved.

[0342] Amino acid: As used herein, the terms “amino acid” and “amino acids” refer to all naturally occurring L-alpha-amino acids. The amino acids are identified by either the one-letter or three-letter designations as follows: aspartic acid (Asp:D), isoleucine (Ile:I), threonine (Thr:T), leucine (Leu:L), serine (Ser:S), tyrosine (Tyr:Y), glutamic acid (Glu:E), phenylalanine (Phe:F), proline (Pro:P), histidine glycine lysine (Lys:K), alanine (Ala:A), arginine (Arg:R), cysteine (Cys:C), tryptophan (Trp:W), valine (Val:V), glutamine (Gln:Q) methionine (Met:M), asparagines (Asn:N), where the amino acid is listed first followed parenthetically by the three and one letter codes, respectively.

[0343] Animal: As used herein, the term “animal” refers to any member of the animal kingdom. In some embodiments, “animal” refers to humans at any stage of development. In some embodiments, “animal” refers to non-human animals at any stage of development. In certain embodiments, the non-human animal is a mammal (e.g., a rodent, a mouse, a rat, a rabbit, a monkey, a dog, a cat, a sheep, cattle, a primate, or a pig). In some embodiments, animals include, but are not limited to, mammals, birds, reptiles, amphibians, fish, and worms. In some embodiments, the animal is a transgenic animal, genetically-engineered animal, or a clone.

[0344] Approximately: As used herein, the term “approximately” or “about,” as applied to one or more values of interest, refers to a value that is similar to a stated reference value. In certain embodiments, the term “approximately” or “about” refers to a range of values that fall within 25%, 20%, 19%, 18%, 17%, 16%, 15%, 14%, 13%, 12%, 11%, 10%, 9%, 8%, 7%, 6%, 5%, 4%, 3%, 2%, 1%, or less in either direction (greater than or less than) of the stated reference value unless otherwise stated or otherwise evident from the context (except where such number would exceed 100% of a possible value).

[0345] Associated with: As used herein, the terms “associated with,” “conjugated,” “linked,” “attached,” and “tethered,” when used with respect to two or more moieties, means that the moieties are physically associated or connected with one another, either directly or via one or more additional moieties that serves as a linking agent, to form a structure that is sufficiently stable so that the moieties remain physically associated under the conditions in which the structure is used, e.g., physiological conditions. An “association” need not be strictly through direct covalent chemical bonding. It may also suggest ionic or hydrogen bonding or a hybridization based connectivity sufficiently stable such that the “associated” entities remain physically associated.

[0346] Bifunction or Bifunctional: As used herein, the terms “bifunction” and “bifunctional” refers to any substance, molecule or moiety which is capable of or maintains at least two functions. The functions may affect the same outcome or a different outcome. The structure that produces the function may be the same or different. For example, bifunctional saRNA of the present invention may comprise a cytotoxic peptide (a first function) while those nucleosides which comprise the saRNA are, in and of themselves, cytotoxic (second function).

[0347] Biocompatible: As used herein, the term “biocompatible” means compatible with living cells, tissues, organs or systems posing little to no risk of injury, toxicity or rejection by the immune system.

[0348] Biodegradable: As used herein, the term “biodegradable” means capable of being broken down into innocuous products by the action of living things.

[0349] Biologically active: As used herein, the phrase “biologically active” refers to a characteristic of any substance that has activity in a biological system and/or organism. For instance, a substance that, when administered to an organism, has a biological effect on that organism, is considered to be biologically active. In particular embodiments, the saRNA of the present invention may be considered biologically active if even a portion of the saRNA is biologically active or mimics an activity considered biologically relevant.

[0350] Cancer: As used herein, the term “cancer” in an individual refers to the presence of cells possessing characteristics typical of cancer-causing cells, such as uncontrolled proliferation, immortality, metastatic potential, rapid growth and proliferation rate, and certain characteristic morphological features. Often, cancer cells will be in the form of a tumor, but such cells may exist alone within an individual, or may circulate in the blood stream as independent cells, such as leukemic cells.

[0351] Cell growth: As used herein, the term “cell growth” is principally associated with growth in cell numbers, which occurs by means of cell reproduction (i.e. proliferation) when the rate of the latter is greater than the rate of cell death (e.g. by apoptosis or necrosis), to produce an increase in the size of a population of cells, although a small component of that growth may in certain circumstances be due also to an increase in cell size or cytoplasmic volume of individual cells. An agent that inhibits cell growth can thus do so by either inhibiting proliferation or stimulating cell death, or both, such that the equilibrium between these two opposing processes is altered.

[0352] Cell type: As used herein, the term “cell type” refers to a cell from a given source (e.g., a tissue, organ) or a cell in a given state of differentiation, or a cell associated with a given pathology or genetic makeup.

[0353] Chromosome: As used herein, the term “chromosome” refers to an organized structure of DNA and protein found in cells.

[0354] Complementary: As used herein, the term “complementary” as it relates to nucleic acids refers to hybridization or base pairing between nucleotides or nucleic acids, such as, for example, between the two strands of a double-stranded DNA molecule or between an oligonucleotide probe and a target are complementary.

[0355] Condition: As used herein, the term “condition” refers to the status of any cell, organ, organ system or organism. Conditions may reflect a disease state or simply the physiologic presentation or situation of an entity. Conditions may be characterized as phenotypic conditions such as the macroscopic presentation of a disease or genotypic conditions such as the underlying gene or protein expression profiles associated with the condition. Conditions may be benign or malignant.

[0356] Controlled Release: As used herein, the term “controlled release” refers to a pharmaceutical composition or compound release profile that conforms to a particular pattern of release to effect a therapeutic outcome.

[0357] Cytostatic: As used herein, “cytostatic” refers to inhibiting, reducing, suppressing the growth, division, or multiplication of a cell (e.g., a mammalian cell (e.g., a human cell)), bacterium, virus, fungus, protozoan, parasite, prion, or a combination thereof.

[0358] Cytotoxic: As used herein, “cytotoxic” refers to killing or causing injurious, toxic, or deadly effect on a cell (e.g., a mammalian cell (e.g., a human cell)), bacterium, virus, fungus, protozoan, parasite, prion, or a combination thereof.

[0359] Delivery: As used herein, “delivery” refers to the act or manner of delivering a compound, substance, entity, moiety, cargo or payload.

[0360] Delivery Agent: As used herein, “delivery agent” refers to any substance which facilitates, at least in part, the in vivo delivery of an saRNA of the present invention to targeted cells.

[0361] Destabilized: As used herein, the term “destable,” “destabilize,” or “destabilizing region” means a region or molecule that is less stable than a starting, wild-type or native form of the same region or molecule.

[0362] Detectable label: As used herein, “detectable label” refers to one or more markers, signals, or moieties which are attached, incorporated or associated with another entity that is readily detected by methods known in the art including radiography, fluorescence, chemiluminescence, enzymatic activity, absorbance and the like. Detectable labels include radioisotopes, fluorophores, chromophores, enzymes, dyes, metal ions, ligands such as biotin, avidin, streptavidin and haptens, quantum dots, and the like. Detectable labels may be located at any position in the oligonucleotides disclosed herein. They may be within the nucleotides or located at the 5′ or 3′ terminus.

[0363] Encapsulate: As used herein, the term “encapsulate” means to enclose, surround or encase.

[0364] Engineered: As used herein, embodiments of the invention are “engineered” when they are designed to have a feature or property, whether structural or chemical, that varies from a starting point, wild type or native molecule.

[0365] Equivalent subject: As used herein, “equivalent subject” may be e.g. a subject of similar age, sex and health such as liver health or cancer stage, or the same subject prior to treatment according to the invention. The equivalent subject is “untreated” in that be does not receive treatment with an saRNA according to the invention. However, be may receive a conventional anti-cancer treatment, provided that the subject who is treated with the saRNA of the invention receives the same or equivalent conventional anti-cancer treatment.

[0366] Exosome: As used herein, “exosome” is a vesicle secreted by mammalian cells.

[0367] Expression: As used herein, “expression” of a nucleic acid sequence refers to one or more of the following events: (1) production of an RNA template from a DNA sequence (e.g., by transcription); (2) processing of an RNA transcript (e.g., by splicing, editing, 5′ cap formation, and/or 3′ end processing); (3) translation of an RNA into a polypeptide or protein; and (4) post-translational modification of a polypeptide or protein.

[0368] Feature: As used herein, a “feature” refers to a characteristic, a property, or a distinctive element.

[0369] Formulation: As used herein, a “formulation” includes at least one saRNA of the present invention and a delivery agent.

[0370] Fragment: A “fragment,” as used herein, refers to a portion. For example, fragments of proteins may comprise polypeptides obtained by digesting full-length protein isolated from cultured cells. Fragments of oligonucleotides may comprise nucleotides, or regions of nucleotides.

[0371] Functional: As used herein, a “functional” biological molecule is a biological molecule in a form in which it exhibits a property and/or activity by which it is characterized.

[0372] Gene: As used herein, the term “gene” refers to a nucleic acid sequence that comprises control and most often coding sequences necessary for producing a polypeptide or precursor. Genes, however, may not be translated and instead code for regulatory or structural RNA molecules.

[0373] A gene may be derived in whole or in part from any source known to the art, including a plant, a fungus, an animal, a bacterial genome or episome, eukaryotic, nuclear or plasmid DNA, cDNA, viral DNA, or chemically synthesized DNA. A gene may contain one or more modifications in either the coding or the untranslated regions that could affect the biological activity or the chemical structure of the expression product, the rate of expression, or the manner of expression control. Such modifications include, but are not limited to, mutations, insertions, deletions, and substitutions of one or more nucleotides. The gene may constitute an uninterrupted coding sequence or it may include one or more introns, bound by the appropriate splice junctions.

[0374] Gene expression: As used herein, the term “gene expression” refers to the process by which a nucleic acid sequence undergoes successful transcription and in most instances translation to produce a protein or peptide. For clarity, when reference is made to measurement of “gene expression”, this should be understood to mean that measurements may be of the nucleic acid product of transcription, RNA or mRNA or of the amino acid product of translation, e.g., polypeptides or peptides. Methods of measuring the amount or levels of RNA, mRNA, polypeptides and peptides are well known in the art.

[0375] Genome: The term “genotne” is intended to include the entire DNA complement of an organism, including the nuclear DNA component, chromosomal or extrachromosomal DNA, as well as the cytoplasmic domain (e.g., mitochondrial DNA).

[0376] Homology: As used herein, the term “homology” refers to the overall relatedness between polymeric molecules, e.g. between nucleic acid molecules (e.g. DNA molecules and/or RNA molecules) and/or between polypeptide molecules. In some embodiments, polymeric molecules are considered to be “homologous” to one another if their sequences are at least 25%, 30%, 35%, 40%, 45%, 50%, 55%, 60%, 65%, 70%, 75%, 80%, 85%, 90%, 95%, or 99% identical or similar. The term “homologous” necessarily refers to a comparison between at least two sequences (polynucleotide or polypeptide sequences). In accordance with the invention, two polynucleotide sequences are considered to be homologous if the polypeptides they encode are at least about 50%, 60%, 70%, 80%, 90%, 95%, or even 99% for at least one stretch of at least about 20 amino acids. In some embodiments, homologous polynucleotide sequences are characterized by the ability to encode a stretch of at least 4-5 uniquely specified amino acids, For polynucleotide sequences less than 60 nucleotides in length, homology is determined by the ability to encode a stretch of at least 4-5 uniquely specified amino acids. In accordance with the invention, two protein sequences are considered to be homologous if the proteins are at least about 50%, 60%, 70%, 80%, or 90% identical for at least one stretch of at least about 20 amino acids.

[0377] The term “hyperproliferative cell” may refer to any cell that is proliferating at a rate that is abnormally high in comparison to the proliferating rate of an equivalent healthy cell (which may be referred to as a “control”). An “equivalent healthy” cell is the normal, healthy counterpart of a cell. Thus, it is a cell of the same type, e.g. from the same organ, which performs the same functions(s) as the comparator cell. For example, proliferation of a hyperproliferative hepatocyte should be assessed by reference to a healthy hepatocyte, whereas proliferation of a hyperproliferative prostate cell should be assessed by reference to a healthy prostate cell.

[0378] By an “abnormally high” rate of proliferation, it is meant that the rate of proliferation of the hyperproliferative cells is increased by at least 20, 30, 40%, or at least 45, 50, 55, 60, 65, 70, 75%, or at least 80%, as compared to the proliferative rate of equivalent, healthy (non-hyperproliferative) cells. The “abnormally high” rate of proliferation may also refer to a rate that is increased by a factor of at least 2, 3, 4, 5, 6, 7, 8, 9, 10, or by a factor of at least 15, 20, 25, 30, 35, 40, 45, 50, or by a factor of at least 60, 70, 80, 90, 100, compared to the proliferative rate of equivalent, healthy cells.

[0379] Hyperprolyerative disorder: As used herein, a “hyperproliferative disorder” may be any disorder which involves hyperproliferative cells as defined above. Examples of hyperproliferative disorders include neoplastic disorders such as cancer, psoriatic arthritis, rheumatoid arthritis, gastric hyperproliferative disorders such as inflammatory bowel disease, skin disorders including psoriasis, Reiter's syndrome, pityriasis rubra pilaris, and hyperproliferative variants of the disorders of keratinization.

[0380] The skilled person is fully aware of how to identify a hyperproliferative cell. The presence of hyperproliferative cells within an animal may be identifiable using scans such as X-rays, MRI or CT scans. The hyperproliferative cell may also be identified, or the proliferation of cells may be assayed, through the culturing of a sample in vitro using cell proliferation assays, such as MTT, XTT, MTS or WST-1 assays. Cell proliferation in vitro can also be determined using flow cytometry.

[0381] Identity: As used herein, the term “identity” refers to the overall relatedness between polymeric molecules, e.g., between oligonucleotide molecules (e.g. DNA molecules and/or RNA molecules) and/or between polypeptide molecules. Calculation of the percent identity of two polynucleotide sequences, for example, can be performed by aligning the two sequences for optimal comparison purposes (e.g., gaps can be introduced in one or both of a first and a second nucleic acid sequences for optimal alignment and non-identical sequences can be disregarded for comparison purposes). In certain embodiments, the length of a sequence aligned for comparison purposes is at least 30%, at least 40%, at least 50%, at least 60%, at least 70%, at least 80%, at least 90%, at least 95%, or 100% of the length of the reference sequence. The nucleotides at corresponding nucleotide positions are then compared. When a position in the first sequence is occupied by the same nucleotide as the corresponding position in the second sequence, then the molecules are identical at that position. The percent identity between the two sequences is a function of the number of identical positions shared by the sequences, taking into account the number of gaps, and the length of each gap, which needs to be introduced for optimal alignment of the two sequences. The comparison of sequences and determination of percent identity between two sequences can be accomplished using a mathematical algorithm. For example, the percent identity between two nucleotide sequences can be determined using methods such as those described in Computational Molecular Biology, Lesk, A. M, ed, Oxford University Press, New York, 1988; Biocomputing: Informatics and Genome Projects, Smith, D. W., ed., Academic Press, New York, 1993; Sequence Analysis in Molecular Biology, von Heinje, G., Academic Press, 1987; Computer Analysis of Sequence Data, Part I, Griffin, A. M., and Griffin, H. G., eds., Humana Press, New Jersey, 1994; and Sequence Analysis Primer, Gribskov, M. and Devereux, J., eds., M Stockton Press, New York, 1991; each of which is incorporated herein by reference. For example, the percent identity between two nucleotide sequences can be determined using the algorithm of Meyers and Miller (CABIOS, 1989, 4:11-17), which has been incorporated into the ALIGN program (version 2.0) using a PAM120 weight residue table, a gap length penalty of 12 and a gap penalty of 4. The percent identity between two nucleotide sequences can, alternatively, be determined using the GAP program in the GCG software package using an NWSgapdna.CMP matrix. Methods commonly employed to determine percent identity between sequences include, but are not limited to those disclosed in Carillo, H., and Lipman, D., SIAM J Applied Math., 48:1073 (1988); incorporated herein by reference. Techniques for determining identity are codified in publicly available computer programs. Exemplary computer software to determine homology between two sequences include, but are not limited to, GCG program package, Devereux, J., et al., Nucleic Acids Research, 12(1), 387 (1984)), BLASTP, BLASTN, and FASTA Altschul, S. F. et al., J. Molec. Biol., 215, 403 (1990)).

[0382] Inhibit expression of a gene: As used herein, the phrase “inhibit expression of a gene” means to cause a reduction in the amount of an expression product of the gene. The expression product can be an RNA transcribed from the gene (e.g., an mRNA) or a polypeptide translated from an mRNA transcribed from the gene. Typically a reduction in the level of an mRNA results in a reduction in the level of a polypeptide translated therefrom. The level of expression may be determined using standard techniques for measuring mRNA or protein.

[0383] In vitro: As used herein, the term “in vitro” refers to events that occur in an artificial environment, e.g., in a test tube or reaction vessel, in cell culture, in a Petri dish, etc., rather than within an organism (e g animal, plant, or microbe).

[0384] In vivo: As used herein, the term “in vivo” refers to events that occur within an organism (e.g., animal, plant, or microbe or cell or tissue thereof).

[0385] Isolated: As used herein, the term “isolated” refers to a substance or entity that has been separated from at least some of the components with which it was associated (whether in nature or in an experimental setting). Isolated substances may have varying levels of purity in reference to the substances from which they have been associated. Isolated substances and/or entities may be separated from at least about 10%, about 20%, about 30%, about 40%, about 50%, about 60%, about 70%, about 80%, about 90%, or more of the other components with which they were initially associated. In some embodiments, isolated agents are more than about 80%, about 85%, about 90%, about 91%, about 92%, about 93%, about 94%, about 95%, about 96%, about 97%, about 98%, about 99%, or more than about 99% pure. As used herein, a substance is “pure” if it is substantially free of other components. Substantially isolated: By “substantially isolated” is meant that the compound is substantially separated from the environment in which it was formed or detected. Partial separation can include, for example, a composition enriched in the compound of the present disclosure. Substantial separation can include compositions containing at least about 50%, at least about 60%, at least about 70%, at least about 80%, at least about 90%, at least about 95%, at least about 97%, or at least about 99% by weight of the compound of the present disclosure, or salt thereof. Methods for isolating compounds and their salts are routine in the art.

[0386] Label: The term “label” refers to a substance or a compound which is incorporated into an object so that the substance, compound or object may be detectable.

[0387] Linker: As used herein, a linker refers to a group of atoms, e.g., 10-1,000 atoms, and can be comprised of the atoms or groups such as, but not limited to, carbon, amino, alkylamino, oxygen, sulfur, sulfoxide, sulfonyl, carbonyl, and imine. The linker can be attached to a modified nucleoside or nucleotide on the nucleobase or sugar moiety at a first end, and to a payload, e.g., a detectable or therapeutic agent, at a second end. The linker may be of sufficient length as to not interfere with incorporation into a nucleic acid sequence. The linker can be used for any useful purpose, such as to form saRNA conjugates, as well as to administer a payload, as described herein.

[0388] Examples of chemical groups that can be incorporated into the linker include, but are not limited to, alkyl, alkenyl, alkynyl, amido, amino, ether, thioether, ester, alkylene, heteroalkylene, aryl, or heterocyclyl, each of which can be optionally substituted, as described herein. Examples of linkers include, but are not limited to, unsaturated alkanes, polyethylene glycols (e.g., ethylene or propylene glycol monomeric units, e.g., diethylene glycol, dipropylene glycol, triethylene glycol, tripropylene glycol, tetraethylene glycol, or tetraethylene glycol), and dextran polymers and derivatives thereof. Other examples include, but are not limited to, cleavable moieties within the linker, such as, for example, a disulfide bond (—S—S—) or an azo bond (—N═N—), which can be cleaved using a reducing agent or photolysis. Non-limiting examples of a selectively cleavable bond include an amido bond can be cleaved for example by the use of tris(2-carboxyethyl)phosphine (TCEP), or other reducing agents, and/or photolysis, as well as an ester bond can be cleaved for example by acidic or basic hydrolysis.

[0389] Metastasis: As used herein, the term “metastasis” means the process by which cancer spreads from the place at which it first arose as a primary tumor to distant locations in the body. Metastasis also refers to cancers resulting from the spread of the primary tumor. For example, someone with breast cancer may show metastases in their lymph system, liver, bones or lungs.

[0390] Modified: As used herein “modified” refers to a changed state or structure of a molecule of the invention. Molecules may be modified in many ways including chemically, structurally, and functionally. In one embodiment, the saRNAs of the present invention are modified by the introduction of non-natural nucleosides and/or nucleotides.

[0391] Naturally occurring: As used herein, “naturally occurring” means existing in nature without artificial aid.

[0392] Nucleic acid: The term “nucleic acid” as used herein, refers to a molecule comprised of one or more nucleotides, i.e, ribonucleotides, deoxyribonucleotides, or both. The term includes monomers and polymers of ribonucleotides and deoxyribonucleotides, with the ribonucleotides and/or deoxyribonucleotides being bound together, in the case of the polymers, via 5′ to 3′ linkages. The ribonucleotide and deoxyribonucleotide polymers may be single or double-stranded. However, linkages may include any of the linkages known in the art including, for example, nucleic acids comprising 5′ to 3′ linkages. The nucleotides may be naturally occurring or may be synthetically produced analogs that are capable of forming base-pair relationships with naturally occurring base pairs. Examples of non-naturally occurring bases that are capable of forming base-pairing relationships include, but are not limited to, aza and deaza pyrimidine analogs, aza and deaza purine analogs, and other heterocyclic base analogs, wherein one or more of the carbon and nitrogen atoms of the pyrimidine rings have been substituted by heteroatoms, e.g., oxygen, sulfur, selenium, phosphorus, and the like.

[0393] Patient: As used herein, “patient” refers to a subject who may seek or be in need of treatment, requires treatment, is receiving treatment, will receive treatment, or a subject who is under care by a trained professional for a particular disease or condition.

[0394] Peptide: As used herein, “peptide” is less than or equal to 50 amino acids long, e.g., about 5, 10, 15, 20, 25, 30, 35, 40, 45, or 50 amino acids long.

[0395] Pharmaceutically acceptable: The phrase “pharmaceutically acceptable” is employed herein to refer to those compounds, materials, compositions, and/or dosage forms which are, within the scope of sound medical judgment, suitable for use in contact with the tissues of human beings and animals without excessive toxicity, irritation, allergic response, or other problem or complication, commensurate with a reasonable benefit/risk ratio.

[0396] Pharmaceutically acceptable excipients: The phrase “pharmaceutically acceptable excipient,” as used herein, refers any ingredient other than the compounds described herein (for example, a vehicle capable of suspending or dissolving the active compound) and having the properties of being substantially nontoxic and non-inflammatory in a patient. Excipients may include, for example: antiadherents, antioxidants, binders, coatings, compression aids, disintegrants, dyes (colors), emollients, emulsifiers, fillers (diluents), film formers or coatings, flavors, fragrances, glidants (flow enhancers), lubricants, preservatives, printing inks, sorbents, suspensing or dispersing agents, sweeteners, and waters of hydration. Exemplary excipients include, but are not limited to: butylated hydroxytoluene (BHT), calcium carbonate, calcium phosphate (dibasic), calcium stearate, croscarmellose, crosslinked polyvinyl pyrrolidone, citric acid, crospovidone, cysteine, ethylcellulose, gelatin, hydroxypropyl cellulose, hydroxypropyl methylcellulose, lactose, magnesium stearate, maltitol, mannitol, methionine, methylcellulose, methyl paraben, microcrystalline cellulose, polyethylene glycol, polyvinyl pyrrolidone, povidone, pregelatinized starch, propyl paraben, retinyl palmitate, shellac, silicon dioxide, sodium carboxymethyl cellulose, sodium citrate, sodium starch glycolate, sorbitol, starch (corn), stearic acid, sucrose, talc, titanium dioxide, vitamin A, vitamin E, vitamin C, and xylitol.

[0397] Pharmaceutically acceptable salts: The present disclosure also includes pharmaceutically acceptable salts of the compounds described herein. As used herein, “pharmaceutically acceptable salts” refers to derivatives of the disclosed compounds wherein the parent compound is modified by converting an existing acid or base moiety to its salt form (e.g., by reacting the free base group with a suitable organic acid). Examples of pharmaceutically acceptable salts include, but are not limited to, mineral or organic acid salts of basic residues such as amines; alkali or organic salts of acidic residues such as carboxylic acids; and the like. Representative acid addition salts include acetate, adipate, alginate, ascorbate, aspartate, benzenesulfonate, benzoate, bisulfate, borate, butyrate, camphorate, camphorsulfonate, citrate, cyclopentanepropionate, digluconate, dodecylsulfate, ethanesulfonate, fumarate, glucoheptonate, glycerophosphate, hemisulfate, heptonate, hexanoate, hydrobromide, hydrochloride, hydroiodide, 2-hydroxy-ethanesulfonate, lactobionate, lactate, laurate, lauryl sulfate, malate, maleate, malonate, methanesulfonate, 2-naphthalenesulfonate, nicotinate, nitrate, oleate, oxalate, palmitate, pamoate, pectinate, persulfate, 3-phenylpropionate, phosphate, picrate, pivalate, propionate, stearate, succinate, sulfate, tartrate, thiocyanate, toluenesulfonate, undecanoate, valerate salts, and the like. Representative alkali or alkaline earth metal salts include sodium, lithium, potassium, calcium, magnesium, and the like, as well as nontoxic ammonium, quaternary ammonium, and amine cations, including, but not limited to ammonium, tetramethylammonium, tetraethylammonium, methylamine, dimethylamine, trimethylamine, triethylamine, ethylamine, and the like. The pharmaceutically acceptable salts of the present disclosure include the conventional non-toxic salts of the parent compound formed, for example, from non-toxic inorganic or organic acids. The pharmaceutically acceptable salts of the present disclosure can be synthesized from the parent compound which contains a basic or acidic moiety by conventional chemical methods. Generally, such salts can be prepared by reacting the free acid or base forms of these compounds with a stoichiometric amount of the appropriate base or acid in water or in an organic solvent, or in a mixture of the two; generally, nonaqueous media like ether, ethyl acetate, ethanol, isopropanol, or acetonitrile are preferred. Lists of suitable salts are found in Remington's Pharmaceutical Sciences, 17^{th} ed, Mack Publishing Company, Easton, Pa., 1985, p. 1418, Pharmaceutical Salts: Properties, Selection, and Use, P. H. Stahl and C. G. Wermuth (eds), Wiley-VCH, 2008, and Berge et al., Journal of Pharmaceutical Science, 66, 1-19 (1977), each of which is incorporated herein by reference in its entirety.

[0398] Pharmaceutically acceptable solvate: The term “pharmaceutically acceptable solvate,” as used herein, means a compound of the invention wherein molecules of a suitable solvent are incorporated in the crystal lattice. A suitable solvent is physiologically tolerable at the dosage administered. For example, solvates may be prepared by crystallization, recrystallization, or precipitation from a solution that includes organic solvents, water, or a mixture thereof. Examples of suitable solvents are ethanol, water (for example, mono-, di-, and tri-hydrates), N-methylpyrrolidinone (NMP), dimethyl sulfoxide (DMSO), N,N′-dimethylformamide (DMF), N,N′-dimethylacetamide (DMAC), 1,3-dimethyl-2-imidazolidinone (DMEU), 1,3-dimethyl-3,4,5,6-tetrahydro-2-(1H)-pyrimidinone (DMPU), acetonitrile (ACN), propylene glycol, ethyl acetate, benzyl alcohol, 2-pyrrolidone, benzyl benzoate, and the like. When water is the solvent, the solvate is referred to as a “hydrate.”

[0399] Pharmacologic effect: As used herein, a “pharmacologic effect” is a measurable biologic phenomenon in an organism or system which occurs after the organism or system has been contacted with or exposed to an exogenous agent Pharmacologic effects may result in therapeutically effective outcomes such as the treatment, improvement of one or more symptoms, diagnosis, prevention, and delay of onset of disease, disorder, condition or infection. Measurement of such biologic phenomena may be quantitative, qualitative or relative to another biologic phenomenon. Quantitative measurements may be statistically significant. Qualitative measurements may be by degree or kind and may be at least 10%, 20%, 30%, 40%, 50%, 60%, 70%, 80%, 90% or more different. They may be observable as present or absent, better or worse, greater or less. Exogenous agents, when referring to pharmacologic effects are those agents which are, in whole or in part, foreign to the organism or system. For example, modifications to a wild type biomolecule, whether structural or chemical, would produce an exogenous agent. Likewise, incorporation or combination of a wild type molecule into or with a compound, molecule or substance not found naturally in the organism or system would also produce an exogenous agent.

[0400] The saRNA of the present invention, comprises exogenous agents. Examples of pharmacologic effects include, but are not limited to, alteration in cell count such as an increase or decrease in neutrophils, reticulocytes, granulocytes, erythrocytes (red blood cells), megakaryocytes, platelets, monocytes, connective tissue macrophages, epidermal langerhans cells, osteoclasts, dendritic cells, microglial cells, neutrophils, eosinophils, basophils, mast cells, helper T cells, suppressor T cells, cytotoxic cells, natural killer T cells, B cells, natural killer cells, or reticulocytes. Pharmacologic effects also include alterations in blood chemistry, pH, hemoglobin, hematocrit, changes in levels of enzymes such as, but not limited to, liver enzymes AST and ALT, changes in lipid profiles, electrolytes, metabolic markers, hormones or other marker or profile known to those of skill in the art.

[0401] Physicochemical: As used herein, “physicochemical” means of or relating to a physical and/or chemical property.

[0402] Preventing: As used herein, the term “preventing” refers to partially or completely delaying onset of an infection, disease, disorder and/or condition; partially or completely delaying onset of one or more symptoms, features, or clinical manifestations of a particular infection, disease, disorder, and/or condition; partially or completely delaying onset of one or more symptoms, features, or manifestations of a particular infection, disease, disorder, and/or condition; partially or completely delaying progression from an infection, a particular disease, disorder and/or condition; and/or decreasing the risk of developing pathology associated with the infection, the disease, disorder, and/or condition.

[0403] Prodrug: The present disclosure also includes prodrugs of the compounds described herein. As used herein, “prodrugs” refer to any substance, molecule or entity which is in a form predicate for that substance, molecule or entity to act as a therapeutic upon chemical or physical alteration. Prodrugs may by covalently bonded or sequestered in some way and which release or are converted into the active drug moiety prior to, upon or after administered to a mammalian subject. Prodrugs can be prepared by modifying functional groups present in the compounds in such a way that the modifications are cleaved, either in routine manipulation or in vivo, to the parent compounds. Prodrugs include compounds wherein hydroxyl, amino, sulfhydryl, or carboxyl groups are bonded to any group that, when administered to a mammalian subject, cleaves to form a free hydroxyl, amino, sulfhydryl, or carboxyl group respectively. Preparation and use of prodrugs is discussed in T. Higuchi and V. Stella, “Pro-drugs as Novel Delivery Systems,” Vol, 14 of the A.C.S. Symposium Series, and in Bioreversible Carriers in Drug Design, ed. Edward B. Roche, American Pharmaceutical Association and Pergamon Press, 1987, both of which are hereby incorporated by reference in their entirety.

[0404] Prognosing: As used herein, the term “prognosing” means a statement or claim that a particular biologic event will, or is very likely to, occur in the future.

[0405] Progression: As used herein, the term “progression” or “cancer progression” means the advancement or worsening of or toward a disease or condition.

[0406] Proliferate: As used herein, the term “proliferate” means to grow, expand or increase or cause to grow, expand or increase rapidly. “Proliferative” means having the ability to proliferate. “Anti-proliferative” means having properties counter to or inapposite to proliferative properties.

[0407] Protein: A “protein” means a polymer of amino acid residues linked together by peptide bonds. The term, as used herein, refers to proteins, polypeptides, and peptides of any size, structure, or function. Typically, however, a protein will be at least 50 amino acids long. In some instances the protein encoded is smaller than about 50 amino acids. In this case, the polypeptide is termed a peptide. If the protein is a short peptide, it will be at least about 10 amino acid residues long. A protein may be naturally occurring, recombinant, or synthetic, or any combination of these. A protein may also comprise a fragment of a naturally occurring protein or peptide. A protein may be a single molecule or may be a multi-molecular complex. The term protein may also apply to amino acid polymers in which one or more amino acid residues are an artificial chemical analogue of a corresponding naturally occurring amino acid.

[0408] Protein expression: The term “protein expression” refers to the process by which a nucleic acid sequence undergoes translation such that detectable levels of the amino acid sequence or protein are expressed.

[0409] Purified: As used herein, “purify,” “purified,” “purification” means to make substantially pure or clear from unwanted components, material defilement, admixture or imperfection.

[0410] Regression: As used herein, the term “regression” or “degree of regression” refers to the reversal, either phenotypically or genotypically, of a cancer progression. Slowing or stopping cancer progression may be considered regression.

[0411] Sample: As used herein, the term “sample” or “biological sample” refers to a subset of its tissues, cells or component parts (e.g. body fluids, including but not limited to blood, mucus, lymphatic fluid, synovial fluid, cerebrospinal fluid, saliva, amniotic fluid, amniotic cord blood, urine, vaginal fluid and semen). A sample further may include a homogenate, lysate or extract prepared from a whole organism or a subset of its tissues, cells or component parts, or a fraction or portion thereof, including but not limited to, for example, plasma, serum, spinal fluid, lymph fluid, the external sections of the skin, respiratory, intestinal, and genitourinary tracts, tears, saliva, milk, blood cells, tumors, organs. A sample further refers to a medium, such as a nutrient broth or gel, which may contain cellular components, such as proteins or nucleic acid molecule.

[0412] Signal Sequences: As used herein, the phrase “signal sequences” refers to a sequence which can direct the transport or localization of a protein.

[0413] Single unit dose: As used herein, a “single unit dose” is a dose of any therapeutic administered in one dose/at one timelsingle route/single point of contact, i.e, single administration event.

[0414] Similarity: As used herein, the term “similarity” refers to the overall relatedness between polymeric molecules, e.g. between polynucleotide molecules (e.g. DNA molecules and/or RNA molecules) and/or between polypeptide molecules. Calculation of percent similarity of polymeric molecules to one another can be performed in the same manner as a calculation of percent identity, except that calculation of percent similarity takes into account conservative substitutions as is understood in the art.

[0415] Split dose: As used herein, a “split dose” is the division of single unit dose or total daily dose into two or more doses.

[0416] Stable: As used herein “stable” refers to a compound that is sufficiently robust to survive isolation to a useful degree of purity from a reaction mixture, and in one embodiment, capable of formulation into an efficacious therapeutic agent.

[0417] Stabilized: As used herein, the term “stabilize”, “stabilized,” “stabilized region” means to make or become stable.

[0418] Subject: As used herein, the term “subject” or “patient” refers to any organism to which a composition in accordance with the invention may be administered, e.g., for experimental, diagnostic, prophylactic, and/or therapeutic purposes. Typical subjects include animals (e.g., mammals such as mice, rats, rabbits, non-human primates, and humans) and/or plants.

[0419] Substantially: As used herein, the term “substantially” refers to the qualitative condition of exhibiting total or near-total extent or degree of a characteristic or property of interest. One of ordinary skill in the biological arts will understand that biological and chemical phenomena rarely, if ever, go to completion and/or proceed to completeness or achieve or avoid an absolute result. The term “substantially” is therefore used herein to capture the potential lack of completeness inherent in many biological and chemical phenomena.

[0420] Substantially equal: As used herein as it relates to time differences between doses, the term means plus/minus 2%.

[0421] Substantially simultaneously: As used herein and as it relates to plurality of doses, the term means within 2 seconds.

[0422] Suffering from: An individual who is “suffering from” a disease, disorder, and/or condition has been diagnosed with or displays one or more symptoms of a disease, disorder, and/or condition.

[0423] Susceptible to: An individual who is “susceptible to” a disease, disorder, and/or condition has not been diagnosed with and/or may not exhibit symptoms of the disease, disorder, and/or condition but harbors a propensity to develop a disease or its symptoms. In some embodiments, an individual who is susceptible to a disease, disorder, and/or condition (for example, cancer) may be characterized by one or more of the following: (1) a genetic mutation associated with development of the disease, disorder, and/or condition; (2) a genetic polymorphism associated with development of the disease, disorder, and/or condition; (3) increased and/or decreased expression and/or activity of a protein and/or nucleic acid associated with the disease, disorder, and/or condition; (4) habits and/or lifestyles associated with development of the disease, disorder, and/or condition; (5) a family history of the disease, disorder, and/or condition; and (6) exposure to and/or infection with a microbe associated with development of the disease, disorder, and/or condition. In some embodiments, an individual who is susceptible to a disease, disorder, and/or condition will develop the disease, disorder, and/or condition. In some embodiments, an individual who is susceptible to a disease, disorder, and/or condition will not develop the disease, disorder, and/or condition.

[0424] Sustained release: As used herein, the term “sustained release” refers to a pharmaceutical composition or compound release profile that conforms to a release rate over a specific period of time.

[0425] Synthetic: The term “synthetic” means produced, prepared, and/or manufactured by the hand of man. Synthesis of polynucleotides or polypeptides or other molecules of the present invention may be chemical or enzymatic.

[0426] Targeted Cells: As used herein, “targeted cells” refers to any one or more cells of interest. The cells may be found in vitro, in vivo, in situ or in the tissue or organ of an organism. The organism may be an animal, in one embodiment, a mammal, or a human and most In one embodiment, a patient.

[0427] Therapeutic Agent: The term “therapeutic agent” refers to any agent that, when administered to a subject, has a therapeutic, diagnostic, and/or prophylactic effect and/or elicits a desired biological and/or pharmacological effect.

[0428] Therapeutically effective amount: As used herein, the term “therapeutically effective amount” means an amount of an agent to be delivered (e.g., nucleic acid, drug, therapeutic agent, diagnostic agent, prophylactic agent, etc.) that is sufficient, when administered to a subject suffering from or susceptible to an infection, disease, disorder, and/or condition, to treat, improve symptoms of, diagnose, prevent, and/or delay the onset of the infection, disease, disorder, and/or condition.

[0429] Therapeutically effective outcome: As used herein, the term “therapeutically effective outcome” means an outcome that is sufficient in a subject suffering from or susceptible to an infection, disease, disorder, and/or condition, to treat, improve symptoms of, diagnose, prevent, and/or delay the onset of the infection, disease, disorder, and/or condition.

[0430] Total daily dose: As used herein, a “total daily dose” is an amount given or prescribed in 24 hour period. It may be administered as a single unit dose.

[0431] Transcription factor: As used herein, the term “transcription factor” refers to a DNA-binding protein that regulates transcription of DNA into RNA, for example, by activation or repression of transcription. Some transcription factors effect regulation of transcription alone, while others act in concert with other proteins. Some transcription factor can both activate and repress transcription under certain conditions. In general, transcription factors bind a specific target sequence or sequences highly similar to a specific consensus sequence in a regulatory region of a target gene. Transcription factors may regulate transcription of a target gene alone or in a complex with other molecules.

[0432] Treating: As used herein, the term “treating” refers to partially or completely alleviating, ameliorating, improving, relieving, delaying onset of, inhibiting progression of, reducing severity of, and/or reducing incidence of one or more symptoms or features of a particular infection, disease, disorder, and/or condition. For example, “treating” cancer may refer to inhibiting survival, growth, and/or spread of a tumor. Treatment may be administered to a subject who does not exhibit signs of a disease, disorder, and/or condition and/or to a subject who exhibits only early signs of a disease, disorder, and/or condition for the purpose of decreasing the risk of developing pathology associated with the disease, disorder, and/or condition.

[0433] The phrase “a method of treating” or its equivalent, when applied to, for example, cancer refers to a procedure or course of action that is designed to reduce, eliminate or prevent the number of cancer cells in an individual, or to alleviate the symptoms of a cancer. “A method of treating” cancer or another proliferative disorder does not necessarily mean that the cancer cells or other disorder will, in fact, be completely eliminated, that the number of cells or disorder will, in fact, be reduced, or that the symptoms of a cancer or other disorder will, in fact, be alleviated. Often, a method of treating cancer will be performed even with a low likelihood of success, but which, given the medical history and estimated survival expectancy of an individual, is nevertheless deemed an overall beneficial course of action.

[0434] Tumor growth: As used herein, the term “tumor growth” or “tumor metastases growth”, unless otherwise indicated, is used as commonly used in oncology, where the term is principally associated with an increased mass or volume of the tumor or tumor metastases, primarily as a result of tumor cell growth.

[0435] Tumor Burden: As used herein, the term “tumor burden” refers to the total Tumor Volume of all tumor nodules with a diameter in excess of 3 mm carried by a subject.

[0436] Tumor Volume: As used herein, the term “tumor volume” refers to the size of a tumor. The tumor volume in min' is calculated by the formula: volume=(width)²×length/2.

[0437] Unmodified: As used herein, “unmodified” refers to any substance, compound or molecule prior to being changed in any way. Unmodified may, but does not always, refer to the wild type or native form of a biomolecule. Molecules may undergo a series of modifications whereby each modified molecule may serve as the “unmodified” starting molecule for a subsequent modification.

### Equivalents and Scope

[0438] Those skilled in the art will recognize, or be able to ascertain using no more than routine experimentation, many equivalents to the specific embodiments in accordance with the invention described herein. The scope of the present invention is not intended to be limited to the above Description, but rather is as set forth in the appended claims.

[0439] In the claims, articles such as “a,” “an,” and “the” may mean one or more than one unless indicated to the contrary or otherwise evident from the context. Claims or descriptions that include “or” between one or more members of a group are considered satisfied if one, more than one, or all of the group members are present in, employed in, or otherwise relevant to a given product or process unless indicated to the contrary or otherwise evident from the context. The invention includes embodiments in which exactly one member of the group is present in, employed in, or otherwise relevant to a given product or process. The invention includes embodiments in which more than one, or all of the group members are present in, employed in, or otherwise relevant to a given product or process.

[0440] It is also noted that the term “comprising” is intended to be open and permits the inclusion of additional elements or steps.

[0441] Where ranges are given, endpoints are included. Furthermore, it is to be understood that unless otherwise indicated or otherwise evident from the context and understanding of one of ordinary skill in the art, values that are expressed as ranges can assume any specific value or subrange within the stated ranges in different embodiments of the invention, to the tenth of the unit of the lower limit of the range, unless the context clearly dictates otherwise.

[0442] In addition, it is to be understood that any particular embodiment of the present invention that falls within the prior art may be explicitly excluded from any one or more of the claims. Since such embodiments are deemed to be known to one of ordinary skill in the art, they may be excluded even if the exclusion is not set forth explicitly herein. Any particular embodiment of the compositions of the invention (e.g., any nucleic acid or protein encoded thereby; any method of production; any method of use; etc.) can be excluded from any one or more claims, for any reason, whether or not related to the existence of prior art.

[0443] All cited sources, for example, references, publications, databases, database entries, and art cited herein, are incorporated into this application by reference, even if not expressly stated in the citation. In case of conflicting statements of a cited source and the instant application, the statement in the instant application shall control.

[0444] The invention is further illustrated by the following non-limiting examples.

### EXAMPLES

### Example 1

### Upregulation of a Target Gene Expression Through Transfection with its saRNA In Vitro

[0445] 20 nM, 50 nM or 100 nM of saRNA of an saRNA for a target gene is transfected onto a monolayer of cells using lipofectamine 2000 (Life Technologies, US) following the manufacturer's instructions. The target genes may be any of those described herein such as in the target genes listed in Lengthy Table 1. The saRNA may be single stranded or double-stranded. The cells may be HepG2 cells. This process is repeated three times before cells are harvested for isolation of total RNA for mRNA analysis.

[0446] After transfection, the isolation of total RNA is performed using the RNAqueous-Micro kit (Ambion, UK) following the manufacturer's instructions. Briefly, the cells are gently centrifuged followed by 3 pulses of sonication at Output 3 in lysis buffer (AMBION, UK). The cell lysates are then processed through an RNA binding column, followed by multiple washes and elution. The total RNA isolated is quantified by a NANODROP 2000 spectrophotometer. 500 ng of total extracted RNA is processed for elimination of genomic DNA followed by reverse transcription using the QUANTITECT® Reverse Transcription kit from QIAGEN.

[0447] The isolated RNA extracts are analyzed using quantitative reverse transcriptase (qRT-PCR). Briefly, the extracts are reverse transcribed using First Strand cDNA synthesis kit (Qiagen). The cDNA is then amplified for quantitative analysis using QuantiFast® SYBR® Green PCT Kit from Qiagen. Amplification is performed using Applied Biosystems 7900HT FAST-Real-Time System. Amplified products are then analyzed using Applied Biosystems RQ Manager 1.2.1. 5 independent experiments are amplified in triplicates for quantitative analysis. Student T-Test scoring is performed at 99% confidence intervals.

[0448] mRNA production of the target gene is determined within the cells through the use of ELISA. Briefly, the cells are grown in phenol-red free RPMI media in the presence of charcoal stripped FCS. Following three sets of saRNA transfections at 8 hrs, 16 hrs and 24 hrs, the culture media is collected for total ELISA.

[0449] An increase in mRNA levels only occurred in cells transfected with saRNAs, not in control cells transfected with scramble saRNA.

### Example 2

### Upregulation of Target Gene Expression Through the Transfection with saRNA in Mouse In Vivo

[0450] Ten male C57B16/J, 8 week old mice are used for the experiment (control group N=5). The target genes may be any of those described herein such as in the target genes listed in Lengthy Table 1.

[0451] saRNA of the target gene reconstituted with 100 μL of RNase/Dnase free H20; 50 μL of complex A and 50 μL of complex B (InvivoFectamine, Invitrogen, CA, USA) are mixed, incubated at 50° C. for 30 minutes and are used for tail vein injections. Control animals are injected with equal volume of PBS while a positive control animal received siRNA against the target gene; a total of 5 control and 5 experimental animals are injected.

[0452] After administration, the total RNA is isolated. Frozen tissue sections from the mice are placed into scintillation vials containing Trizol and homogenised for 30 seconds. The tissue may be from the liver of the mice. The homogenate is then transferred in Falcon tubes for a further 2 minutes of homogenisation. Chloroform is then added to this and mixed by vortexing followed by a centrifugation step at 12,000 rpm for 15 minutes at 4° C. The aqueous upper phase is then transferred into a fresh microfuge tube where RNA is precipitated using 5 mg/ml of linear acrylamide (Ambion) and isopropanol overnight at −20° C. The RNA is pelleted by centrifugation at 12,000 rpm for 15 minutes at 4° C. and washed with ice cold 70% ethanol. The RNA is pelleted again at 7,500 rpm for 5 minutes at 4° C. The supernatant is removed immediately and the RNA pellet allowed to air dry. The RNA is dissolved in nuclease free water for immediate analysis for RNA integrity using a Bionanalyser.

[0453] The isolated RNA is analyzed using qRT-PCR as described in Example 1. mRNA production of the target gene is determined using an ELISA as described in Example 1. The administration of saRNA using a dendrimer delivery vehicle to a mouse leads to a significant increase in the mRNA encoded by the target gene within the blood circulation.

[0454] The effects of administration of saRNA on overall mice organ function may be studied. As a non-limiting example, the effects of administration of saRNA on overall liver function are determined according to the liver function markers gamma glutamyl transpeptidase, alanine aminotransferase, and aspartate aminotransferase or bilirubin.

[0455] saRNA also affects other the expression of other genes according to the mRNA levels of these genes. Tissue samples from the treated mice are used to measure the expression levels of various genes. The mRNA transcript levels of these genes are measured by RT-PCT mRNA expression level.

### Other Embodiments

[0456] It is to be understood that while the present disclosure has been described in conjunction with the detailed description thereof, the foregoing description is intended to illustrate and not limit the scope of the present disclosure, which is defined by the scope of the appended claims. Other aspects, advantages, and modifications are within the scope of the following claims.

### Lengthy Table

[0457] The patent application contains two lengthy tables (Lengthy Table 1 and Lengthy Table 2). A copy of each table is available in electronic form from the USPTO web site. An electronic copy of the table will also be available from the USPTO upon request and payment of the fee set forth in 37 CFR 1.19(b)(3).

1. A synthetic isolated saRNA which up-regulates expression of a target protein selected from the group consisting of any protein expressed by a target gene in Table 1.

2. The saRNA of claim 1, wherein the saRNA is single-stranded and is 14-30 nucleotides in length.

3. The saRNA of claim 2, wherein the saRNA is at least 80% identical to the reverse complement of a nucleotide sequence selected from the group consisting of SEQ ID NOs: 1-4047, 315236-318726, 584785-589061, 913310-917531, 1241080-1245401, and 1559932-1564372.

4. (canceled)

5. The saRNA of claim 2, wherein the saRNA comprises an antisense sequence selected from the group consisting of the antisense sequences described in the sequence listing referenced at the beginning of this application.

6. The saRNA of claim 2, wherein the saRNA comprises a 3′ tail.

7. The saRNA of claim 2, wherein the saRNA comprises at least one modification.

8. The saRNA of claim 1, wherein the saRNA is an saRNA duplex comprising an antisense strand and a sense strand wherein each strand is independently 14-30 nucleotides in length.

9. The saRNA of claim 8, wherein the antisense strand of the saRNA duplex is at least 80% identical to the reverse complement of a nucleotide sequence selected from the group consisting of SEQ ID NOs: 1-4047, 315236-318726, 584785-589061, 913310-917531, 1241080-1245401, and 1559932-1564372.

10. The saRNA of claim 8, wherein the antisense strand or the sense strand of the saRNA independently comprises a 3′ overhang.

11. The saRNA of claim 8, wherein the saRNA comprises a sense sequence and an antisense sequence selected from the group of sequences consisting of the sense sequences and corresponding antisense sequences described in the sequence listing referenced at the beginning of this application.

12. The saRNA of claim 8, wherein the saRNA comprises a 3′ tail.

13. The saRNA of claim 8, wherein the antisense strand and the sense strand independently comprise at least one modification.

14. A pharmaceutical composition comprising the saRNA of claim 1 and at least one pharmaceutically acceptable excipient.

15. A method of modulating the expression of a target protein, comprising administering the saRNA of claim 1.

16. The method of claim 15, wherein the expression of the target protein is increased.

17. The method of claim 16, wherein the expression of the target protein is increased by at least 30%.

18. The method of claim 17, wherein the expression of the target protein is increased by at least 50%.

19. A synthetic isolated saRNA which up-regulates expression of a target gene selected from the group consisting of any non-coding target gene in Table 2.

20. The saRNA of claim 19, wherein the saRNA is single-stranded and is 14-30 nucleotides in length.

21. The saRNA of claim 20, wherein the saRNA is at least 80% identical to the reverse complement of a nucleotide sequence selected from the group consisting of SEQ ID NOs: 1879189-1889207.

22. (canceled)

23. The saRNA of claim 20, wherein the saRNA comprises an antisense sequence selected from the group consisting of the antisense sequences described in the sequence listing referenced at the beginning of this application.

24. The saRNA of claim 20, wherein the saRNA comprises a 3′ tail.

25. The saRNA of claim 20, wherein the saRNA comprises at least one modification.

26. The saRNA of claim 19, wherein the saRNA is an saRNA duplex comprising an antisense strand and a sense strand wherein each strand is independently 14-30 nucleotides in length.

27. The saRNA of claim 26, wherein the antisense strand of the saRNA duplex is at least 80% identical to the reverse complement of a nucleotide sequence selected from the group consisting of SEQ ID NOs: 1879189-1889207.

28. The saRNA of claim 26, wherein the antisense strand or the sense strand of the saRNA independently comprises a 3′ overhang.

29. The saRNA of claim 26, wherein the saRNA comprises a sense sequence and an antisense sequence selected from the group of sequences consisting of the sense sequences and corresponding antisense sequences described in the sequence listing referenced at the beginning of this application.

30. The saRNA of claim 26, wherein the saRNA comprises a 3′ tail.

31. The saRNA of claim 26, wherein the antisense strand and the sense strand independently comprise at least one modification.

32. A pharmaceutical composition comprising the saRNA of claim 19 and at least one pharmaceutically acceptable excipient.

33.-36. (canceled)

The application's sequence listing, which the Patent Office published only in electronic form, follows.

SEQUENCE LISTING (2585259 sequences)

SEQ ID NO: 1 - DNA, 4001 bp, Homo sapiens
tgctgtgcttatgtctactttataaatgaggaaactgaggcttagaaaggttaaatcacttgcttagggttgcagttgctcaggggagaaagcaggggtccatttgggtcactgggatcaatcgctgagaacatagaaggaaagatcaaggaaatgcaaactgcagcttgagaagcactgagttgggacactcaggtgaatactgctgtccaggggacacacaatacctcagggcagcgctcagcaagggggctgggccagggtcactgtgtgagagaggatgcatggaggcttggagcagatctcagtgacagctcacctctgcaaggctgggcggcctcattggtgtgaatcagatgcaccacatcttcttttaggagtaggtttggttccctccctctttgctacacatataacaaactcaggtggggcctggttttcattttcttccataaagggaaaattaaggtccagaaagtgaaaagaactgcccagagtcctataggccagtggtgcacctgcgcacgtggcctgcactccagcagcaggagaggaggcagcacatggggcgttcgttcttgcctgggggctccccacggctcactccccaatctcagcatcctctcctcccctgtcagctcagggtcctgccagtcattccctgcctcctggggcaccaggctttccagtccctagttctaccccctggggatcaactaatcagcttgtttctcctccaataagtatccgtgttctttaggtgaaaagccccaacctactgcaggttttcagggtgcaccttcagtaggcatttgccattcctgtttacactttacaccaaggcatttgcacggcgggtaatgggtggggttgggctttgagtaggactgcccgatcccccagccagagcttccagcatggcatttgggttccatttgacctgggcctagctcagccctgaggctcatctcacaaggttctcggccctgttatttctccccgtgggcttggcttcttcccttcgcactctattcagctcctgtctgagctcctggagggctggctgcagctgggcttctctggttcctagaagcctggtcaaaccccgtactgggagctggcaaggctgcctcgggaggtgcactgtgggaggtgtgcgaggtactgcgtaaggtactacaggagcaggaaaaggctggaggggctttctccccctctgtggctgtcccaccctcttcaccagcctcctcccaaccagggtagggcaaaccgatgcttattctgggctctgggcctcagccagggcacacaggcagagttggtcttgtgaactcctgtggtcaggcctgggagggtgctgagacccaggactgggtgggacccaccagctcctcctgcccctcctatgccccagcctgggagcccgtggtctgtggaggcccctgatcagtccactcctccacatttcttgttcaggttctacctgcagaaggtggtccctcaagctccaccctgtgccctgctccccactctcgttggcttcaagaaagggttaaagatcagccattaggtcttaagggggcacaggttcctagtcctggaccatcagtcccagtggggatagagggagctctcagttacagtcggggagggaatgtacccccgggtctctgctttccggctcgccaagggggtttagagttaagggaagcaaggggagtccagcttttcattggctacaaaatcttgtggaatacaacctcccccaccccggtgtccatgcacacggattgtctttcttctcctggggcaatgtcccctctcggagccacctttccccaggactggaggctcagctggtactcctgggctcactctggtgcctccccttggtactgttttagccatcagactggatccctcttagctcagctgtccccaagctttcttcctctccataccattgtcccccctcacctgagtccctccttgagagccatatggggaagcaggtaggatggcctggagcaaactttcccagcttagagctggggaagaaatggcctgctcctggagatctggaacaagcagctcctccccctttacctgaggagctgcacccacaggagcagtcaggatggactgcctgcgagggacctgccggggatgcaaccttttgggggaagctggccccaaggtggagtggggctggcaacccttttggggccaatcacctggaagagggtgggtctgagtaggccagttctggttggctggaggctctgtcattttgtacagactcctcttccctccccaggggaagtgtctttggttcttgggaacagctggcaatcaaggtatggtgtttgccacgcaggaaaagccgttctgcacagagcctcagccagatctgaagggcactcggcacctgtgaccttggacagttcacctagtggagccctttaccttctcagtagaatgtacaccagtacatacaccagtcacccaggagagagaaccatgtaaattcgtggatgttgaaccgttgtgatttactctgggcagtgctttttaaagttccagttgtgacctatctgaaggccgtgtaatgagtttagtgggtcgtgaccaagatttttaaaatacgaacaggaatacaatggaaaatattctatattgtacgtaagggtaggttttgtttcatgaaatgtttgtttcagttgatagatattgaaatgtgtatacaagtttgggaaatatttctttaaattgtggatcatgatggaaataggtctgtgaaattcagtgtgaagtgtaaacaacaggaatagcaaatgcctattgcaggtgcaccctgcaaacttgcagcaggttggagcttttcatctaaagaagatggatacttattggtgtgaatcaaattcaccacatcttcttttaggagtaggtttggttccctccctctttgctacacacaacaaactcaggtggggcctggttttcattttcttccataaagggaaaattaaggtccagaaagtgaaaagaactgcccagagtcctataggccagtggtgcacctgcgcacgtggcctgcactccagcagcaggagaggcggcagcacatggggcgttcgttcttgcctgggggctccccagggctcactccccaatctcagcatcctcctcctcccgtcagctcagggtcctgccagccattccctgcctcctgggacaggctttccagtccctagttctaccccctggggatcaactaatcagtgtgtttctcctccaagacagttccattttaataggctttccaaagaggagttattaagatgtgagtgttggttcttgaaagttactttcaagtaagtaattgtcctttagagactgtgattcagtaggttgtggcctgaccctcaaaccacccccacccctgctttttttttaaaaaaaaatagggtttttgtctgtcacctgggttgggggtgcagtggtgcaatcatagctcactgcagccttgaactcttgggctcaagtgatcgacctcagcctccagaatagctgggattacaggtatgcaccaccttgccattttttggtatttttttgtagatatggggtctctctatgttgcccaggttggtctcaaactcctggcctcaagcaatcctcccacatcggcctccccaaagtgctgggtttacagatgtgagcagccataacctaaatttttaacaggtagaaatggtcccttagggaaaaacctgatgaagggggaggagcagtaaggccaagctgcctctttttcccctccccccatagatgtggggtagatttcactccacgcaagagggcacatggttattctgtgcttcaccccagtctcatttctagcacagtgcctggttcagaggcatgtggtcaacacaggtcacggttagcagcacacacgtctaatccagccagctcacctgcctctcatttgcacttcc

SEQ ID NO: 2 - DNA, 4001 bp, Homo sapiens
tagagtaataagatctaactgctgcctgatactaccctagtttcaaagaaatgaggagaatacatgagttttcgcaatatctaataggcaatgcaaatatgtctgatttctcttggtgaaaagtcgaggtctggctttcaggactgtggtttgttgccttcattcctcatgagaagaatttcaattggaagttagttgtgaacatggggtaattttgaccccatccaaatccatgacccccttgtgttctgtgacccaaatccatgacccccttatgttctgtgatccaaatccatgacccccttgtgttctgtggccccgggggctcaagatgccccaggagagaagccctgctcggctcccctgacgggttttgctgtcctccttgcattctccgctttgggaagctgtttatctgtagcttgttctattgtgggttagcttctttatagaccacttccccgctgcccactgcctggaccctacaagctccctaaaggcagacctgtggaactttacctctctcacctgtcattggccctagagcccaggactggcgtaggacacacagcagttgcataacacatctttgcataaaaaataaaagaatcaacaaagagtaacaatggctactatttaaggagggctccctctgtgtcaggcattataataagccttctggagagggttattcatggagtctccacaaaaccctgtgaagtaggagcaattttccctactttgcaaaagaggaaatcgagtcactgtatttgggagcctggactacagaatctgagcatcaagggtaggaaaacctaggacccaatcactgcatcttataaaagctgactggagatcagaagcctagagttcccgggatcttctcttttaggtaatagctacattcttttgaatagcatagaaattattttgaatagcatagaagacacacctagggtgtctcttgagaagaggcactggcaattgcttttcgttatgtaagaaacttacaaaaaatattttgtatattcagtttctgtcaaggcacaagaaaaagtacaagaaatccgtattggcaacacctacacagttccatttacaggtattttaacaaattacaccagaagcagaaccaaactatattccctaggcagctttctagctctcaaaagcaacaacatatttttaaagtcacattctgtaattttgctcaccggcactaatctactcatccgctacccttttactttgtggcttgctggctctagctaacaggtagatagcagtgggggcccagagactcaggaaaattcattcatatcttcacaacttctgagagtggtgagtgctgtgaataatatggacacatttatggacacgtgaaaggtacacttaaaaatgcgaaagatggtaaattttatatgcatattttacctcaattttaaaaataaaacaaaccaacaacaacaaaaagaaagtcagcgggagacactcaggtgaatagaaccagactggttttttctttctgttaactgagaaagcagatcattctttgaattttgtgaatattagccagggccagcttcagaaacacccaaagaggctgagaaccacctaatagggattatgcacatttcagaaggtctgatcagctgtcactgcaggccccatgataccggtgttcattcagctagaagcttccggtgtgtgatttttcctgccgccttccttaatggtcagctggaggggacacataaagcacaaaactcacccaagtcaacagcagctggaagatgcaatggaggactctcagtttcacagggtggccaaccgctgcagggatgtgcacagtgaaaaaatggctgcaaatgacccacagagtgacccctagtgagaacacgcaggctgctgcgaggaagatcagggccaggtcccacatgctgcttccagctcagagcgggctgagaggaagctgtgcgcagtgtaaaccatttaggacatggttcagagccagcagacctcctccacttataagtcacacctgtcctcccccacctccctgggtcccacaaacactggcccagcccaggtgagtcacaggctcaggtgaggatgtggttctaggacagggcccatgcagagaagaaagtggcccatccagccggatccagccacaaaagaaagttctagagtcccagcttacaatctggcactgctaactagaaatagtcttggataagccaccaagtcacaatggacatcataaacacgattcctcccaccggccctcggacctcatccccccactctgtgattcaactccagcttatcatccatccatcagcctgtggaggatgtcccagagctgttgtacggcaagccattctctgtacaccattcttcccctagacctcggctagactccatgcctcccctcttgctggtctctgctcaaatgttgccttctcagtgaggccatccctggcaatcttatttaaaatttaactcccgccagcatgcctacgcccaccttccccagccccaccttccccatcccccaccctttccacccccccaccttccacatcccccaccttcctcatcctccaccttccccatcccccatcttccccatcccccaccttcctcacccccccactgcttggtttttccctgtgacctttatcatcacctgcctcacttgtctgtttattgtctgggaggacaggaattttctttttgtgccattttatcaccagaggctggattggggcttggtactttgtaggtgctcagcaaatgcctatggagtgagagaatgaatagacaggctttgtcctctttcttgcaaatctgggaaactgtgcttgctttcctctttcttgcaaatctgggaaactgtgcttgcttgcctttccaggtcaggtcagaggttgatgtcaccattggaaatcttccctaacaaccaagtcccacatctgcagtaacaatagtaatatctgctgtgtctcccgcctcccagcttgagtgagagagcagtggttctcagacaggagagattttacctcccagaagatatgggaatatcagaaacatttttgttgtccccactcaggaagggccagagggctggttctagagtgtcatagacaagaggccagggatattgccaaacatcctgcaatgcacaaagacttatgcagtccagcaagccgatagtatggtggttgagaaaccctgcatttgcaacacttgaatttgaatcctggctctgccaaatgccagcatgctgatcatgagcacgttatgtgcaatcagcctcagtttccaagtttgtcaaatggggataataatagtactccccactccataggactgttggctgcctcaagaacaccagcctgtgtcaagcactagtatgagtctggcacgtgggaagacttaattagatgtcaggaagccagcctgaagcattctttctttctttctttttttttttttctgagatggggtctcatgctgtcacccaggctggagtgcagtggtgcaatcttggctcactgcagcctccatctcccaggctcaagtaatcttcccacctcggcctctggagtagctgggactacaggtgtgcaccaccatgcatgcccatctaatttttatttttattgatttatttgtgtgtgtgtgtgagagagagagactgagtctctctctgtcacccaacctggagtgcaatggcacaatctcagctcattgcgacctccgcctcccgggttcaagcaattctcctgcctcagcctcccgaatagctaggactacaggtgtgtgacaccatgccagctaattttttttgtatttttagttattttttattttgttattttagtagagatgggttttcaccatgttggccaagctggtcacgaactcctgacctcaggtgatccacccgctttggcctcccaaagtgctgggtgtcacgcgtgtctgtgtaaaga

SEQ ID NO: 3 - DNA, 4001 bp, Homo sapiens
tccaggctgattgcattctccaaatgagaggacacgagtactttctacatccttgtcctgtctccttgcgtcagtggcattgatgccactgcacactgaacttgtcggtgtctctaaaagtgatcttttagaaaatgtttttgtaacccatggggaacacttccagcagcacagagatgtattttacgaattcactaaacatctctagacatattaaccctcccagatgaggaaactgagacacagagaggttaagtaaatggtgcaggaccgcacagcgagtgagtgacagagctgggacacacactcaggcagtccggctgctgtctctgttccttattcctaagccctgctgtcagttaagcgtggcctcctcatcctcctccacagctgccctggaatcagtaggagctgtttggcttctataaggtctccacctagggttgggacattggggttaactcaggttgcctgccacaaacaagatgtcacaccactgtttccaaatccactgcaactctgggtgcatgctggtccaccccaaacccccaatccccaagccctgctcagagcctggctggcacggccactcagaaatgctgggtaaattcatgtataccaacaaaagtaagcacctaccagataccaggctctgtgagtgggactgggcttacagagatgaataaggaaaaaaacacctgtgaagctaggtgcagtggctcacacctgcaatccctacactttgggaggccaaggcgggcagattgcttgagcccaggagttctagaccagcctgggcaacatagcgaaaccctgtctctaccaaaagtacaaaaattagccgggcatggtggtgcgcacctgtagtcccagctacttgggaggctgagatggaaaggatcgcttgagcccaggaggttgaggctgcactgagccatgattgcaccactgcactccagcctgggcaacagagcaagaccccgtctcaaaaaagtaaaataaaatagaaacaacctataggtaagtcagtgcactgagggtgaaagtgtgcgcggctgaaggaggggcaggggctgtcaggccacaagcccggggaaggcaggaactgggtctgaaattgtttttgaattctcagaaaagagcccagtgattggcactcggtaaatgtttgatgctaaaggaagaaaggaagggagttagagagagcaggagagaggaaggaagaacggaacaaaaggagggaaggaaggaaggtaggaaggaaacaaggaaggaagggagggagggagggagggagggaggagggaaggaagaaaggagatagggaggaaggaagaagggaaagaagaaaggaaggagggagggaaggaaggagataggaagagagagaatgaaggaaggagggaaggaggaaggaaggagggagggagagaaagaaagaaggaaaaaggaaggaaaggagcggagaaggagggaaggaaggaagggagggagggaatgaaggagatagggaggaagggagagaatgagggaaggaggaaggagagggaaggagggaaggaaagaaggaaaaaagaaaggaaaggagggagagaaggagggaaggaagggagggagagaggaagaaaggcaggcaggctatgggaagggggaaggaacggagggagggaagagagaggcaaacagaatagcagatacagaagagacaagtctatcttgagggagtccgaagagagagagacagaagggaagtgaaagagggaaaagagggtaaggtactgagaacaagagaagaagcccccaggttacgacgtggcctgagagtaaactcaccaaagtgaccaggtagaggaatatgcaatgcaggaatctcaacttggcaggatgctgcaaggtagcagggatatccgtggtgaggaagtgctcaaagacagcccagacaaagacccccaggaaaaagatgggcaatgccaagagtagcactagccaggggacagccatgttcctggggccttgaggagctgctgccctgaggagcttgtctgatagcttatgtgaagaggacctggctgggttacaccctccgcctcctccacctcactctctctgggctaagcctgacacctgacacagtggcctgacacagcttctcagggtaagcacaaaaaggccaatgggaggtggaggaacctatttccctaagcaatgtggggacccagaaaaatcaatactgctcatcatggggagtcttggaaggtgagcttcccaaagatttcaggaagatcaggctcagatgggcacctcggctcctgggaaccctagaaagagatctcatatgggttatataggcctccagggcctgatctttcaactgtaagataagagacttcgccagctttccttgtcagagtgtggttagggtgagcacagcacgtctcaccccagctccctagctagcttccctaaccccagttttgttttgttttttgaaacaaggtctcactctgtcaccgcctatgtaccctctgggcctctggccagatcagggcaaagactggcgtgttttctggtagtcataatcttctggggtcctgggacgggagacaggaatgccattgcaggcaaaactgggctttatccagcctcatattccgcctctaaaaatggtgccaagggctggtttggggacaatttttatccacgttactttcttctaagagagaaagaaatgattggaaccatttcaggaaataggctttgagcctgaaaattttagaaattttaatttgggccgagcacggtggtaatcccacctgtaatctcagcactttgggaggctgagctgggaggatcacttgaggccaggagttcaagaccagcctggccaacagggtgaaaccccctctctaccaaaactacaaaaattagccgggcatggtggcacatgcctgtaatcccagctactcgggaggctgaagctggagaatcgcttgaacctgggagctggaggttgcagtgagccgagatcgcactactgcactccagcctgggcaacagaacgagactctgtctcaaaaaaaaaaaaaaaaaaaaaaaaaagggagaatatagaaactatacatataagaaaataccactacccttagggcttaaatagagcacccaagaaagaccccgtttccacccatagggatgagacccagctcttgttggaaagggcatagtgtgaatttgctgaactggcaaagaagttgctcaactgctacaccagggggactcactggtgtcttcctcttgacacacacactcaacaaatttgctgaaaatctgctcccttgggtgctagggaaagccatttattcacagggaggtgttttactggaggcactctgaagtgaaaccacccaaggggactggaagggaaagttattaacctccgagtgctgcaggagcttggaactagaaggcagaccccctttttcattcctattatttatgttttaggtttttggttttttgtttgtttgtttggtttgtttcagaaaacaaaagttatagaagaggctttaccccagtgagtatatgcatggcagatttttgtgtttttacgtcattgtatctttgtaagagtttacttaggtttctcttagagggttataagattcactattctggctaggtgtaattatcttttgtcgttgttgtttgtttgtttgttttttgtttttttttttgagatggagtctcgctctgtcacccaggctggagtgcagtggtgtgatctcagctcactgcaagctccgcctcccaggttcacgccattctcctgcctcagcctccggagtaactgggactacaggcgccccccaccacgcccggctaatttttttgtatttttagtagagacggggtttcaccacgtcagccaggatggtctcgatctccagacctcgtgatccacccatctcagcctcccaaagtgctgggattacaggtgtgag

SEQ ID NO: 4 - DNA, 4001 bp, Homo sapiens
acatgaaaaaatttaatcatgaggtttttttttccagttttatcaggattttcatgcaagaagggaagctcctagaagaaaggactgagtttctgattactcttaatacttggcccctggagacaacagataacttcagcaccaggcttgacagaggaaagtgacctgaggacaatggtgcttcccagacaagtcaggtttaacttgtctcttccccctgcagcctccctgcgtcctgggccagccacacacaggttttggagccatccatgcgcatggttgaagcgtgtcccatgctgctctcttttatgctggttgttaagctattgtccctcggccccacatgcaccaacctgccagggctttctcctcaggggtccagacccgaggtcaggttcagagatccagcagcagcctccatgcacgccttcctcccaagtcctaatgtcagctccacagacctctcatctatgctccaagtcttaataattcctgtctcttcccttggttctctcagccctaggggtgggagctgtgtcctgcaattgctacctccatgataccttagagtttccttttactctctcaggtaccagctctgtacttagctaacaccttttcatattaaactctaaggagaccctaactgagacactcattcataggccttcacctgttccagttggccccatcacctacatgaacttattctgaaccgagatttggaacaaatactgttctcttctcgcctaaagcaggtctccctccctttcctcctgatctctccagtggcttgcagctcccagggtcctaatctcacccctacccagcccccatcccttatcccctccttcctctttcagctcctttagtcatcggcatttgcacaactctgcaaggctgtagcaaagtgcattctttctttacagttctatagtcactccttatcctttcccagaaaaaattgcacaaagccagttgtcatttacaagtacagtcttggtgttctctgatctccggcaccttttgctcgcacttctcatggactattccacctatgctactttatgttgctcttggtctccaaacgtactttgggttttcccaggcagaacagaagccagtccagggtggaatctgtgtcgtgcttttagggctccagtctaacccaggctggtgtctgctcattgaaagagttcaggaaatgtgcgtgatggttaataacgtattgcatctcacagaatctaggacgcagtcaattgtaagacacactgttacttttctgcaccactaagaaagaaaaataatgtgtccagttaaactgtgacttgatcgtgagctgcatcccaatttcagaaatgctaacatgtgaaaaaacaatgtgcctcagagaatcaatgaaataaggcctcactaagctgggaagctgttcgagggggttcttgcttgcctttggcctgctcttcagggcttaaagttcttcccactgctcagcgtggatgccctagagagcggtagactggacaggcaggtgtaaaacggggggtgggggaggggcgggcaggcaatggattgacaggcacggtaggcaaaagattttcatgtggctgaggacagagaaacacatcttcctgggaagggcactgtcagaggggcccacagaaaggccgtccagctaaacactgcttcagtgctaatcggcgacaagcccactgactgctcacaaccccccaccctgccccaccaccctaccccaccaccccaccccacacttccaacctgtttatttgctccacacctcatttttaaaccacagacagtaactgttaccttttgccttttccgcagggtccagttcttccagagcaaaagctgtatctgtctcacgaagcccatgctaatgaccacacgaagaccagattggtcagagctgaggcccctcagacagcaaaggacataaacgccgttaagagcgcctctggctccggacgctgtgtccttctcctggtgattaaaggctacttttccccttcaaagcataatcccttttaattacacataagcccttagttggggagaggaggccgacactgtgttggctcccttttatggagagaaagagaaccctaaagacacaagtggctgggcaccagggaaattgaggtgggggatgcaatgggaaaccaagaccctcaggcactctcctccatgagaggggttcctgagggggatgtctttaggtatctttgaccttaagtttggaacaaaatctctttgcataaatataggctgggcatttgtcctcggcaagagcctgccatgagccggcagtcagggtttgactggccctttaagtccaatcgactcactcggcagatctgaagtgatccctccctcttttagtcttttatcttgctccgtaatgactgaagtcattatggtcagctagttgggttatctctgagcttagcagagggtaatgatgtttatctcttgtgctgaaattgatcgactagtagtggctgcttggtgctgtgatggaaaaggcactggaacactccaggcccagcaggacagagccgtgactgacttgcaatgtctgactggggtgcgggtatgaggagaggcagcaggtgggcccattactgtcattccagccctgcaatggggtggtgctgggttgactcatcaccaggtgggggatctgtgatcccaagggacaccccaaacagaagcctccctggcacttcgcagtggaactttttgtctctgcctcctcaaatctcagaatgtgttctctttgaaagactctagacccttgagacctggatggggcggagggagaaccacagagaggaatggatgctgacttcatagagtttgcggtctggttgtaaacacgggacttgaactcgaataactcaaggagtgtgatgagggcccataggctgtgcatggtggagcttccaagaagagagagatagtttctgcttatgatggcaaaaaggctccttggaggtgatggcatttaagacaagcttgcagaattacaaaataatattttatagtaagtttattatttataaactgcttttgcatatgttatttcattttagcctcactacaattttgtgaggtccatatttgctgttttacagatgaggaacgtgaagcttagtgagattaagtactttgctcacggtcccacatggcaacggtgggtacttgaacaagtgagtcatttaaactctgcaaagacagggaggaatagcttatcttgcccaggaaaaccacaagtgaaacatggctggagtgaaggctatgaggctatgaatggaggatgctggaaaaggagacaggaaccagactgaaaaattgatgatgatgatgatgatgatgatgatgatgatgatgatgactgattcaactgagatttactgagcacctgtgaagtgactggagtggcccacaagtgcaggctacccccaagcaagctctggcagaatcattaagaccttgttacatgctaaaggatatgggttttatcatgctgaagatgatgaaagattttaatccagtggctgccaagagtagtcagttcacctcggcagcaatgtgggggtggtttggggggagccagagagcctgaaccatgcagtgacagccatgatggagagaaggggagggactggagggataggaaggaatgagacacagcagtgcctgatgagttactggaagagggtggtgaggaagaggcagaagtcagctagatggagtttggggcttgactggctggctagtgagacggtggtgctcataactgaggagggaatgccagaggaaggccagtggggagtaggaggcagttggggggaacaggggtttgcatttgatatactgaagctgaagttctatgacatctgaccacacgtattcagcaggcagttgaatacttgggtctggagtcaagaataagcttgtgagatggagacatagat

SEQ ID NO: 5 - DNA, 4001 bp, Homo sapiens
tagtatttcagaaacaaaacagaactggatttccttacacttactttgagtcacatacagaagtggtgggcgcacccgatgatgctcagggtttctaaaggcctcactctgtgcctggtggtatggtcatttattccttcactgaaggcactctgagcgcctgctctgtgccgtgcacatgctaagaactagagacagaaagatgaatcgcacagtccccgtctcaagcagctcaaagtccagtgagagctcctagtctccaatgtttttaaaaagaggaaagagaaaaagatattttacaacaaaatctacactcaaccaactgaacaatgaaataattctctttacacccgagtgatatcaacagccccctaagctttcatagcaactggtagatgaaaagtcgccaccctaactgctctcctccactgtgcaaacctactctaaatcccaaatcactacccaggagggtcctttctaaagcaatggatttgcagcaaagaatgcttttctggtgttgcacctgacaacctcacaggccccacaggcccccttccacagcccacaggtgcaggtttacctctatacatacgaatatttcatagatgcttctccccactaacctagaagccccagcagaagtgaggaccatgtttccttgtgcatgccactgtaaacccagggcccagtccagaatgagggctcaacagatgtttatagaaggagtgaagatttagagaaatcgaaaaaattttagatcttacaaggcccttgcatctaaacactcctccaattatggctaaaaaatgaggagctatagaaaactgtcctatttaaattttgtttctaaaaacattcattttggcttcttttaaaaaagttactcaattactgaacagatcactggtgtggcctgttgaacacagtgctgtaacttcctgcacaagagacaagtctgaaagttttgctttccgctgtgaaagcattggtgactgcttgacagactcgcttgaagcaaataatgtgtttttggttaaaaaaaaaaagtataaacgcctaataacaaaataggcatatttttggctagaatttttttttccaaggaaaaacctccagctcattttgctgcctaagccaaaacagatgctcccactaagttggtggtggaacagacccaaagattccaataatgacatatataacgtgtgtcaacaagaaaacaagtgtaaaatctgcaaacgagtccccagctaaggcgaaatcttgacaacgctactctgaggtgagcgatcccctccctcctccggggttaggagtggcccaggagaggcggcggtgacacgcgctctgcggcccggccgtgtccctctcggcgccccgggaccccgcgtgtggagaaggagaggcccggcggagggaagtggccggggaggaccctacctgccagcctccggcgctcagggtacgccagccccaggagcttccgggcctccgggagtccggccgctgcggggcgcagccgccccttgtccccgggaggcgccgccggcccgcgccgccaggcctcgtcccctgcccaggcagcggctgcgggaccgcccgggaaccgggcgcgcgggagccgaggagcgcctggcccggcaaaagccccgcacctgcagctgccggggccgcgagcccacagccccaggagccgcgcgaggcccaggacgccccgcgaggcgcccggacccccgccccggcagccgctcctccagcggcgcgcggctccaacgccccagagcagcgcgggccccgcgccccatagccgcgccggcctcaggccagtgaacggcgatagggacccgggaacgcggctggccgcggcccacacgcaggctaccggcaggagccgacctggctcggcagggctcggtggctcgagcagccgcagcggccaggcaggggggcctcgcatggcgctgcgtgcgacccgtacgcctcagcccgccggccaggcgcgcgcaaagcccgaggaccctcccggcccggccccgagcaaagggcgtggacgcggtggcgcccgcccctccccgctggctgtcacccgccttatcgtgcctgcaccctcgggctgcgcccgcccccgccccatcctcgtccgcgcggtgccgcgcctctccgccccactccggggactgcagctacccggaccttgcaagccacccttccgagcgcccccaacccgctcgggtgccctccctgcagcgcccccaactgcccgctggcggaggagcgccgggcgcgccagctgggacgaggcccgggaagcccaggagcacggctgcgcctgcgtactgggcgcagggaactttttcgcgcttcgccgtcccctctggtctgaacttgggaacgacacgagctctttctcacgccggcagaccgggcggagcgcgcagacgcgaccacacgatggccggcacaaagatggggcgggaggacagcgtgctggatacggcgtggggcgggtccgcggcccgggagacccatgctggggcggccctgtcactcgtctcgctgccaagcacagggctgaggtgcggagggaccactgagaggacttcgctgcgtgtcagctcagctctggacggcgtggaggaggtggttggcgaatagtgaaatgtatataactttgagaagggaagagatcgtttcttttttttcttttttttttttttcttgagacgatctcggctcactgcaacctctgcctcccaggttcaagtgattctcccttctcagcctcccaagtagctgggattacaggcatacgccaccacacccggctgattttgtatttttagtagagacggggttttaccatgttggtcaggctcttttcgaactcctgacctcaggtgatccgcccgcgtcagcctcccaaagtgctgggattgcaggcgtgagccaccgtgcccggcctgagatcgtttcttaactagagcagaaatttgaagacaggcgtggtcgaggcattcccgctgttcgaagtggaaaacactaatcagaaggcaatgcatcttaatacacgtgcatggaaagacaggagagaacattaaaactcactgggacactttatggagacttcatgggggcggggggggatatgtacctgaggtccagtgagtcgtgggtagatttttgtagactcctaggtatttttactggacctggacagggtactgtcagttgcaaattttatgggttcacaaaataaaaaaacctcaataatcaacataaacattttagtgcaatatttttaaaaatcaaaattaatttaaaaaatccgtaatgaacaaaatataaaaaattttgattgagtatccactcctgacctttcacaatcctgcctctcttctctcgctctaatcccagccctggaaactttatttacaaaaactgacagcagctgcccttagtttggcagctggaaaatgggaaagagaaagtaagaggaaggtgagatttgggttaaagttgtcactttctcttcaactgggagggtatcaatccttgatgtttctttagttgggctcaaaaaggaggtagcggccgggcgcggtggctcacacctgtaatcccaacattttgggaggctgaggcgggcgaatcacgaggtcaggagttcgagaccagcctgaccgacgtggtgaaaccccgtccctactaaaaatacaaaaattagccaggtgtggtggagcgtgcctgtaatcccagctacgcaggaggctgaggcaggagaattgcttgaacccgggaggcggaggttgcagtgagctgagatggtgccacaccgcactccagcctgggagacagagcaagactccgtctcaaaaaaaaaaaagaaaagaaaaaaaaagaggaggtagcggccaggcggtggctcacacctgtaatcccaacattctaggaggccgaggcgggcggatcactccaggtctggagtttgagaccagcctggc

SEQ ID NO: 6 - DNA, 4001 bp, Homo sapiens
attattttacttctatcgctactatttcccaatagattctgtttaaaatttcccttagcaataatctatggtcttacaaactggtttagtagttaggtggactgtgactggatgggggcatgaggagaatttctggggtgctgataatgttctgtttcttgatctgggtgctgattacacgagtgtgttctacttgtaaaaattcttcaagctctatgtgtactatatgtatgtggcatgtatgtgatactatatcacatatacatataatcataaaagtaatccagaacttgtagggctgtcctcgagtcccctcctccatattaaaacacctgttctatgccctgaaacacttctttgcaaaaacagaattcaagttaaaggacctaacatcttctttctactggcatgttcccaggtaacaggtaacttctatttgcaactgggagttcatacaaaccaacagaaaaacttgctttttattttcccaaattaatccttttaaaagcaaactgaatagaagaaaaatgagtaagcgctgttattgcccagactatgctgcaaatcattttcaactctgttaaatggatttaggaaggaaaagaaagatcatcacttcagactctagtaagataaaaacagaaggcggctagaaagaacttaatggaaagggtactataaactagaagtctatttgtgttttagcccaaattttactactaattagatattgtaggcaaatcaaacacgggaggcaacagtacctgctcagaggaatgaatgaaataaaattcatgaaagtagtatgtcaagatttaatacgaaatattcaatgactggcaagaacgcttgggaagtagccttttctctttcacttgtccagcaaataaaaattgcatgtatgtgacatacatacctgtatgtcgcaaccgtaattcagctctctcttttttactttttctgaactgataacctcccaaagttaaatctaagcactgaaattctcccgcggtggaagcagtggcgtgtcattaaaaaggagcttgatcctcacctaaaccacactctcatctttcacctacagagcccaggaaggaaaacatttccctctaagtccgacagaaccgatccagcctttccggatgaaatgccaccgaccaaatgttcaccgaccaaagggttcaccgactccaagggctcaccactttagacggcaatcctgccaagtggaccgggaatagtttcatagaagccaccctcgcgactttcaatagcagttagtcgggaatcgagccaaacctcgtccaagtgacttagacaccagcctccagcctggcgaatccaatccccatcctcaatcacacatccacgtccccaaaacaaatccttcacggtctgaagatgagatggcaaaaccagaacacacccagaaagttgacacagaagggggtgatgtagggaagggggtgggggacacaccgcatccccctcccacccccaactggaggccgctgcctgagtgctggctgggcgccggttcgcccgcgggcacagaagaattcgcactcccggggtggagcgaggtcgccggacaggccagctgggaccgacgccgtcgtggcggggactcgcggacaccctgacattgaagtcccacggcagtcgcggtcggccctctctccgcccgaccccgtcgggcaaagagacctgtcggccgggtggggagagagagcgcgcggggagcgcccgctccagcccgggaaagctgcacggctacgggccttcttacccgtgcaggccgagggcgcggcgccgcttgtggagcaggcagagcagcaggaacgcggcaccagccagcgaggagtttcgcgccgtcaagtacttgctgaaggccgccatggcactgccggtaccagcgagccggcgaggggacgcggcggcggcggcggcggcggctaccttactgcacgcagcgcgggggagactgggaggagagcagagggcggggccggccgcgcaggaccgccccctggctcgcgccgccgcgccgcccgcgctctggagcccactttgtactttggcccggcgggagcgcgctcggcagcctccgtgggcggaacagttcccgggacgcgctctgcgcacgcgcggactccttcagggtctccggaaacgcggcgcggaggagctgttgctactcagccctgcgaggcgtcagtgctgcccctgcctcacccctaccctcccactcttcgcgcgcacaccccggctttcacaataactggatgagcgggcctggcctgcagcgacgacctagtgggccctgcctctccactcccgcggtgatgtaccgttaccaccctcttaaaggagcccaggaaggaggcggacggccccgtcacagagcgtgtagggaaaacacagcacagtgattatcaggacgaaaccaaacaatcggaactccgcagaggtgtagggagatgtgaggagaatgacacagatcaaagagctttttccaagccagtattttccaaaccgcgggttataatctctagcgcattgtgaaattggtttggtagatcgggatcatcaccctccgtttttaataaaattgagaatagaacaaaatagaaaagtttcacagtacatcacgtagtaaaggagttgtttagagaaatttcgatttcagtgttttgcacgtatgtatcgccagcggcgatgtaaaatgtatgcagatctggtcagaaaaaagtttgagaaacactgttctttgcaaagggacattcagaagtaacaatcgtgcgttgtattaatgctggcctcactcccagaatcagaagggctttgcagattacaacattcttctcctgtctgaccctatgttgcaggaattgttatcgccagcattgagcctagcatatatacagtaacagtgaatcgctgttttcagctgaggaaactggagaaaagcaagtgtgtcagaaaataagctcataaaacctcgcataatgcacatacatattaaagtagcctacaaagtagtggtgctgtgccctaggtgttttctcaatataaatgagctgttgcctaatacaggttatgaggatcacaaagacgaggtacaataatggcatgcgtatagaggtgctcaacagtgaattctaaattatgcagaactgaagctcctactaattcactatttgtcatgtggacattttcattacctggagggacaaaaggttttggccctctgaaagttaactgaaaaccgctgacataaggcagattaatagaagaaaaaattaataggagaaaaggcatacaaatttaatgtgtatacatgggagcgttcagaatggagacccaaagatacttggaaaattgtccatttttgtgtttaggttcaacaaagtatggacagctatgtagaaatgtgattggacaaaaatggtataatctaatgctaacagactgagtggggacacccagcaaggcctgtctagattcttcttggccttctgagcaccattccttccttctgggtatagggcaggaatggaatggagctcttaacagcctacagtcaaacaaggcaggtcagataatttctttatggccagattttacagaaaaagggggagggaaaactagcaaaatatgtttaggcttttatggctggctttaggggatagaggttctggtttctacatcttgtcttgaggaatagggatcctaatatctatggctagcctagggaaatacgggactgagagacaggagggccagagtagggcagagaacttttgctactgagaccttcattttggagtattgtgttgtgagccccaacgacctcacataatttacgtaattaagtatgcctggcacagataacacaaggatgaacagatcatggagatcatattctccagaggctgttagagaagaaaaacgtgtaaaaaaaatcaagtataaatgtggtaagtactatattagagata

SEQ ID NO: 7 - DNA, 4001 bp, Homo sapiens
aataaagattagctcatatatcaccttcataaagtgttcatatacccgaaagagacactcaagcacatcttcaataggagacatgtggccaggcgcagtgcctcacgcctgtaatcccagcactttgggaggctgtggcgggtggatcatgaggtcaggcgttcgagaccagcctggccaacatagagaaaccccaccctactaaaaacacaaaaaattagccgggtgtggtggcgggcgcctgtaatcccagctactccgaggctgaggcaggagaatcgcttgaacctgggaggcagaggttgcagtgagccaagatcacgccactgcactccagcctgggcgacagaatgagactccgtctccaaaaaaaaaaaaaaaaaaaaaagagtttgggccaggaacggtggtggctcacacccgtaatcccagcactttgagaggccaaggcaggcagattacctgatgtcaggagtatatgacaaaatcccaccaccaccaaaaatacaaaaattagccgggcgtggtggtgcacacctgcagttccagctactcgggaggctgaggcaggagaatcacttgaacccgggaggcagagattgcagtgagccgacatcccgccattgcactccatcatggggaccaaagcgagactctgtctcaaaaaaaacaaaaacaaaaacaaaacaaaaaaacaagacaaaaaaagtttggagacaactattctaaaaatacattgacaatgagatcaaaataataggtttcagactacagggagcatacatacatgtatgtatgtatatgggcacacgcacacactacaaaggaaaacttgttcatatcctgactgacgtcctaaccatgcccaccaacctctagcccttgccagcaatctcagaattgtgtgtcctactctgaagcatagtacagaggctttggcaaagcctttcatttctagtaaaaacgaaatacaaaacaaaataaaccacaaaagcatgtcaaaagtgataagatgatgctaacttcatcttccctacagaaaagcatttgacactgtccacagttcactatcctgacactgctcatcacctaacgtaaacacataccttgtactccacaatctcctgaaattcagttcccatttcccaatcccttaggatacaacccatttccccttcactaacgacgggtttatgctcccacctctgggactgagctaatactgcccttcatccttccctctcctgaagctgccattcactttctttctgcagccgcatagtcccgtcccagagtagaggacagaccatccagggtccccaaacccacttctctttccttctccgcccccgggatctgccagccaggctagagacgcgaggggggaggggtgtgactcgcctcccaggactggaccagatggcagcggattccgcccccactctcaggcaccttccaccctccgacccctcgggcagcccgtccgccacccaccccgccccgaccccacccccggcctcccccacgctctcatgccggctcccagacacactcaccatgctgggtgaagatattgaagccggtctctgtggtgcgccccgccgggtcccgcctgcggccggagggcctggctgcactgctgccccggatcccgcggggctgaggctgctggagccccggagcttccccgacgcggcccacctgctgccccatccctgctctcgcgtactcccgcgcccccgccgacccctggtcacattcctcctcggctccggcctcgggctcctggcgctgctccggtctctccctcccagcccaggccctggccctgagtggctgggccaccggcggctccgcacccggcctcctcacggcagccgccgcgctgcctccaggcgactcacagattctgcttttccctcctcctgtcgcggctccgcgcccccaacgccgccgccgccgccgccgccaccgccgccgccatctttaaaccaccgagcgctgggaaagcgtgggacagagcgtctcccgccccccgccccccgccccccgcccgccagtcacctccgccgcggggaaggagggcttcccggctgccgccccgccctgccgcgccgcgccccccgtccccgcccccgcctcctcgcagggtgggtcccccagtgcccacctcatttgccggccaccgctgcttgaggtctttcgtcctccgcgtcctgtcgccgcacctcggcgtcccccccctcaatccgcctcagccgaccccctcccgcgttcggctccacacgctaccgcctttggggttggtcggtctccggccttccccatcccacctccacctgtcaaatgagtgagtcgagggctcagtgccaccgcgtgcgcagctcaggtgcaggcacaggtggggcagaaaagcacaaggcatttatttggtccttgccatccagttaaggagctctaaaatacccagggggatctcttttaaacacccttgtcagcagcaggcctccagtaaaaattaaaatggtataaaatttacaagaagagagtaaaatgctaccttatttgattttaatttttggagattatttcatgatgttaaatcgcactggcctggattgtgtgccttctatagtctcattggggacgcaattgtagccccattcctcatattatattaccatgaattcctcttgaactcctttaccatctcaccatatgtgagtttctgtttccttacaatgcctgacagtaaagttaatcttcccactggcatcctttatacactgtgcacgtggtcaggtcttcttttgatgacaaaggagaaaaaatatatatctttgaccctgtttctgagtcagaacttactcattttagcttatgcagtctaaagagagtgaatgaggcagaaaagaagcgttttatacatacacatatactatatacaattgactcgccatccccctctcccactgtgtttacttgcatcttaattcaattttttttaattctcaaatcttgatcattctcctgttattcttttggcttcccaatttgctttataaaaagtatcagttaatggaggtactacactgaaattttgcttaaattagacaggacgggagccactgcaaagaaggaacaaaacaaccactggaaatgtagggttgggagaagaggtggatgaagctctcctttgcatatctttcctgaaccaggttgaccttagatgaaccatccactgacgtagatattgcctgttgtaaaagcactatgaaattattccattgccatctagggtgtagccagaaataactgaaattaactccaaaatgggaacggaaacactatgtgtaaacactggataaaatatgaactttccatttggattaaagtttccctgtgtttaaaatacctgtcttttcttctaattcccagtgtttgcaactactgaaaaaaattcattcgaaagggataaagatgtcacagagccggaatttggtttactgtttgatttttattatgggagaaaattttaatttggggataatggtttggtttctctgctaattcatgcatactatataaagatagatgaatatatgggttgaacatctcaaatctgaaaatccaaaatgctgcaaaattcgaaattttttgagcaccaatatgatgccagaggtggaacatttcacgtaagtacttaacataaactttgtttcatgcacaaaatttttaaaatattgtattaaattgcattcaagctatgtgtataaaggtgtatatgaaacataaatgaattttgtgtttagacttgggtcgcatgcccaagatatctcattatgtgtgtgtaaatattcccaaatctgaaacacttgtggtccgaacatttctgataagggctgctcagcctgcagtagagtgcagtggctaagggcaggggctctgaagccagactgcttgggttcataacttggccctgatacttatggactatttga

SEQ ID NO: 8 - DNA, 4001 bp, Homo sapiens
tgggtgacaaagcaagactctgtctcaaaaaaaaaaaaaaaaaaaaaattaagtattggctgggcatagtggcacacaactgtagtcccagctacccaggaagctgaggtaggattgtctgagcctgggaggttgagcctgcagtgagccaagatcacaccattgtactccaatctagacaatagaacaaaaccctgtctttaagaaaaaaaaaaattagattaataggaattctgcactgatgacagtagagtgacagactgtcaatacgcaaggacatgtttataataaggggaaactctgaacccaaaagaggactcttaaagacaagtcaacttcctgaaagttgtgttatctgacaaaaggagaaaacagaatgagatctacagcacgattttatgtaaatttagaagatatatgcaggccaaacaatattatatttctgaaatatgtaaagtaataactataggataaaagtaatttttgaggccaaagtactaaaagaaccacaacttagaaaacaatccttcttattccccattccccttcttcccgtctctggttttacggtctttttggttgagtcaaaagatcttatttccttcctttcttctttcttcccactcctcttttgttctcaaagaacttagggtcaatttcctgcacaatctgtctgcacaggatatccacttaaacaccattctacccattagcaccaaacaaaaggaaaactttttcaaagagaaaaacaccctaacatttttctgaagctaagaacgaacatattttgaatcataaagagtaagggaactaaatgagggggaacaagataagggataaaggcaaaaacaaaagaaaacaaaagcctgtgggaagagcaagtaaatgtcagtgttacccagtagctatagtctatgtcactttcctcattggttaagacagacatgtctggatgattcagatgtactgtatacgcccaaatgcaagtgtgtgggctgggaatggtttatttttgaacaaaatgaaatgactactataaattaggtaacttagatatcaagttaacttatcttccattattcactgctatagaggtagatcagagatttaagatgggataagagaagactgattttcactcacatgtaaagaacctagataacagaaatatattatcacaatttaaaaaaggcattttttttctattgctacagttgcaggctacaacaaaaataaagcaaaacagaatagccacttgtacaaagtaaattatcatgattgaaaaagttaaaacccaaaataataaaactgaaattgagaaaattcctaagcttcatgtttaattttattaaaaatacttttcaccagttagtcattcagtaacttttatcagtttaattagaaatttgtcaggtagtaataggagaaattaatattacaaatttttagtttaggcattttcaagtattttataaacattatcttgccagaattctactttatctgactgtatattctctaagaagctaataagttttaataacttcttttaaaaattatgtaaggtaaattattcaacagttttcaatatagcttaagttcttcacatcaagccatctatatcttattattacaaaatactacatattatccatacattcttccattcagtatttattgagatcctactatgagatattcccccaagaaagcacacaaactttcactgaccaagaatgaagacaaaaacagtagcagataagatgaattttttgaaatcttcattcacacttgattaatgtggttatcaagcctccctgaaactatcaactctgaaccatacctgttaagtcgggtagagcagattctgaggcctcagtgcacaggcagcaaagtgaagtgtcctgatctctgccataactattaggtggaaggagaactgtcccaaggaccatacctctgcccagaagcacaaaagttaaactgttctgtgtaaagaggaagtcttagaattccattctctgacaagcaataccacatgcatgtgacatttactcatgtactcagtggccagagggaaccaataaaatggtgagcattcacaattcccaaagtgggtggagagtgacctaaaggaaaatttccagcaatccgcaaaagactgagtcagaatggagttacttcaaaatctctgagaacacttttaaaatgtaagtaaaataaaaaccaacatatatatgtataacaaatagcctaataataaaacaatgtagaagttaatatatctctattttatagggagatgatgaggtgagactagagagaaaagtttccttggagaaaatctgtttacaataaaacacgaaatacacttttaaaagaaaggaaacgcctaacaagactcatcttttacatcacttaaatagttcaagaaaccacaaagccaaagtcaaagaaatagctgtgatctgattcatgagcacagaagccaagaaataactgcctttgctaacaatctggctctatagcttaataaaggttaaaaacatggcaatatagtgttgaaaacttttgagtgttaaaagtttatttacttatttatttttatttacttatttattttttgagacggagtctcgctctgtcgcccaggctggaaggcagtggcgcgatctcggctcactgcaacctctacctcacgggttcaagtgattatcctgcctcagcctcccaggtgactgcgattacaggcgcccgccaccacgcccagctaattttttgtatttttagaagagacggggtttcactatgttggccaggctggtctcaaactcctgacctcgtgatccacctgcctcagcctcccaaagtgctaggattacaggcatgagccaccatgcccagcctgagtgttaaaagtttttaaagcaaaaagcccaatctttgttaataaacaggaacaaagttaaagaaaatttaaaaacctgaaaatgatagtactttatgagaattaaactagtaaaacctacaaataatacatgactttaatgtatgatctacaaaaataatattaaagagcgtttgtaggccaggggcggtggctcacgcctgtaatcccagcactttgggaggcagaggtgggtgtatcacaaggtcaggagatcgagaccatcctcctggctaacacagtgaaaccccacctctacaaaaaatacaaaaaattagcccggcatggtggcgggcgcctgtagtcccagctactcgggaggctgaggcaggagaaaggcatgaacccaggaggtgcagcttgcagtgagccaagatcgcgccactgcactccagcctgggcgacagagcgagactccatctcaaaaaaaacaaaaaaaagagtgtttgtttaactgtgtatctgagaacactcattcactcaataaatatttattaagcacctactatgtaccagcccctgttctaggtcaatataagtaacagggtaagataataggatgacaggactgaaacagccttagagaaaattgaaaaataaaatggtaacttaaccttattagagaaagaataactttaatgtaggtaattattaactatttaaaataacaaagcttatgttttcaataaaattatcctttataaagccagtactttcaacatcaagggacaaataaaagagttagatgactaaaggttaccacaattatgactaagaatttcaaataccagattgaatatctcattctccggattatagaaaaaaaggtatgggaaaggatcttcatcatccacattctatccatatgtagactctataccatatggtttactatttaatcaataaatcttctatttaaattaccaataattagtagttacattttcaattacttatagcataatttggaataaagaggagataaatggataaacaaaaggtggtctatacatataatgaagtattatttagccataaaaagaatgaaatgttg

SEQ ID NO: 9 - DNA, 4001 bp, Homo sapiens
acccaggctagagtgcggtggagagatctccgctcactgcagactcagcctcctgggattacaggcatatgctaccatgcccagctaatttttcctatttttagtaaagacagggtttccctgctttggccaggctggtctcgaactcctggccttaagtgatcaacccgccgaggcctcccaaggtgctaggatcacaaccgtgagccgccgcacctggccaaccgagggaatttaaatagggaaaaagtcacttcacatgtgactgttcaggaaaatatgttacatagaacaaagtgcaaaggttgctattaccagaatacaatgcccatcaacctgttaattacataacaaagttagccagttaattagagaggtggtttgcaaatagaaaacagaaacagcacgggatctggagttataattgctgaatgtgaatctaggttccacaaccatatttgtggccgtagacaggtttacaaactgcttatagcttccgttcaaaaccaaaaaatgggactaatctcactgcgtattttcggacgattaaagtacgataatgttttgaaagcctaatgctatataactattggttttattacttcgggctctctgtctagaacaatgaaattccaaatatcgaaacagcaccactagaattgaacacttttgtgcatttcttgggaatataagagtgtcagttttatgggttaaagaagagaaaaagggtgtaagttttctatatcaggttttttttagatccttccttggaggttgagaaatctgcttttctggtgtaggagttaaaaatagctgaaatctcccaatttctgccttcactgcacattaacttgcataacaccagcaaaacatgggcagcaattctttaggattattctaaaaccgcagcttttttggtccaagacataactttaacttaattttaagtgacatctaaatggcagtggtgtgaacatatcaagaatatttaagataccaaaattcatctagtgacaaacttatttagaatctattaagatccaatactagaatatacacacaagttcacataaaattctgcaggttttttttttacttttttttttcccgtaagcaacgtggaaacgttacaacgaaaagcttattaaacattaagtatttcaaggagtagctgctccatttttctttttcccgtggttctgacacagagacggggtcactttggaaaaaggtgggattcccgcggtaaatatttggagggtttaccagagaaagaaaaacgatattctaaagagaggatgccggctataacggggtcgcctgacgggaggatacggaaaatgaaacgctaggctacgttccgtccggtggtaggaggcgtgaaagcaggttgggggcccctaggctggctccttcctcagcccgacttcccactcctcccggccgcacctatttttggcccagggccccctgctccgacaccacaatacccatgttccagccccaccgcaccgctgggctccctctcaccctgcagcatcgcccgaaccccgctgccatgttggctcccgttccggccactcggacaataatacacgggtcacggccttgacatactccccgaacgcgggactcctctggtcccgcccactggagcccgtgggcgggatggggcggggcgggaagaggcggttgggctgcggaaggacggggcgctgcgctaggcggggtggcagcggtccccggcgccgggtagccaacgcatgctccgtgacccttgcgtgcgccgtcgctgcgacctggggaggggtcgcatcccctctccgggcaatctctgatagtcctggtttggttttctgcgtttccacctctggccctctctgtgggacgccgaggctgaccgcagcgcggaaagagagccagggcgggggagggggacggcggcggggctgggagggcccggttgcgctgaacggtggggggacttgcggcgcggtgcaggacgggaacctgggttagagggcgtggctggggcctggagggagagcggcccccgtggtcagccttcacctttacccggagagaacggtcaaacccagatcgtgtctgcttggcggattcaaagtattagtacattttgctctcaaatgccctacctaaagcgaaagcatacttgtgtttccttaaaatttaaaagagaatttaattgtttaggtaaatttgacctttccgcgtattcccaaggctgtttatgacttgtccgctgatgtggtgtccttggatatgcgggtgcaatccgaggctgtccaaagctcctggttcagcgaatgatggaagtgaatgtctccctgaggaattctacctggagtcactttctcttccagtgagaccctgagttttgagatggtagcttatactaaatcttatactaacttaacattttcttttgcccaataaaggtcacccataaattcatctaatttagctgttaaaattctatatcctgttattgtattcccctactttgtcttctgggaatttatagtgtgttagtcctaggtacaaggcagaatgttaattaagcgctatattcaaagtgaaagtaccaggaaaattcggaaaagggataaagagctgagtttgtcctggtataggcaagaaagccttcaaagtggtggtggtaagtaaaacacaaagcggactcttaaagatgattaggaattgtctattcatgtctcctttgttccaatttcttattctgaacattttaaacacagaaaagatgaacgaaaagcacaaaatcacccatatgcctattgtaaccccttcttactgtacacgtggctggcagagaagcgaagatggagccctcatcttaaacatgtctagtcggtagttcctgccaccattcacccaagcaagctacccccttgtttgtctgtgcctgcagctcgacttcacaggctgctcttagaaaaggatttggggctgcttttcattaaaaagaaaagccttactgatgttgggaacgggcgctcagtgttgcaaaaatcaacactgagacaaaggagctcttagcaaggctagtttactttctgcagaaaggttgccgctcgctagtagtcttgccacgagagcacacacgcataaaggagacagggtcatttataacctgacacgtgcaccctactaccgtgtccggtttccattggctggaaggggacctctgtacttgtcctgattggctagcaacttagaactttccaaaagaggcaaagacagaggagaacaaaggaaggaggaagcaacttgtggaatgctgagaaaggtaaaaacacctccagataaggaagaaaacaggctatggcctaatgcttccttggaccagtataagcatgccagggcaaatatctaggctaaaatgtggcagctaagagcacaaagtacattgatttctttattacggccaacagatatcaaagaatgttagtgtggccaactgccacggttactacttgagaccatcgttacagcagttactactgttactgcttgagaccatcattgtgagatcaaatgaagggacgaacgtagaaatgataacttaagacaaaaggaactgttttaaggaaagggccaggggaagaagaagagagctccctgcttctcgtgagcaaaggcagccacagagcttccacagcccttcctattttttgggtaacaggagcagggaggaggtggtaacgattggtcagctgcttaattgatcacaggttcatattgttactgacaggcttcaattatgcctaatcataagaaacatttgtgcctagatcgtaactaccctcagcagtcctcctgggtggcatacgcagtttgtcagttcgccaacgttctgcatttatgagaaacagtttgctgcttactcatatagcctccagtgatatactgagttgatcacgaacctcattgtttcggcctccaatatgttagcacagttc

SEQ ID NO: 10 - DNA, 4001 bp, Homo sapiens
ccccctctcccgggctggggcgaccaggctccacgttacagaccacatcttcccgcccaccctgcctggccccccaacctggcggtaggccaggaaactcaagttacgcccttagggcctgcccccaggacagcctcagggagcccctcgaaccccagttaaatcacagcctaaccccaaaacccactgggccaggccattctcatctccccactccagtccatgccccacaggggtgaggcactttcccagggcagtcactctacggcacctactgcagccccacagcccccataactggctcctgtaacaggctcccatgagagccggttaccagagagaaggcccagaggtgagtgggttccagcacccccacacgactggaagagggcagtacagggccgtctgcgtggaggaggaggtccattaggcttctgacggaggggccagggagaaggtgggtgcttcagccagggtccagcccccagcagggaggccatgcccacacctccccacagcccgggtcctcaatgcaggatcctagggtgctcaagttattcaaccccttttcccaggtcagcaacagaagatgggagagcagaggatggccccagttcctctgcccagggctggcggccactctcctggctggccctgagcctcccactccaaggctcctgagcctcctggtgagggctccagggatacagaggctccccgtgcctccacacacatgctgacttgccagcagatcccaagagacccagcgcgcgcgtgcacacccacacatacacaatcaagcacacatgtgcaaacatgttcatgcacaaacatgcctgcacacactggtaccacacatacatgtgtgttcaaggagacactgcacagacacgcatcaacatgtgtacctagtgatggaacacgcgtgtacaaggtgatgtgtctattgctgacatggctaacacagtacgtgaacccacacagacaggtggtgtgtgcacacgcttgcgtgcactcatcggcaggctacatgcagaagcaagcacagccccgtggcacagctcatccacacgtcctgtgcaaggcctggtgtccggagggaggcacgcagaggggcaaagttcacaagagcgcaccccgcacgagctcgtgcagaggagggggcctcacgcaggtgcgcacttggggatgcagagaggtttctttgcctccattgtcgtttgccaaatgtccaccaagcaaagccgatgcacacttgtgcacacgtctgtgaacatgtagttcacgcaggtgtacacgcctgcacgccacgaatgatggaaaacatgcagactcggtgtgcacacaacccctaccccctacctgaccttccccgccgctcttctcggccgccacccctccaagcccctgggtcattcaaaccacttcacgtttccaagcaccctaccccaggccttaaacgcggctccagctgcctgttccccacgcgctgctctggacacaggatcaagtcagagaccaggggccgacgcccccacggacccagacgaccctggccagagctggactgcagggcccgggaggggctcagcccagtggaggtgcagacacagagcgggggcggacggtcccgaggtgcccacggctgcccacgcgcacgccctccacccggggcggccgcacagggcaggagcgtcttttgttccaacccccggggcatggcggggcggggccgccgctttgtccgaggccggtcctccagcccctccccggcggccgcggcccggcccggcgctgacctccccaccccgccgccgggcacaaaggcgacagcgacgcccccggcctgcgcccaccccggcggccccgggcggcgcacctgaagcgcggggagtccttgacgcactcctcgaactccacggtcatggctgcggcggccgcggcgctcactggcacgaggaccgcggcgccgagcggcagccgcgccggcccggaccgctcgtcccgcccgcgccgcctcggcgcccgcccgccccggaatgaggccgccgcgccgcgccccgccccgcctgtcaccgccggggagcgtcgccaaagtcagccgcccgcgcgcaccgcccgctgtcactgccggggagcgtcgccaaggtccgccgcccgcgcgcgccgcccgctgtcaccgccggggagcgtcgccaaacgcctctcgcagcgtccagggaccaccccggtccggaagtgaggcggggcctgccacggccgtctccggggacagtcggtggaaatgtggggcgcggggagggcgcggggagggcgcgggcccgcccgctccaaccatcccggccgttgcgcaactcagggcgtttgcaaaaaccacgtctgggaggacttggccgcaacgcggcgaacgggcgcgctcggggagtgtgggcggcggcgaatgaatgagcgagtgaacgaatgcacgcccgcgagagcgcggggtgaccgcgtggttggtgcgcgcctcccggggcgccgcgatagaggtagagcgcctgcgctcggcggcgggccggcactttgcagccgctccctaagcccggccccgcctccgctccccgactctggccgccgtggcgcggtgccaccgcgcaggcgcaagagcggccggggccgggggggagggggggggggcgtgaccaggccgcgtccgcgcgcgcgcaggattcctgcgctggaggccgcctctgacgccaccggctgggctccgccatgagttcggcgccggcctcaggctccgtgcgcgcgcgctatcttgtgtacttccagtacgtgggcaccgactttaagtaggtttcccaggcgcagcggcgggcgccacgtgggcccgggcggaggcgggaaggagggcgcgggcgggcaggcggatgtctctggacgcgggttccaaacgttcggggaaggaagcggccctggcctcagacggcggcggagaccccagggcagggcgcccccggtaacctccgcccgcttctgcccgcagcggggtcgcggccgtcaggggcactcagcgcgccgtcggggtccagaactacctggaggtgcgctcagccggtcacgggacgcccggtgaggggtaagggggaggctcccgcccgcgcgtccccggggtccggcctcgctcacccgcccgccccgcggctcggtcctgcaggaggccgccgagcggctgaattccgtggagccggtcaggttcaccatctccagccgcacggacgccggggtccacgccctgagcaacgcggcgcacctggacgtccagcgccgctcaggccggccgcccttcccgcccgaggtcctggccgaggccctcaacacacacctgcggcacccggccatcaggtgagcccgcgacctaagcagccctggggctgtgccttcccgactccatctgtcgcgggcggaggctggagatctggacagacttccttgtctggtcggagctcgagggggaaggagagccaatgtgacaccgcgggcgggcggggtcgttcctccggtgagctttacctgccgccatagggtcctgcgggccttccgagtgcccagcgacttccacgctcgtcacgcagccacgtcccggacctacctgtaccgcctggccactggctgtcaccggcgtgatgagctgccggtgtttgaacgcaacctatgctggactctcccggcagagtgagtgtggccctgacagcggggagggggcgggcaggccggccccaccctcctgacggtcaccctggtccctgaagctgcctggatatggtcgccatgcaggaagccgcccagcacctcctcggcacacacgacttcagcgccttccagtccgctggcagcccggtgccgagccccgtgcgaacgctgcgccgggtctccgtttccccaggccaagccagccccttggtcacccccgaggagagcaggtgaggaagggcccctgggctgtggccctgccctcaagt

SEQ ID NO: 11 - DNA, 4001 bp, Homo sapiens
aatttcactttgtcgcccaggatggagtgcagtggcatgatctcggctcactgcaacctctgcctcccatattgaagcgattctttttttttttttagacggagttttgctcgtcgcccaggctggagtacaatggtgccatcttggctcactgcaacctccgcctcccgggttcaagtgattctcctgcctcagcctccctcagtcctgcaacagagcaggactccagctcaaaaaaaaaaaaaaaaaggaattagttcatttctactcttactctctgctacaatatactttactgaaaaataagttccaagaataaaaatttaagatggaatgtagctatatgaattgtacagaaaccacctgatttttatcaagtggtaatatatcatcactacagcaaactctaaattcaagccggtgatctaaaagtcaaatgatccaaaacccattagccattaccaattccccaagctagttagtacacagagggctcaactcattgtgcaatgaccacgaatatgtcattgaatgtgaaatgatcaaatgttctggaaaatttataaaactttcactagtttgcacaattaaagttattttgagagaaaacaacttccgtgtgtatcattacattgaactactcaactttggctagtaaaatatgtactccaaaaggtactccctctggggaaagtgtcataaatatgctgctctggaatgtacgtggaacctagcaaccacttttaaagttgcatttgctgatgtccctccctgtccattcgccctacaagactaagtatctttaagaatcaaactaacgggctttcatcagtttttcccactgacaaaaatcatgtgattggtctctccaccattcgactaagtgaatcacccaattaaaaaaaaaaaaaaccgcacactacaatcttgctctaagacaagagacatttaacaattaattatgcgaaaagcacagaaggtactgttaggccttactctgagaattcactcttgcacattgcttacaatgtaaaattttaaccacctagaagttactagaacatagtggacatctctcctcaagagtttgacaagccggagaggatgatgagcttaacactttacttcctcctctctgccacatcaatctgccgggggatcaagtcctgttccagtttatggttcccaagaatggctggaaaagctatgtatggaacctcttgacagatttcttccactaagggtaaaaatcggcgggttctgatgtgacaagccatgggaaataggaaaagaaaagcgtcagttaaaaaaataataataataaaaggcaatcccagaatgggatcctttggaagaaagtgggctcattcttccaccagggctcctggaaatcccagaagctaaatcaggtaaaatgtcccggtaacctctgggaggcgggacatgactgctaaaccaaggttgcaggcccgtcaggggtgtgacctagtggccaagcgggtagtgacaaacttcgggtacccccaaggagggaaccccgcttgagtcaccacagcccagtatgagtgggtgagggcaagtctggtccagtcaccctggggaccacagcccacgccgggctcccggggccgggcagaagcggcgggggtggggctggcccggctcacctttgaagaagcgcagtgccaggccgtacaactcctccaggccgaaaccccagcgctgctccagccgccgcgcctcctccgccgcgcccccagccgccgcctccccgggctcgggctgctcccctgaggcgcccgggccgcgaccggatccaggtggcgagggcggtggcagcggtggcggcagcagcggggcgccctccgccccaggccgctcctccgggtccgggctgagcgtgaggccgtcgacggacacctcgagtcgctctgcgttcagcaccgccgccatctccggctgctgcacctcctcagcggggacagacggcagccacgtatcgacttcctgctgacctctgacctccgcttaccgacaccggaacttccgctgctgaggaggctggagggctccgggagaggggctgaggcctggcgccccaccccctccggaatcgtcagttgccctggctcagcgaccacccttcaggctccccaactcccgttggtcccgaactcccctcccccgcaccccatcctttcggatcccagttgctccaggtgggcgggtgctaccacccccaccgctcggttcggtgctgcggctgtcagtgcccagcaggggcggggtcagtggagccccgcgcgggggtcggagtagggaggattgacgaggtcggccagcacccaaccctccaggtcagaggcccttcacatttgcaggggcctgcgtggttggcagagctcttttgcccaccaccatctcgtttggccttcacagcaactctaaggaaatgcagggcaaattcccaatttttttaaaaggggaaactgagactgcagagaaattcagtgactttgaggttgcagacggggctgatcctggttttgcaggaagcgcagctcatacaatttgtggggaccctcattaggaaagagtacaaaaagttacgcgcagaagggtaggaaagtgaatgtatatttagaaagagaaagaaaaaacaaatgatattttaaaagttaataaaacccacaaacatcacacacataaccgtaatattttcattgactgcctgatattcttctacagggcgtctgagagcccagaaacctatttttttctaaaagattgaagtcgcccccgacattatgtatattcacctgtgtttccagactttgggagcaccatttatgatcatttttcccacctttgttttggctgcgtacttctgattgccttttcctataacaattattttgtaactttttttttttttttttttttttgttttttgcagacagtcctgctgtgccacccaggctggagtgtagtggtgcaattcggttcactgcaacctctgcctcccgggttcaagcaactctcctgcctcagcctcccaagtagttgggattacaggtgctcaccaccacgcccggctaatttttgtaaacttagtagagtcagagtttccccatgttggccaggctggtctcaaactcctgacctcatgtgatctgcccgcctcagcctccccaaagtgctgggattacaggtgagagccaccgcgcccggcgtattttgtaattctctataaagaaaagagaaagatcagtcttttctccagcatggctgattaaatttgtttcttaataattgtttataaatttatttcagcatcacaactcattactgatattgttaacgtacttttttagggttattgttcagtttgggaaacctctctcaagtttcatggatgtgctatgagatttttatggccgtttggctgcttcagtgacaattttgtgtgtggtttttactgaagccctagagagtttttttcttttttttgagacggagtctctctctgtcgcccacgctggagtgcagtggcgcgatcttggctcactgcaagctccgcctccagggttcacgccattctcctgcctcagcctcctgagtagctgggactataggtgcccaccaccatgcccggctaatttttttgtatttttagtagagacgaggtttcaccgtgttagccaggatggtctcaatctcctgaccttgtgatatgcccgcctcggcctcccaaagtgctgggattacaggcgtgagccaccgcgcctggccgagggtttttttcaggacaagatttgtatgctgcattcagacaggatctcattcattacggtggataagacatataacttcacatacagacagactcactgtagtacaactataagtttttgtcccataaacatagggtttctaatctattcccttttgcatgcttcacataaaaacatgaagtatggtgcagttataattgcagatat

SEQ ID NO: 12 - DNA, 4001 bp, Homo sapiens
gtcatgatgtttttgcttctctgcattctctgtaggcattatacccaagtgtcttgcacataaaagctgctgaacaaatatatgttgcttatgataaagcaattattttccttctggtaccaaccaatgtcaccctgaattataaattaaacgtgtctatacacctccctatttccaggtaaagttcacagccttagactgagtcaggagctacaatccagttctgactgatgtatttgtatgaccctaggaaaggtgcctactctctatggccttcagtttcctttactgtaaaagaagggcattatttcctctggtgttcatagctctaaaatttttagattgtatcaaacagaaaggaagacatactcaacgaaaacataaatcaaagatatttaggattttataaaaatcacaataaaagttgtaatactgcattttgcattgcatcacattattattattattattatttgaggtggagtttcttcgctcttgttgcccaggctggagtgcaatggcgcacaatcttcgctcaccgcaacctccgcctcctcagcctcccgagtagctgggattacaggcatgcgccaccacgctcggctaacttagtagagacggggtttctccatgttggtcaggctggtctccaactcccgacctcaggtgatcctcccgcctcggcctcccaaagtgctgggattacagccgtgagcaaccacgcccagccctgcatcacattattacaatcctattatctttttggatctctatatagttttattaactttaccgtatttacttccatgtggccctctgggaaagagtaaatgaatgatatatcttattttatcctcattttgtaaaggttcttgggctggtaaaatgcaagatcactgaataagtcagagaaaaaaacacaaaaacaatgtccagtgtccagctaaataaacatcactcctaagaaagcaaacatcttttccacgttcaggatgatgctcatccccagcagatggtcaaaaaaaaaaaaacaaaacaaaatacacatacacaagcttcattacacctagctattaaccatacatgcttgctatcagttgttgaggaagaaggctccgtgtctttctcccccatccaccctctccctgctactttacctgtttgtacctggcatacaggtacaagagctgctccctgctggccacctgaatcaggccttgcaggtgcgcggcagccttctcaaacagctcggccaggcaactggtctcctcgatctcagggctatgggggaactccacctccccggagtcgtcccctgagctcagctctccaccgctgtcgccggtgatggcccccgcgggcaggaatgatgaagccatgtctccttgctcgctccgtccctctgtgtccggtctgtcctccttggattgggtgtaaggccggcttggaggcctggcccaccagtctgggtcgcgagcctgagctccagtcggacccaagctcagtcgcggcgcgctccctcacgtgaccctgctccctgcccacttctactccctgggcgtgcagagcaggctcctcgaccctctgccgctctgcccagtcgacccggtctcctccggcttccctccggccaacagcgcgctcaggctcgcctcaggcccctccaacggaacaggagtcgaggggcagtgaggccgggatgcgtgcgagcgcggggcgcggctggcgctgggccgtgggggcggggcggcgtgcgtgccagcggcgtgcgattctgtgaggcctgctctgcgccggcggggaagcgcgggcgacgctacgctggacgtccttccctgccggaggagagaaagtgccgtcagctgtaggggcgtcttttaatcgtttcgctgaaattagcagtcccgagctccggagcccgccaccgggatgggcccccgggggtgggggaaggaggccgtttgtgtggtagtgtagcggtgagagcggagtcgcgggaaacgcgaggctgaggactaaggttccgcctgccccagattgtgcgccccaagcgcctccaaacagccctgcgcgcggatctgttgcgtgcgcgttgggctctgtgttgaataatgaaaaactgcgagatggggctgtcccgtcttactgtgtgactgatgagtggaatcactgctctgcgtgtttcgctctccacaccttcggagcccgcacctctccgggccctgaataatagggtttggggagttcggggcgcgccttagcccagttctcatcccgagctctgtctttgacactgtgctttgtagacactgtacagtgaaaccagaagtacggcacagttcggccctagaggaatgcacaaaactatttttttaactgtaacattatgagtggttatgtcctaaatgttaaacacaacgacgcactatatattcatttagtattcaaaacaatgtaataagcactataagaagggtacaaagaaagtgttgtaaacagtggttattgactggggttaggcttgcgacgggtggacggacggctggacaggatgaggaagcaatgagagaacacaggaaggtgagaaagcttgcatcaggattcaacagacattccttaagtctccagaaagttccactgttagtccctgctgtcaaggtgctcgcaatccagtcaaagggatgtttaatgaccaaattcttgcaattaaaaagtgattaagaataatgtattgaggacttgatcattacaacataaggtaggtactcttattttactacacataggaaatcagcacagagtggttaagtaacttgtcaaaggctacacagctagcaaatggaggagcaaggaaaaagaagttagctttcatgtggggtaataatggatgatgaacccgacaagtagactgaaggagatataacatggacttttatatctttgtttctagaatttttattaaagtgagaattgaatattatcaacggcttttttggcatctttggagattatctgcttttctcctctagtcttcgaaaggaattatattaacagtttctattttaatgaattatattaacaaaaataaatttgggatttaatgaattatataatagctaacattgataaattagtatgcattatttcaaaacctcctagttttgagcattacttctgttcttggaataaacccattctggtcctggtttggtttttttaaaaaatttgtaggttcagtttgctaatattttcattatctttacagttccatttaaagatgtcattaacctatagttttccttttctatactttctcaattttgtatcaaggtaatagaatccttgtagaatgcatttagaagttttcatctttttctgtattctggaagagtttacataacatgggaaagagagcaaccagaattcttttacactgctggtgtgagcataaattggtacaatcactgtggaaaaatgtttggcactatctactaaagctgaacataaatatacaacaattcgactcctccccagcgggaatatatacatggcattcaccaaaaacatgtacgagaacattcatagcagcactatgaactaattcctaattgctccaaactggaagctcctgaatgtccatcaacactagaatggagataaactggtgtgcttacatgatggaatactattcatcagtgagaatgaactaattacaatgacacagaataacatgaatgaatctcaaacataatgttgagtataagcctatactcaaaaaagtgcatattacatgtttctagtcataaaaaattcaaaatcaggcaaaactaatctgtggtgttagactcaggatagtgggtaacctcagggttagtgatctgaagggtgcatgaaggggacttctggaagttggatatgttgtttcttaagccgaacattagtacactgatgtgttcactttatgaaaattcatttataatttatgtacttttctgtatgta

SEQ ID NO: 13 - DNA, 4001 bp, Homo sapiens
attctatatcctgtgaacagggatgagtgcagaattgagtgggggtttgggtcctgagaaaagtcagtgcacacgcacaggtgtgcgcagttcaggtgctgacagagatgcaagctcatgggtggacatatgtttttacatgcatacatctaacataaaggtagattctaacagatcgagaaacagatgtgtacacacacacacacacacacacgcacgcacattcaggtcatgctgaggaacctgggagagatgactcccaggaagtggctttttaaattaccttgatatgttccctgaactgagtaacatcccctgggatgcttctttcaccttccccaccactgtcctaatcactaaacaaagccagagaggagacagaagacagaggctgggcaggttggacagggggaggtggtattgctctgggctttgtcatcactcttcactgtttatctctcagtttgagttcctattccatttgcttcccagaacagctttttttccagctaagccatcccttctgttttttttggtttaatgactcccctcatgctctggttcctcttctcttctcccttgagatggccgtgaccccacacctcaagagaacatctgtgtaccctgagggtatttattcatcattcaccttcttcccaagccagctatagaagcagacactggcaagaaagtctgacataaaaatgtctctctctccattctccttcttctccccagacaaaataagaaaccacccgcttcacaaaggcagtgtagactttaattcaggttgacaggtgggaagagaactaggatttgcttccaagggtgtccagatgagaagaccatccttcagggaggggcagagagggcaagagggtgcgggtggcctggtggcagaatagggcgaggagcaggggcgtagccacacagtgcaaaattgccagggcttctgccaggttcagcagcaggtccagagcctgctgggccagacatgttgacaacagcaacagcttggacctcaccaggaaatccagtcctagaaccaccccatgaggccaccagaaaataaaccaggcccacaggatattcatccaggggcctggccccatacccaatgccttcttcagccccttggctccaaacaaacccaatggcaacaagacaaagatggcaagacaggctacagtgtgtgtggcctgcaaagccttcagctccgtgctgtatatcagggtgcagagtccaccagaagcaccactggccagggtgacaggcagtgtcagtagggcagccactccccaaattcccacagtgagccccagggtgaggcctgggacctggcctgcacccagtctgtggcccagggaggcatggcaccctagcagcaaagcctgggcaaaggctgagccataccagacacagtagcccaggctacacagggcagagctgcgagtgctacctagccctggggccaagacgggcaccacaatgctgaagagggcactgcccacagccagctgtgccaggacaggccagccagggcagagctgccagcggaagagaggtctgaaaagcatgaagaggacagtgctgctagctaggatacccaggacactggtgaggatgaagaagggcagtgcagagtcatccagcaggttacaggagtggcagggggcagctgcttccaggttggcaccatagtctccatctgggaaggaatcattcacaccataggaagaattccatacatcttcgaagtccagctgacttgagttctcagttgagggggagagctccgcctggaggacatacccagaggaggccatcagagttacaccggaagagtctcctgggaattgaggggcaggtgggaggggaggacagagaggaaggtcgggtgggagaacaaggtctctgcaggagtcagatgcagtgcggacagtggaaaaggacaaagcagggagcctgaagagccggagcaggaacagtcctggggaagccagggcagctggggctggaggagcagtgcaaggtcagaaggaaaaggcaccaagagaccaggatggaactgactcaaaggcaaagggagggacacaagagggagctaggaggctagcataggaaggagagaaggaaaaagactttgaaggaagaggaaaaaagcaggaagggagaaaagatgaggaggaaaaggaagagatataaagactgaggggcaaacagcaggggaaatgaggggcatagggataagggactctggggcctggccccatactcaccctgtgcagacagttccccatggcaccgtttggttcaggcccgcagacagaagggctgggacggctgtcagcgcctgtgcttccaagataagagccaaggactaatgagggccatcaggttctgggcagggacagggggcatcaggaagccttaccccacgcccactgcctgcacaagcctcaggcctatgggggtcactggccttgggtcttcctgttttgaggttggatttggctggttgggactacactcaggaaaaaggtggggaccagaaagtgggcattttaccgaagtggaaagggagattgagaaaacagggggctttccagcaagtagagattttaccgaagtggaaagggagattgagaaaacagggggctttccagcaaggagagattcttcaagcacaaggaaggaagagaggggggctgggtgacttgtgaggcagagataagggaggtgctgggaaattggagtggaagggcggctgactctcactgctcctccatccccttgaactggatccaaggaaaggcagttcaaaagccatgtgtttgggagaaaggtggtggtggtcaactctgtcccaactgaggggtgtgtgcacgtgggcgtgagctctttgtgtgtactgaactctgtgtacgtttgctgtgtatcattgtgcacatatctgtatgtgaggggcttggcgggtgtctgggtgtgtctagctatctctaggtctgggtgtttcagtgtgagagtgggagggttggggtggctgtcgaggctgcataatgaagccatttcagggagctattgggtgtttgcctagccacctatgggctcagtgcatgcctcttgcatatgaagtggaatacatggtctgacaagttaaagtaggctctaggggacaatgggacagcatattttaaaatgggaccattgcccacagggtgatttctattcatatttctactgggggacataaagtctctggaactgtttcattggccaggcatcttagcaatatgtaaagtttctcactgaggggcagagctggccagcagagagaaagggcatctaccctgcaggcaggccgattctcccaagcacatttcacttttttagtggcttcttccccctccctcccctcctcagctgtttccccaggatcgtcactgtttcatcacccctctctgcttttatttcctcagctagggagacatagtggggactttgggagcggtgagccatggcgtgtccaagtcagaacaatgagatagaaagggctggttaggggacgctgtttcatttgtccaaaacagcatcggctgcttcatctccagtgttgttaaggaccttctgtcccattcatgtagggcttcctagggggccaagcacctcagacctaaggtgcagaaggatgggtacctcgtagagatttcccccttttctcccaagacactagctcaagtttcaggttcaacatgaaggggctggaaagtgaatttggtctggtggtgtctggtgatgctctgcagggtggggttgatggcatctccatcgccgtcttaacattctccagcaatgcctggcagagggtggggggaagcagtcagatgccccccaagacactctctggaaaggaagggcttagcaaaaggaagtgaacacacttctctcccttgtagagttatattgttgctgtacatagatattcttgagagtggcctggc

SEQ ID NO: 14 - DNA, 4001 bp, Homo sapiens
cagaagcaccactggccagggtgacaggcagtgtcagtagggcagccactccccaaattcccacagtgagccccagggtgaggcctgggacctggcctgcacccagtctgtggcccagggaggcatggcaccctagcagcaaagcctgggcaaaggctgagccataccagacacagtagcccaggctacacagggcagagctgcgagtgctacctagccctggggccaagacgggcaccacaatgctgaagagggcactgcccacagccagctgtgccaggacaggccagccagggcagagctgccagcggaagagaggtctgaaaagcatgaagaggacagtgctgctagctaggatacccaggacactggtgaggatgaagaagggcagtgcagagtcatccagcaggttacaggagtggcagggggcagctgcttccaggttggcaccatagtctccatctgggaaggaatcattcacaccataggaagaattccatacatcttcgaagtccagctgacttgagttctcagttgagggggagagctccgcctggaggacatacccagaggaggccatcagagttacaccggaagagtctcctgggaattgaggggcaggtgggaggggaggacagagaggaaggtcgggtgggagaacaaggtctctgcaggagtcagatgcagtgcggacagtggaaaaggacaaagcagggagcctgaagagccggagcaggaacagtcctggggaagccagggcagctggggctggaggagcagtgcaaggtcagaaggaaaaggcaccaagagaccaggatggaactgactcaaaggcaaagggagggacacaagagggagctaggaggctagcataggaaggagagaaggaaaaagactttgaaggaagaggaaaaaagcaggaagggagaaaagatgaggaggaaaaggaagagatataaagactgaggggcaaacagcaggggaaatgaggggcatagggataagggactctggggcctggccccatactcaccctgtgcagacagttccccatggcaccgtttggttcaggcccgcagacagaagggctgggacggctgtcagcgcctgtgcttccaagataagagccaaggactaatgagggccatcaggttctgggcagggacagggggcatcaggaagccttaccccacgcccactgcctgcacaagcctcaggcctatgggggtcactggccttgggtcttcctgttttgaggttggatttggctggttgggactacactcaggaaaaaggtggggaccagaaagtgggcattttaccgaagtggaaagggagattgagaaaacagggggctttccagcaagtagagattttaccgaagtggaaagggagattgagaaaacagggggctttccagcaaggagagattcttcaagcacaaggaaggaagagaggggggctgggtgacttgtgaggcagagataagggaggtgctgggaaattggagtggaagggcggctgactctcactgctcctccatccccttgaactggatccaaggaaaggcagttcaaaagccatgtgtttgggagaaaggtggtggtggtcaactctgtcccaactgaggggtgtgtgcacgtgggcgtgagctctttgtgtgtactgaactctgtgtacgtttgctgtgtatcattgtgcacatatctgtatgtgaggggcttggcgggtgtctgggtgtgtctagctatctctaggtctgggtgtttcagtgtgagagtgggagggttggggtggctgtcgaggctgcataatgaagccatttcagggagctattgggtgtttgcctagccacctatgggctcagtgcatgcctcttgcatatgaagtggaatacatggtctgacaagttaaagtaggctctaggggacaatgggacagcatattttaaaatgggaccattgcccacagggtgatttctattcatatttctactgggggacataaagtctctggaactgtttcattggccaggcatcttagcaatatgtaaagtttctcactgaggggcagagctggccagcagagagaaagggcatctaccctgcaggcaggccgattctcccaagcacatttcacttttttagtggcttcttccccctccctcccctcctcagctgtttccccaggatcgtcactgtttcatcacccctctctgcttttatttcctcagctagggagacatagtggggactttgggagcggtgagccatggcgtgtccaagtcagaacaatgagatagaaagggctggttaggggacgctgtttcatttgtccaaaacagcatcggctgcttcatctccagtgttgttaaggaccttctgtcccattcatgtagggcttcctagggggccaagcacctcagacctaaggtgcagaaggatgggtacctcgtagagatttcccccttttctcccaagacactagctcaagtttcaggttcaacatgaaggggctggaaagtgaatttggtctggtggtgtctggtgatgctctgcagggtggggttgatggcatctccatcgccgtcttaacattctccagcaatgcctggcagagggtggggggaagcagtcagatgccccccaagacactctctggaaaggaagggcttagcaaaaggaagtgaacacacttctctcccttgtagagttatattgttgctgtacatagatattcttgagagtggcctggcaagggacacaccaccttttgaggcaccaggcaccaggtgcaaggggtatgggaagaagaccctcacatacacacatcccagcagcagcaagaggaccagaaaggaggcagctgaatgacacggataatccagatatattgagggtgacccctctgagattagcacaggagagttagaaagattataaagatacacggtcccctccctgctcccttcccccacccccccacccctggacagacacacacagcacaacagcccctctccctcccacccccccgtacaaatatggcttctgtgtaatatggacagagtggttcagcttgaagaggaaaagtcattttcccaaaagcgggtgctgggagacaagaagctcaacaggcctggggccccagggctctcttgctgttgtaagaggagtaggccccggcttaggtgaggggctgcctgtggtgcccaaggccctaaccagcggctggaagattcacaactgtattacctgaactgaagggggtgggcaggcctgctagattgcagctgcccctttttgcatgcccattgtcagaccagggaggaaaagctgggggagggtgggagcgatgccaagggcatcctggatctgaggcggggcagtccagccaggacagggaggaccaggaacctcatctccacagcaaccagctggggccacgagaaggaagacaggaaatcaaaaggaagggtggggacccagccttcaactcactgggtacagactatgggaaaaaataggtggtggtaggtctttccagggtcaacgccaaggagaggcctgagaggtgcatagcaaaggctgtggcactgactccatggctcagaggagggaaatccagggaagggctgaatgctctgtgtttaagggagagatagaatggacagctgggcaaacacacacccggggactcctttctccaagaccgatgggcattgggggtggcagaggaaataccagcatggaacaacatcccaggtgaggtgtgaaccctgactaggaataccccattcccaaagcctccccaacatgtcccacagccctgtccacttgcccaggacccctggctcttagccctcctcctcagttcctcgctctgcctctcactcactcacacacatgcacacacacacacacacatgcacacatgcatacacaccacacacatgcacacagttcacattattcccttagtttgggcaggaaacagctcac

SEQ ID NO: 15 - DNA, 4001 bp, Homo sapiens
cccagctctgccacttcctaccagtgtgatcttgggcaagtcacttaccctctgtgagggtccttatctgggatacggggatgataactgtacctacctcatagagaactgaatgagttcataaatgcaaagagctatgtgaagatttgttactattgttatctctgtaaaacagtgataacgatatgcctcttccccagtgccttgcccccagttactgatgaaggaaaaagtcataaagggttaaatacaacagggcacaagagaagatacgaggagcccctccctcctgggagacactctgccctgcactcaggtgacaagagcaagcggccctgctactcagatcccacccttagcctcgctgctgaaaagctgcctgtccccattcattcattaagcattccctggcctctggccacacccgtccccgtgctgggtataccaagagcagcctcgtgttgctccctggctggtgggagggatgtatgtgccagtctagcacacaatccagtgtgaaaaggggctaacacagaggctcatggtgtcatgagaaatctgagaaggacttccagaggaggcagcacctgagctgagatctgagggctcagaaggaacttgctggggacacaagtttggggagatgcaggaaggctgggggtaactccggcagaagacatagcaagtacaacagcctggaggagagaacaaaagtgggacaccgaagccgcggagagcagctcactatggctgaagcagggacagcagaggggtggggatggtggaagaaaaagggaggcatgggcaggagccagagtgccaacatcccttcgtctcaagtaagggatgtgaaaatcatcctcgggtagccgtgtgagcaggtgaggagtcagcacatttactttttagaagcatccctccagtgtggagagtggactgaaaggggctgacatggaatgggggagccaggggagacaagatgcacagggcccggtgaggatgctgagttgtgcagtggctgtgcagatggagggagaggatagataagacatttaattgttccagcccctttaaaaaaaggcttttcctgaaaatatcctcagaggtcagcctctgccagtcttacaacctctgccagtctgtcctgagcccatctccatacactccatccactgccaggcgctgctgggcacttgggtctgccgtgtgcctcagcaactaatctcagctccaaagcgcagggaaaagttctcttcaaggtcaccttgcaggacagctttccgcagccgtcatgtgatcctgtgcttgctctccccaagaggttctgctccccaagaacgccgacctcaccccaccacacatactcactcacacccatacctcacaccctgtcactcccatcagctttgtggctttggggtcctgagctctgagcatgaagcaccacaaggccatggagctcagacatcccccagaaacatacacagaactctgcagggagaaacatacacccaccgaatagaattccagaggccgacacttgctgaaggtgattccactctacacagccagcccgtgggggatctgacagcccctggggcttgtttggagattgctgctgataataaaccagcccaggggttctgcgatttctccttccaaagagagctagaaaatggcccgtggagagtgtgaggagatgcagagcgtctgagttaaaatggaaacatcaatctctttctgggtgcccagcttccagagccctcccgctgccccagcccaccctccatacccgtcgcaggtgatttccgacattctggatcatcgcgccgggtggccggggaaagcagcgccctcccagagacacaagctggtcacctgagcaacagccaggcctgactccaaatgaagcctgtgggcctctcctgctcctcctccccagctcccgcccgcccaccagagccagctgttatcaccccgcgtcccgcctctcttcagactgccctctaccccccttctcctaggagccctgcacagaaagctccagtgcccgcctagcggagaggaaggacgaggctgccagctaggccacagccacgtcaaggggcctgtgcccgcccactgggcacccagccccagccaaactccaggcacccccagtcccagagctcatcatcctgccaacagtgtctcttggctctgtgatcactcccagggaagggggctggtgggggtccaggtccctgatcccagccagcagatgggcaaaacagccatgaggcttccatccgtccacaaggggtcaggctggaaggtggcaggaggccaaggagctgccagcaacctcccggagagataccagacccacctgctaggattcttcaccccgggagcgctgcccaccagctcctcagctccaggccgcaggcatccagcagttgctggttggggacaggacacacccctcacttcctttaaataggcagtgtgacttttctaaaagtggcacctgccaaattccaccccgatggccacacaggcttcagccccttggggcacccactccagtttctctctagccaccaccaactgagagaccaccagggttttcccttctccctctgacttctgcccacaggcttgatcaggaggtcttgacactcacgttggactaaggacaggacaatgagtgcttggtggctaagggaagtggggggtgggaagtggaggggcagggaaaggattcaggcatgggggctgggatggacaagtagatggaaaataatagcatgcaccccataataaccaagcacctgccgtgtgacaggcctcgggctggtcttcctccaaccccactgggaagattccttaggaagggtacgtgacatgccccaggtggcacagccagtgacagcacagaccagctgggacagacccgctggattccgagggcacagccttccttccatcctcagggcctctcgctcattcaccacagatctaatcatgcatcctccaggcctgtcttgcctaagaagcctgagttctccttctttcactagtgtaccatgtgactctgggcaagttccctcctttctctgggcctccctgctccacaagtcaaggactctaataatgtccatccccatgagctcaggccttgccctcaaacagcttgttagtggtcagccattctgtgtctacaaatgagaaattgaagtcacaccttaaagactgcaagatggcccatggatggccctgaggattggagcaatcctggagacttcctggaggagatagtgctagagctcgcctgaagactgaatgggcttggataggctgagaagaggggtgaggtggaagacctgacaggcgcagaacaggaggcagtcataggccgtgaggagcatggccttgcaggaaagctgggaacctgtcatggagggctcgaatgccagacattgggctttaggcatcaaggagcctgtgagaatgacagaatgacgagcacgctcgacatgaggaaagccacgtgaggcggacaggacaggtgtcatgagacttccctggatggtaaggaagtcagcccaaagaggggatatctcatcttatgggtccccaagctaacttgacaggcagccagggcaatttcagaatcctccctctgcagaaggaggaatgaaaacccagagagctcctggctcccaagcctaccctctctccagacaactgcaatgtcccacactcactggatttggctcacccctgcatgttacagatggctaaactgaggcccggaggaaagtgaggctcccaaagacacacagtgaggaagttggctagaatcacacccctgacctcaagtccagagccctgtccaccccccacacagcaaggcatgaaatgagagaggcttcagttagacttacgagaggacttccagaaaggctgaatcaatcttagtgttaggaacaagcagcagagagctagatctttcaaca

SEQ ID NO: 16 - DNA, 4001 bp, Homo sapiens
agccagcctgctgggcacaggggccgagtcccctctacccacccttcccttccaaatgtccctaaacaatccacccacagtggcccctgcacggcctagacatgcccatgactggcagtacctgctcagctggaaagccatggtggctaggacatcccaggatcagatgcagagaaaggcgagggagcagggaagcatcacagagtccttgcctgacccaggactgtcccagctccctgccacaccgggcttggtggggagcaccccccacccccagcttcctgagctgcccaatctggccaggaagaggctgcctcgccaatccagagcgtctaccagaaaccggtcgtcatggaaaccttgctttataaataattacagaagaagtaattctgtgagctcttctggctgccatgccaggagatcaggaaggcagaggggccgctgctgagcggcctcagggaagcggctatgaggctctgccttctctgacagggcacaagaccccctagtctttctccagggtctcagccaaagccaggtctggccccactgccgccttctagagctccctgaaatgtagacaggggaggaaggtcacaggccagcaaggactccagcaggtccaagcctgcatcctgctgatggagctggcatctaaagcctgtcccaagggccagctccctggctgaagcaaagtggacaggcggtccagcctcccctctcctcaggccacacccctgtccttccccactccccctcttccttcccccaacccctgcttcagaggatgccatgcctgtcttggggctcagcaactccactacccttcctccactcccgcgggctcttaggctgccggctgccacctgtgggccctgtgccccccaacccgtactctcttcactccgcctccccttctactgggtgtcaggaagaaagaaagaggccaaacaatcacagcggccagggtgcaggctacaggaggcccagtgcaggaggcgggatgtgttatcaccacaacctcccccaatgctgcccccaccagggctgctttcccaggaatcctgtgaccagcaagggaaatggaaagtccccagccagagtgcaggccgcacagcctcaaccaggctgcacccgccggcctctgggcaagtttcacatgtttagttgtgaaagagaaagttagggcagagagggctgattaggccactcccactggaacagccggcccttatcaaggcccttatcaaactgccagagcctgggcttattctatctaaccagctggcaggcactgagcctgggaagtcactctggtaaaagttaaataggtaaattattactaaaaggatgtcctttcacctatgtgcaaaaataacaagtcctaaaaggacaagtcctctcacctatgtgcaaaaagaaagaaaaagtcattttcagcttacaaaccccacacgcactgggtcccacagggaggctggtgctgcccccgcccagggatgcttaatgtctagaagccagcagaggagaggattctaaagggatcccaccgacccaaaatgtctgcccggaggggaggtcagagggctgagtctggcccaagcctggcagctaaccctggctgaaaatgccccctgagccctccccacccaggcagcctgccggggcccaggcccgggccatcagcctcctcagccccctggctgcccatctcggcccatcttcctgagtagccggcatcccagggccagggtcttgaagccacagcgtctcccaccctggcacacaggacaggtcctcccaaacacacttccctcccctgaccccaaatagcccatagttcctctcagctcccaactcactgtttggccttctccccaaaacaggccctgtcgacttcctttctgaggacgtttagtgacaagcttctccgaagcaggagcatcgtctccccacgtctcctgtcggctccctccagaagctgcagccaaatggaactcaaggaatgagcctgggccccaatactgtgccctttggacttggcctcatccctccaggcgggcattgctgcctccctaagcaacccttccagctggtcccagtccaggtgtgctaggcccaccacccaccccaaatcagtgaggacctaccaggcttccacagcaacacagattcaagccacaaccagatggtcccgcaaagaggaagcacttctcagatagcttagccttatgagtaaataatctcaaagttaaacaactacaaggtgctatttcccatctagtaaattaaaaatcattttaattgacaaaacgagatgtctagaaatgttcatagcagcattattcacaaccacccaaggatggaaacaacccggtgtccaccacggatgggtaggtaaacaaaatacgataaatccatacaatgagatattatctgaccataaaaaatgaagacctacagatccacagtaatgcacggaccagccttgaaaccaccctgggtgaaagaagtcaatcacaaaaggtcacacgccatctgattccatgtatattaaatgtccacaacaggcagatctacagaaacagaaagtcagctggtggggggcaggggctggaggaggggaaatgggagtgactgctaatgcgtgcaggttaattccgggggtgatgaaaatgttctggaattaaatcgtgctggtggctgcacagccttgtgaatccattaaggttcacgcagaattgtacaatcaaaaagggtagactcaatagagttatagctcaggaaagctgttataaactacaaacaaggcagggtggagtagttcacgcctgtaatcccagccccttgggaggccgaggcaggcggatcatctgaggtgaggagttttgacaccagcctggccaacacggtggaaccccaccactagtgaaaagaaagttaaccaggcatggtggtgtgctcctgcaatcccagctaccagggaaggtgaggcaggagaatcacctgaacccaggaggcggaggttgcagtgagccaagatcacgtcactgcgttactgcattccagcctgggcaacagagcgggactctgtaaaaataaataaataaataaactactaacaactggatgccagaagctgtggcccctccctacataagcactggccatgtgggtgacacatggcaggagccctcgaaacgctcttacctttgccacagaaaggcactcccaaaatctaaagaaaaacacacacagcttggcagagatctgcagatgtggcatccatctctaacccaaaacaaagtagaactggctcagtaggctgtgagcatccctaaaaacatgctcgaggttgtgtctggtttctacttttctggggaaaagacccagttttctgcagctttcaaaggcatctggaagctaaaaagtcaagaggtgggctgggcatggtggctcacgcctgtaatcccagcactttgggaggccaaggcgggcggatcacctgaggtcaggagtctgagaccagcctggccaacatggcaaaactctgtctctactaaaactacaaaaattagccgggcatggtggtgggcgcctgtaatgccagctacttgggaggctaaggcaagagaatcgcttgaacccaggaggcagaggttgcagtgggccaagattgtgccattgcactccagcctgtgtgacagagtgaaactccgtctcaaaaaaaaaaaagaaaaaaaaaagtcaagagatggcagcacctcttcccccatccctcccatacctacccaggcagccaagcatatagaaagaaggtaggaaatgagacaggcacctagaactcaaaagcacactgagcccagctcatcagagggcactcggaagagagaattcaaggagaactccgcaacgacatgccctagaatgggaggccacatccctctccccaaccgaaactcactgcctcatgctagaggaagctggtagggtcagaa

SEQ ID NO: 17 - DNA, 4001 bp, Homo sapiens
catcccaagtagctgggactacaggcgcccgccaccacactcggctaattttttgtatttttggtaaagatggggtttccctgtgttagctagaatggtctcgatcccctgacctcgtgatccgcccgcctcggcctcccaaagtgctgggattacaggtgtgagccaccacgcccagccaacatctggctaattttttaatctttaatagagatcagatcttgctatgttgcccaggctgacaacttttttgaattggaaaattttcttaattaaaaaattttatctgagaagggacttgcatctagaatatataaagagctctcatcactcaacaacaaaaagacaattacaccaattggaaaatacaggaaagacctgactagacagctctctaaaaatacacagtggtcaataagcacatgagaagatgctcagtatcatcttctctcattagggaaatgtagatcaaagccacagtgagataccactgcacatctactagcatggctagaattcaaaagatggataataacaagtgctgacaaggatatggggaaattgaatcctttttacactgctggtgggaatgtgaaatggtgcagccactttggaaacagtctggtaattcctcaagagaataaccacaaaattaccatatgacccaaaaattatattcctaggcgagctgtttttactcatgcttttaataacaaacatgggtgtctctttcaaccccacttctccaactctccgacactaggtgggtgtcctacaattcaagtaaagtctggcactaccttctgcggtataggaaggtaaggttgaaagcgctaacccgctaatcctcccttggcctttctggagaccagctcccatcctgaagctatatctagggcccccagccaccagttctctcattagcatactagacactcttaggactacaaaggtcccaagggcttggggagctccatgtcaggagaacaaaaaatcctcctaccacccctttcaaaattgatggaggtcatgatcccacagctctgtgaacataaaactgaaatctactagcttgtacacattagtgaatgaattgtatggcatgtgaactataacccaataaagctggcacaaagggggaggtatgtatgcccactcaacagagtttctgtaaagtttaggagaaataaagtatgcaaaagccatctgtaagcagctcaacactgcactgttaggatcagccaatcgtgcaggaacagctccctctggccctgcaccaaccttctggtctaaaatcacagctcaacatccagcctagggacaaagcagggcacggatgccagctgccagctgtgagccagcacagctgctggcttgcaggagccttgatctgcagaggcccagattcccacagcccagggttgccaggtcacctcctccaacaaagcccgggtgttccgctcgtccctaggggaagaacatgccaggtctccactgagggtggccacttaagtgggcactttcaatccagcaaaacacacagctcatccaacacccgaccctactaccctccccaaaactcctccaagttatgcggcccaaggccctggctgcccagtcggcgtcgcaagtgagacaccatgggcacaaaatattcccagtcatcctaccttccagtaatgcaggctccacagggtgggagatcagccctgggcccaaccacctggacgggagcgcagcaccctcgccggggccccacacatccctggccagccaccagcctcctggaagatgcctgcctcccaaactcacagagccggagagccctggcaagcagcttcatcctgcggtaagtgggcaaactgtttacccagtgacaagtatgatgcccagcagagcccaagcctgtgtctgcctggccggctcagcagtgagccggtgtgatccctccctgatagaaagcaccaggctcctgctcctcctaggaccgcccctcccccaccagcccccggcaagccgcctcctcggcttccggaactggatcacaggatgttctctacaaaagaccagtgatgcaaggaatccatgactcggcctgaactcacagacagggaaacaggacagggccaccacccctctgcgggagaggatgaactgggtggggccacaagcaacactcataagggttcccacctccaggaccttaaacctcgcaccactcaggctggccctcaggcaagtagaagaatgagttccacctgggcggagttccacctgggcagagaggtcttggctcacaggcaccgggagagctggaaggctgcggggaagccgaggaaggccaacacaccgcacaacacggcaggtgcctggccctcctctgacagtggccctcaagctccaggagggccgaggaaaatgcagattcctgggcctacccctccctgaccttccccgcccctggagttagaggcagtagctctggggtggaggctcaggagcctggttttctttttattcttcattgtggtaaacatcaaatgcttacaagagtagagggaggagggagtgaacccctatgtccccatcaagcagccccaaaacagtcagctcagggcacctctggtctctgctcccacctgctccccatgccaggttattctgcagcaaatcccggatttcccagtacgacatcgtaaatatgtctgcatttcctctcaaagataaaagctccttgtgaaaaacctaaaggaggggtatggtgactcatgcccacaattccagcactttgggaggccgaggtgggaagatcacttgagcccaggagttcaagacctgcctcggcaacaaagtgagatcatgtctctacaaaaaatctttttaacattagccaggcacagaggcgtgcactcgtagtcccagctactcgagaggctgaggtgggagaatcccttgagcccagaaggttggggctgcagagaaccatgattgcaccactgcaccacttagttgcctggccaactaagcgagaccctgtctcaaataaaaataaaaaccacaaaacaaagatctcatctaaaatatcatccaaattcctaatatcattaaatagcaagtgacttcacgtttctgtcctaaatgaattgaaatctgcatttgtgaacttcattcacaagatcccaagtctctgtggcctggtgaagagaaactgcagtgtgcagggaacagggtaatacagggctacggggacacaggagcgaggcccagcactgagctcgatccggttccatcgacacgaaattctagaagaggcacagcgagtgagtgaaagcagatctttttgccaggggccaacagtaggggaattttgggagtttggaaatattcgacatcacaactgggcccgccactactcagtgtgcacactcatcaaaactcagcaaactgtacgtttcaaatattcttgtgtatgcattctaaatctatctcaataaagctggtttaaaaaagcaaactacaaaacaattatcctaccttaaaaaaaaaagcagtgattccttaaaatcattatcaagggactattcaagtttccccattatctcctcaatcttcatcttgttgactctctgctgaagtactgttcacatgcagaaaacccatatttgtaacagacttccccagttattcccatgcaggggtccaaggatggggaggcacatccttgatccccctccccaggagggctctgagagtgagaggccaaggggtgggatggcaagacagcctatggggtcaccccctggtgcaggctacacaggccaggtgggtcacacaggagaaagccacttctggtctgaccagaactggggagccagctagctgcaggtgccaattccagggcaatgccaggctaagtggcccacttacagcgtgaggttggacagtgggtagacaaaggcctccccacgcacaggctctctgggttacaaagactgcatctt

SEQ ID NO: 18 - DNA, 4001 bp, Homo sapiens
ctacacttttgtggctggacgcagtggctcacgcctgtaatcccagcactttaggagctgaggcaggtggatcacctgaggtcaggagtttgagaccaacctgaccaacatggagaaaccctgtctctactaaaaatacaaaattagccaaccatggtggcacatgcctgtaatcccagctacctgggaggctgaggcaggagaatcgcttaaacccaagaagcgaagtttgtggtgagccaagatcgcgccattgcactccagcctgggcaacaagagcgaaactccgcctcaaaaaaaaaaaaagtcagtgctaaaatgaaaacattactacgtgaaacccagggtaaccaggggtaggtgagccttgcttcctttactccatggtggaagctaaagtgcccacctgaaggtgcacagccaggtaagggtctggggtataggcaggtcaggcccacacggggcctgcagggcaggcggctcattactgcccccttctgacaaaggcctcaaaccagaggtcaagcaccaggtgcgtgtgctccaccctcacctcagctggaaagctgggtgggacagaggtgtctgggcagactgtccccagtcatagggctgcagatgccactcatggctgggggccaccacctggggcctgcagacactcggagcttccttcaggagctcagcagaggctgccttggccaggagtagacaagggacaggggttgcccttcccggaaggaaaggagaagcgggtctccttatggcatggggggcgggggcctcacaccaggcagccttgagggacaaaacaggcacgtggatgggtgtggggcctcaaagtccaggcacaagcacacataaatgcctcctctttccatgggggactctgccaaacagaagctcaagcagccctgcttctcctcttttttttttttttgagagggagtctcgctctgtcacccaggctggaatgcagtggcgtgatcttggctctctgcaacctccacctcccgggttcaagtgattctcctacctcagcctcccaagtagctgggattacaggtgcgtgccaccatgcctggctaatttttgtattttttagtagagacgggggtttcaccatgttggccaggctggtctcaaactcctgacctcagttgatccacctgcctcggcctcccaaagtgctgagattacaggcgtgagtcacagagtctggcccctgcttctcctctttgacttgctgcctaaggcagttccggcgaagtcccttcaacccacagacacgccactgcatctccagaagagggaagggtgggaggaagggctgtgccaaggaaagttccagcagcacttgcaggcccccaagcaggacgggggaagaggccaacaatggccctgagctcccagcctccattttggccaggggcaggggactgacccaggaggctccttgtgcagcccacagaccccccctccaccgcaggtaggaagctcagcagcgctgggaaaccgcagtgaacccagcccagctgaagggagcagagggaagccacaggagcaaggctggaaagaaaaccaggtgccttcctccctggggactagagcaggcaggggagtgccctggtccgtcaggggaccccagctcacgcaggcctgcacttcctatcccagcttcggctgaccacctaatcttgggggtcagtaagagccaggccaggtgggtgccctactgcccttcctggctgcatgacaccagccagcctgctgggcacaggggccgagtcccctctacccacccttcccttccaaatgtccctaaacaatccacccacagtggcccctgcacggcctagacatgcccatgactggcagtacctgctcagctggaaagccatggtggctaggacatcccaggatcagatgcagagaaaggcgagggagcagggaagcatcacagagtccttgcctgacccaggactgtcccagctccctgccacaccgggcttggtggggagcaccccccacccccagcttcctgagctgcccaatctggccaggaagaggctgcctcgccaatccagagcgtctaccagaaaccggtcgtcatggaaaccttgctttataaataattacagaagaagtaattctgtgagctcttctggctgccatgccaggagatcaggaaggcagaggggccgctgctgagcggcctcagggaagcggctatgaggctctgccttctctgacagggcacaagaccccctagtctttctccagggtctcagccaaagccaggtctggccccactgccgccttctagagctccctgaaatgtagacaggggaggaaggtcacaggccagcaaggactccagcaggtccaagcctgcatcctgctgatggagctggcatctaaagcctgtcccaagggccagctccctggctgaagcaaagtggacaggcggtccagcctcccctctcctcaggccacacccctgtccttccccactccccctcttccttcccccaacccctgcttcagaggatgccatgcctgtcttggggctcagcaactccactacccttcctccactcccgcgggctcttaggctgccggctgccacctgtgggccctgtgccccccaacccgtactctcttcactccgcctccccttctactgggtgtcaggaagaaagaaagaggccaaacaatcacagcggccagggtgcaggctacaggaggcccagtgcaggaggcgggatgtgttatcaccacaacctcccccaatgctgcccccaccagggctgctttcccaggaatcctgtgaccagcaagggaaatggaaagtccccagccagagtgcaggccgcacagcctcaaccaggctgcacccgccggcctctgggcaagtttcacatgtttagttgtgaaagagaaagttagggcagagagggctgattaggccactcccactggaacagccggcccttatcaaggcccttatcaaactgccagagcctgggcttattctatctaaccagctggcaggcactgagcctgggaagtcactctggtaaaagttaaataggtaaattattactaaaaggatgtcctttcacctatgtgcaaaaataacaagtcctaaaaggacaagtcctctcacctatgtgcaaaaagaaagaaaaagtcattttcagcttacaaaccccacacgcactgggtcccacagggaggctggtgctgcccccgcccagggatgcttaatgtctagaagccagcagaggagaggattctaaagggatcccaccgacccaaaatgtctgcccggaggggaggtcagagggctgagtctggcccaagcctggcagctaaccctggctgaaaatgccccctgagccctccccacccaggcagcctgccggggcccaggcccgggccatcagcctcctcagccccctggctgcccatctcggcccatcttcctgagtagccggcatcccagggccagggtcttgaagccacagcgtctcccaccctggcacacaggacaggtcctcccaaacacacttccctcccctgaccccaaatagcccatagttcctctcagctcccaactcactgtttggccttctccccaaaacaggccctgtcgacttcctttctgaggacgtttagtgacaagcttctccgaagcaggagcatcgtctccccacgtctcctgtcggctccctccagaagctgcagccaaatggaactcaaggaatgagcctgggccccaatactgtgccctttggacttggcctcatccctccaggcgggcattgctgcctccctaagcaacccttccagctggtcccagtccaggtgtgctaggcccaccacccaccccaaatcagtgaggacctaccaggcttccacagcaacacagattcaagccacaaccagatggtcccgcaaagaggaagcacttctcagatagcttagccttatgagta

SEQ ID NO: 19 - DNA, 4001 bp, Homo sapiens
tccacacaggtaagggtggcactaccgaccatcaacctcccagggaattgggcaaaccaagtgggatgagacaggtataagctctttgcaaaccatggagcccaagtttcccagccaatactcagcagagctgattcaggaacctgatgcaggctgtctgtctccagttatttccttttttttttttgccccgctttccccacctccagagtcgatgggaccagaacagccacagagccaaagtcaaaggggcagggctcccccaaagacgttccccctctggaaaagtcaaaaccgaccttgaggtaaggagaggccctcgaccaggccagaagatgagactgagagtcaagaatcgccatagacccaggacttgctatatgcccagccttcctggagatgtcaacatctacaggaaagtaacttgcttctattggacttggcttgagcccaaggtcagtctgtgatgcccaacccccaaatgtgaggaacccactaccaaaacagaaagcagctctcactcctggtagttcatcaagcaggataggaccggtcgcaggccacagagcctgtgtgcagtggctgaaaacctagactccttgtcctcacttagctcatgcacaaatgccagcctgctgcttccgattctgccgaagagaactgcagagtaaccttcaggctgccctccccacctcctatgggaaatgagcttgttcatgatctccagcctccagcttcctctgggggcctgcatctatctactcagtacctggtggaagaagagggggtgctctagaaggacaaccctttgcctctattgtgtaagatgctttcaggcccaacagaccactgattcccttttcttcatagtaaactgttagaggtagacagtattatctgttcttcctttcaacacctgccctcccccaaaccgaagcagtgcactgaagacggtagctctgcaacctcctcccacaggggcacccaccgaggggctcgcgcggctctgggcacctcccctccacctctgggggctttggttagcgcagcacaaccgccgaggtaatgatcccgaatcctcgaggaggctaagcaggaccacggggctgaggctccgggatgctcgggcgaggcccgaggcggggcggcccacgggcgccggtcgccgggctctggagctgtgcattgacctccgcccgccccgtccctgcctggctttctcgcccaaacggcccgtggcgcggccgccgccctggagatgcggccaggaggagccggctggaggcgggcgggggccgcccggcttgtgcggcatcgcgagtcgcatcccggccgggcgggcgtccggggcggcggcgcggaaggccgtgcggggaatcggcgggcgggggcggcctcggcgggtggggaccacagagccaagcggggcaggcctggggcggtgaccggcgcgcctggccgctgcaggctgcgcgcgggccctctcttaccggcagatctggatggcggacggcgtctcgacgtctgggcccgacatgctgggggctgcggcggcggatgcggcgggcggctgcagaagggcgcaggtgtctggcaggcccggcgcggaatgaatgagcccgggccgcgccataaagggggagggcagaggtggagcgatggggctggtgaggcggggcctgcgcgccgggggcaatcgaacgcggcctccccgcgccgaccccgcccccgcgccggccccaccccgagccccgcctcccaggccgccaaggctgcagagagctcgcgcgggcgtacgattctggcggcgtgggggcccaggcagccgccgcttccagaaggttcggtggcggttgggccgcgccggtgcggggaaggcccgctagccgcggcagccgcgcccgacccggtggcagccccgagggaagcgtctggggcggcctaagtggcggagcagggcggacttgggccctcactctccgcgcggcggtaaatatttgtgctgggcgttcccggccgcccgcgccgccgattcgctgccgcgcccagtgcctgggcggccggatgaggtcagagcggaaggcgcggcccgggctcctggcagtggggcctgattcccacccccgcccccaacccaccccggcaccagtcgcccgcatcgcggctctcgctaagatcggccctaagagagaatggaaggctgtttcctagaaaggagcattggtggcggctgctgggaagacacggggaatggaacgggcctttgcttccgcagcacaaagcgtcacgaggtggggaggaggaaaggccggcgactatctacaccgccgcctgcagcttttactgggagcgctgagcgccagcctggaggtgcacgtgttgcagtgaggagccctgaaacatgcgtgttttactgcacaagatgtgcccttgaatggagtctaggccagtcggggtcaccaaaaaaaatccaccaaaaaacacccaagaagggagaagcggtcaccccccacgtgctggaatgacagctttttacttgctaggcagttggaccttttccgaattttctacaatgcacatagatttgtacttacatctttaaattaaaacccacgcaactccggctccctagtgcaatttgaacaacccatttacactcagctaggtagctctgaaggaactgtgcctcaccccggtcacccttgagttaccagaccgtggaggcagcccacagcatgatctgtagctcccagaagcaggggcagtcaaagtcagaactctgtgatttcaagacttttatactaagaattttgtttttctgttttctttttttttttttttttttgagacggagtcttgctctgttgcccaggctggagtgcagtggtgcaatctcagctcactgcaagctccgcctcccaggttcacgccattctcctgcctcagcctcccaagtagctgggactacaggcgcctgccaccacgcccggctaattttttgtatttttagtagagacggggtttcactgtgttagccaggatggtcttgatctcctgaccttgtgatctgcccgcctctgcctcccaaagtggtgggattacaggcgtgagccaccacgcctggcctgttttctttttttgatatagagtctcgttctgtcgcccaggctggaatgcagtggtgtgatagctcactgtaacctctgccatccagtttcaagcaattctcctgcctcaaccacactgagtagctgggaccataggcatgcaccaccacgtttggcttatttttgtatttttagtacagatgtgtccagaattggtgggttcttggtctcaccgacttcaagaatgaagccgcggaccctcgtggtgagtgttacagctcttaaggtggcgcatctggagtttcttccttctggtgggttcgtggtctccctggctcaggagtgaagctgcagaccttcacagtgaatgttaacggctcataaaggcagtgtggacccaaagagcgaaagaacaacactcctacagcgtggaaggggaccagagtgggttgccactgctggctcgggcagcctgcttttattctctcatctagccctacccacatcctgctgattggtagagcagagtggtctgttttgacagggtgctgattggtgtgtttacaatccctgagctagacacaaaggttctccatgtccccaccagattagctagatagagtgtcgacacaaaggttctccaagtccccaccagcgtagttagatacagagtgttgattggtgcattcacaaaccctgagctagacacagggtgctgattggtgtgtttacaaaccttgagctagatacagagtgccgattggtgtatttacaatcccttagctagacataaaggttctccatgtccccaccagactcaggagcccagctggcttcacccagtgggtcccgcactggggctgcaggtggagctgcctgctagtcccgcactgt

SEQ ID NO: 20 - DNA, 4001 bp, Homo sapiens
aatataatatatattcctacatgtgattccccagtccttctgtaccaagaataaatagagaagaattgggggaaggggagcatcagagatgggctgtatacaaaatcataaggaaaatttagtgatctaatataaaaaggcaaagtaagagactgaaaaaaaaatcaaagaatcaaaatgaaagaagaaatcccggttccagagagcaagtggtaaagccagagtaaggctaactagaaacctggtaatagaattaagtgccttccaaatgtatttatttatgtggaaaatgctttagaagtttaatttcatgtgcggccaaccttgaaaaatgggtttccagttgtacaatgtaaagacacaatcctgaaggtttctagaaagcaactgttattatgaagagtatacctaacatcaattttggacaatcttttcgacctcctccaacatcaacctggaagaccaacgatacaaaagcactccacaggtgtaatacctgggagtttggggatttcaggttgcctgttcctcttcactaggcctttctgctataaaaagtcacatccaggaaagataatcatttttttttaaactatttgtgctttagtcataattatcctgacaaaaccagacagatttttaaaacattactgccacagactagcccattttaaatttgttccgacctcagatccctcccactataggtttagtaaccttaaatagaaaaggagaaccctagaatacaacacttgttacaaaaaaaaacttcaggagatctcaaatggcctccagcaaaccctgagaaaaagcagttataaagtttgtttccaaaggcaacgacctcttatccactgtaatctcagttaagagtggttcctatcactaaagtcccttcagcccttcagctctgacaaaccaccttcaaaatggtcacacagaagtgcactgcacccttgtattcaagttcacctagacccttaatagaaatgctgacctggggcactactccacacctgctgaatcagaatctgcaacgtagcaggatccccaggcgactcccatgcgtcttaagcagcgcttactgatggctgcgccatcagggcaaaactggaagttccggggctgtcctaaccccagcaggtcctttgctcaagagcctggggagtcactggctactgctgttttcccttcttctggacccaacccgagccccgctccgcgcgagtaaagctctgaagatgtgtgtcagggcgagactcctggcctggcacacggtcctcgccccaccagccccagcccgggccgacctctcacctgctcctccagcgggagcggcttgagaggactccgagccccgtgtcgaaacacgacctgcaccattttcaacttcagcaggctgcggtcgaccggacactggccatcggcctcctgcagctcggccagggccacccgccgctggtgcaggcagtacgccagcgaggtcaggacgcccactggggtccacaagcgcatgctgaacacaccagtgatcatggtggtaggccctcgctgccctccgggttgaggctgcaggaggcaaacacaagtcttctgcgggcgccggggctcagcgggcgcccccaagtccgcgggaacctgcggatgcgtacatccagcccttcagcaagcagggaccgctgtgcctcccggccctgagggagaccccgagtgggaacgggggagagaacaagaggtggcagcagcgaagagtccctgggagttttaacccgggtcggggttggtcgctcctgctgcacaccgggccgggggagatcggatccttatcttttgcccgacgaggaacattaaacttgtatttcaagtttggcctccagcactcttgaaggaacaggagccggccctgagttccctggcggcagcggctccaccagcaaggactactcgattccacttttctataagcaagctcctacccacctcctcacctactcagggacccgtcccaagtggacccgcgcacaggagcacgggaaaacgagtcctgtggtgacacctcgcctggagactcagagctgcggaaactacaactcccacaaggctgcgcgtaccgcggctcccaagaagtggcttgtacccgcccccctcgcctgcgggcctcgcccctccggcccagccagccgttttccaggcgtggatggcccacggacgtgcctggtccggcagtggagtggtagtgaatctgtcgggccatggagtttgccaggcaggaggatcgcgagcgcaggagtagaactgggtggtggaggggagtagtttgagtctagttttgaatgtagaagacttccttccagtcctggaagcctggttgctgcagcgaggagctgagacacctgccgagtgattgccatttgcgaaacacagcactaggtgctttatatttagtcatttactactcccttctctgtttttaaaaaaattctcaagcttaagtcattgtaatcatgtagaactttcaggtcactgatgtgtttacttccatccagaatacttcttgtggaaaaagccaggccttgcctgtgggtgtcccagtgattaagaacctaagaggcgccatggctcacgcctgtaatcccagcactttgggaggccgaggcgggtagatcatgaggtcaggagatcgagaccatcctggctaacacggtgaaaccacgtctctactaaaaatacaaaaaaaaaaaaaaaaaaaaattagccaggcgtggtggcgggcacctgtagtcccagctactcaggaggctgaggcaggagaatggcgtgaacccgggaggcggagcttgcagtgagccgagatcgcgccacacgactccagcttgggcaacagcgcaagactccgtctacaaaaaaaaaacaaaaaaaaacctaagaacacagaacaatgccagccttaccacctgctagtctggtttctgttgatatacaggtatcccaagcctgtgtttccagatctttgcaacaggacacaatctgggacccactatgtgtctatctccaaagatcaaactgggccagatgtaaagacaacatacttacagagcatggctcctggcctgagaacaaattctgttcaccaagctggaaggttctgagtgctcccctccctgatgcagggaggagggtcattttggaacactacatattgtcacaattttctccctagcccagccaagggactcacttttcagagtcttattgtgtgtgctgatgtgattaaaaatcgaatactgtttgctatggactcagttgtgtcccccgccaaattcgtacccactaagtgactgcatttggacataggacttttagaaggtgattctgtcagaggcatttgaaccatagtgactccatcttgaatagcggctgggtaaaatgaggctgagacctactgggctgcattcccaggaggttaggcattctcagtcacaggatgaggggggaggtcagcaggactggtatcacaagaaaccagtcaaaaagaccctgctgataaaacaggaagtggtaaagaagctggccaacaccaaccaaatgcaagatgttgatggaagtgacctatggtcaaactcactgctcattttacgttaattataatgcattagcatgctaaaagacactcccatcagcactatgacaatttacgaatgtcggggccagcagttaccctatatggcctaaagtggggaggaaccctcagttccaggaaatcccactcctttcccagaaaattcatgaataatccaccccttgtttggcatataattaagaaataaccataagtattttcagttgagcagcccatgcccctgctctgtctatggagtagccattcttttgtttctctttttctctaataaacttgctttcactttatggactcgccccaaattctttcttgcccgaggtccaagaactctctcttggagtctggatcaggacccctttcc

SEQ ID NO: 21 - DNA, 4001 bp, Homo sapiens
ggaggaggcggccgtcgccatctcgttctcgaagtccagggccacgtagcacagcttctccttgatgtcgcgcacgatctcgcgctcagctgcggagggcagaagcaggagaggagccctcactcaggggccgccgccggccctcccgcccggggtgcaggggcgccgcgcacctgtggtcacgaaggagtagccacgctcagtgaggatcttcatcaggtagtcggtgagatcgcggcccgccaggtccaggcgcatgatggcgtgcggcagcgcgtagccctcataaatgggcacgttgtgggtgacgccgtcgccggagtccagcacgatgcctgtgcgcgcgcgggagagagtgagtggctgggggcgaggccgaggctaggctctcagcgctagcggcgggggcgggggcgggggcgggggcgggagaggggactgggggcagcgggcactcaccggtggtcctgccggaggcgtagagggacagcacggcctggatggccacgtacatggcgggcacgttgaaggtctcaaacatgatctgggtcatcttctcgcggttggccttgggattgaggggggcctcggtgagcagggtggggtgctcctcgggagccacgcgaagctcgttgtagaaggtgtggtgccagatcttctccatgtcatcccagttggtgatgatgccgtgctcgatagggtacttcagggtcaggatacctctcttgctctgagcctcgtcgcccacgtaggaatctttctgacccataccgaccatgacgccctgcagagccgagacaccacgcacccgttaacgccgctccgggtggcaccaggctggcttacgcggggaccccgagccggctccctctgcggaggggcagcctgacctggtgtcgggggcggcccacgatggacgggaacacggccctaggggcgtcatccccggcgaagccggctttcaccaggccggagccattgtcgcacacgagggcggtggtctcgtcttcgtcgcacattgtgtctagtttctgcaaggacagggagaccgcgaagaggcgcggtgcatcagcgcagaagtctcagcggcaggggggggtaagcctggctggccccgacgtcctccctccccaggaacctagggacatctcctgccggagccactcaaattctgccagggcggcgaccaggggttctcttctcgacctttgccccggctaagggctgccctgaaccaggaaaaggggcacagggtcgcgagaccccactgagaagtcctctgtccacatagccaggggaacatgttccccaagacctgtctgccctccctgcctgacacctgttccaggagctggacgctagtgcccatcctctctgcgcctccctgaccacatctgtcacctagggagataaggcctcagcactgcctgcttgctgggccagcgtgagggtggaaggagatgcccatgggaaaggcgttggcaccccatccagggaagagtggcctgttaggaaccctgtgacatttcaaactcagaaagggccttttcgcctgttggaaacccagaatgggtggtcctggctgctcgctcattcgctctagcgctagtttggaagggaactgccttggcgacaactaaagcaaaaccgtttatctccctaggcacatcctacatgccaggtaaaggagcccaaaggggctagagaaaaatttggagaagtctaatttccagaggctgactgtcttgcctcctttttaaagcgcgtgtggctccggagacgaggcacagcgctcagggcgcaggcctggggctgaccaggtgaaccgactgggttctgccccggagtccttcaggttcccctcggtagtgccctgtccccctgtcccctcccaactcctgccctacctgggcgggtagctacaactgctactctcggctcgggccctggtcgccgcggaggggaagcgaggcttcacttggcgctgtccgctgcggtggccgcttgtccctctgctcaggttttatatagcccgcgggcattccctccgcgccaccccgcaggaatgtcgctgcccttctcgagccatatttgggtgttgggcactagagccccctccctcggccggttcgcggcctgggcccccgcccgggtcccctgcgttgaccaaagaaggagcgggttggcccggtcccaggtaacgcgggccgggccgtatatggagtgtctccctagcgggtttgcccctcctgacccgacccagttgcccgccggaggggatggggtggggcgagggtcaccgcgttcgccggtgggtgcatgtgtgcgcctgcgctccgggaaccgcacctgtcccaaaggcctccccaaccatgtccactctgagcgccctgggcgctcgggaaggtgcctgactgctgacttccaatatttcaactcctcttcgggttctttgctcagatccccaaactcccacttgcgactaccgggaagagggagtcgtgtggagtggtgggcttgggaggattggagaagcagtcactcctgagtctcaggaagggaaggaaggcgaactccctctcctttacgcccctggaactccatttctctcttcccacccccgagctccctgaatccaaaaagctgagccacgtcgaccccttcccccaccgcacagagggccaccggcggccggagggcgcgcagctgtcgcaggatagacaactggcggggggaggcgagggcggagcgccggggaggaggcgcgggggctcccggggataggcctgtcaggcgcaaagcctgagcacacggagctgtccgcctcagggacgcgcagcgcccttgggtctcctaaagggattgaaggggtgagggttcccctcctgtaggacgcactggccccaggttttggtgggctgaggccctcccccagcctctttggtggcactatgtgtgtccctctcctggggctgaaagacaagggtcacaacccaggactggctagacctggagtggaggtggagatgggtgaggggctcttcctagatgaggcttagctggtccttcctcccaataaattggagggggtggggggacaaggacgcggcactctaggatgggtggcagtttttccttctgcaaaggctgaacaaactcatctttatatttagaggatgatgcctgccaaggccgggctgcctcccagtccaccttgtagtcatcatttaccagagcctgctgcaggttctatttatatcactgatatatggggctatgcctttcagattttctagaaggatttggagctacttatggtaaagtagagtgggggtcagcagaggttacccagttggtgcctgtccctctctctctctctctctctctctctctctctctctctctctctctctctcctttttccctaagacaaggacagttctaaccttgtggagggcacaggaggagcagtcttctgtgatgaactcagggacatgctttaagggggtacatcagtgatgtggtgtgggccagaacagaatcactcatttttcggatgtgcttaagtgctcctaaaatagttgcaattcacttttggtagtggaacccagcaactgggacaggtgtggattctctaaaagggggatggaagcatatgcgaccctcctctgtagcccacatcatggcagttcatcccaaaaataaacaagtattaacaaaaatgttctagtgaataaaatgctaccttcctaaaaatgatcaattaaaaaataaggagtttgactagtatagggactatgcggtgaggataaagtctcctatggttccatatttagttcttccaagtattttggagagtaagtgaataattgacagaactgtatttcctttttaacatcctgtgtcctcctgtgtcagcgagtagtggagatactagaaaaaaaccacttagcaaatgagctgcatgtaacgtaaggggactagcttacatttgggccttg

SEQ ID NO: 22 - DNA, 4001 bp, Homo sapiens
tttgttttattttcagcagtctcagccttgtggctgcaagaaataagaacttccttaagggctgccatggaagctgtctgattctcagactgtggctcgaaggaagagttaatggacctgggcttgtcattttctatgtcattatctacacatttttcaaattcttattatattattattttttagagctagggtcttgctctgtcacctggctacagtgcagcggtgcaatcatagcttactgcagcctcaaacccctgggctcaagcaatccgcctgcctcagcctcccaaagtgttgggattaaaggcctgagccaccatgcctgtgcccggcctgcctatgtatgttttaaatagagcatagtatctggttccttgaagacaggagccctcaaaaggatccatcccaccccacagttctcacagtcctcattatggccacacagtcaagtgcagcatcactctggctcccaacagacgtgcctcaggtggcattttgtcttaaccgcaaatgatagactcatataatgtcaccacatgccttgggtaactagcaccccatttcccattggcaaggaacttgacactacacccaagcccaaaatcaccagaaaaccactcccaaaatggtacctctgtggttccatctcctgatacctattcctgacaccaattctgtatcagtttgggtccagtcaaggaaaggacaccatacagtgatttttacagggaaagtttcatatgaagaattattaacttataatagagaactgaattaacaagaaattgactgataaggagtaaagagaacgataattaatacagaaacagcagacgcaaggagcaaccacaacccacagagctgagatggagtctctgaagaccagaccccatccagagctgtgataaacaaccccccgctaagaatcccccaaaccagagctggacaaagctctcaaggaagaacccctcaaggccaaggtagagtccccaagaaagagcccctgggggctttcataggttccccaaagataagtcccccactagaggtttaaaaaaaagttcccaagaagaggcccccagggctgaggccccctgggaagagcccctattcaagggataagatagagccccaaagaagagctcccagagctaccaaggaaggggccccctacccagggctgtgattgatcccccaaggaagagtcccctccgaaggctgaaataaagtccacaaagaaaaagcccctgagggctgcggtagagtcccgaagagacaccctcctgccacctgtgacagagtaaacgtcctcaaaaaaagagccctcccagggctgacgtggagcccccaaggaacagccccccaccccaggactgaaatagagccccaaaaagagacccccatatcaggctgagatagagacctccagaaagagcccctcaccccagggaagggaccctccaccaggctgagataaccccctccaggcggtgcccccacaaggggctaagcttgggcccccaaggaagggcccccagtcccacacatgtggctgaggtacagccgctatggaagagtctcctccaaaagctgaaatcaagtccctaaggaaaagcccttggtctgaggtagagcctgtcactccccaaccccacaaagaagtgccccacacacaaacccttgggggctgacagccaggccttgcttaagagggcatggctgtgccacaggaaggacaaaaaaaaaaaaaaaaacagtcaggggccacaaccagccaaagttagaaattcaacttttagaacgtaccagaaatctgccctgtaagatgccacaaaagctgctctcagaaacagtgtctcacaagaggcacccactgcaaaacaacttgaaaggggtgctgtgtgagctgccgaactcagctgcacactgcaaacgcctgcacgagagcggctgcacgtggtgccgcagcctactctgtgagcacgtggcaagcaggaagcggaacctccccgctgctggggctccccagcgccctctactggcaaagcccagcatgcctgctggccagggagaaaatttaaagggcccagatccatttttaccaagcaggcaagaagggtgaatgtggagcggagaggcaataatttgacaaccagcaacaatgaaatatcagcagtgaaaaagaaaataactactgatacataaaacaaatgcattaatcatatacgtattatgctgagtaaaagaaaccagacgcaaagcagcacaatctgtaagtttccatttacattatgcacaaaattctctgaaaagaaatttagaggaaagagactttagtacagaaaacagtttgcaaacttggagatgcaccctccactggaaaatgaaggggagttcccaagaatgagggaagcatcaagttttgcgcaaaagttcctgcccaggttcccaatcagatcaagatgtgcaaatgaaggattgaaacttgcttagttctgattggtcaatatagctgagctctcattggttgatacagccaaaccctgattggtttatacacttgagccctgattggttggttcaggtgagctgagaaagtaccaaagataaaaaggtgcaggttttctggggaagtcagggtagttgtgtaaccatagtcagcaagtggctgcttcattctattttaaatttaggcccacttacccattcttatttggggggggggtagtatttatttattttgtagagaacagggtcttggtatgttgcccagtctggtcgtaaactcaggggctcaagtgatccgcccaccctggcctaccaaagtgatgggattacaagcaagaacagcggagcctagcccacttagccactcaggatccatcttgaaggtctggccctttcaggttcacatttgttcacagaagttcaagaacaggcaaagcaacctacagtgacagaaattaaaaaaaaaaaaacaggtggagatgggtgtatttagctggaagagggcacaatggaattttctagggcaatggaaatactctctattgcaattggggtgctgtatacatttgtaaaaattcatcatactgaacactaagatctgtgtgttgcattgtagataaattatacctcaatttttaaaaattagcccccaaacttggtttcaaatccagtcactgtgtactacctgtacacagtgggtgatatggtttggctttgtgtcctcacccaaatctcaccttgtattttaataatccccacgtgtcaagggtggggccaggtggagatcattgaatcatgggggctgtttgccccatactgttctcatgatagtgaataagtcttacgagatctgatggttttataaacgggagttcccctgcacaagctttttgcctgccgccacgtaagacgtgactttgcccctcctttgccttccaccttgattgtgaggcctccccagccaagtggaactgtgaatccattaaacctctttcctttataaattacccagatttgagtatgtctttattagcagcatgagaacagactaatacagtgggtaaacaaatattgttgaataaataagtgcacacatgaatcacacattctttttgctccctcacagcaaatttctgatggttcccccaaattactaagctattggcctgcttttctgggctcccatagtcctctcctcttagtccggttgcagcttttattacactaatgttagcttcagagaggcaaaaatctctgcttctaccagagaacccagcatgtcttgagtgctctgtgcctgacactcttttcaaactctcataggacaataatctatgcggtagttactcctatcatccccattttacagatgaagaaactgaagtatagtttgtcctagggcccacactctttatcactttgtcttggaagtcagaccatcctaggtgcaaatctcagctcttccacttactaaccatgagtcttgggca

SEQ ID NO: 23 - DNA, 4001 bp, Homo sapiens
cagaagggatgtcaatgtggcctctggaaactgtcattacctctatcctgctactgtactgtacttaaaaaaaaaaaaggcaacagaaagcactgtgattagaccatcactttcaaaaatgatgggcagactacctgtccaattccttagctattttacaattcctcataagaaagcaatttttaaaacaaagacccgggagttatctttttttttaatccatgaaaagtgcagtaatcaaaatttggggaaattcttttaaaaaaaaacactcactgctaaaaattaaagtcactttttaacttcgtgctgatggatgatgcatcagctggtccagatgacacattagtaatcctcatgcctcgtacttccttcacaatcagtcctttaaacaatagtagacggcttgaagttttgtttttttctatttattactcccattttctaagaaaggtagggatggtaaaagccttaagaaactcggggagagactgaaatgtagctaaattagagctttaaaataataatagtaaatggtattttaggagagagggtagacaagagacatcctgatataaaaatagtgcttggttatttgataatcatctctccttccagctaacgctgtttgctgcgagaggagtttgggatgtgtgttctccaccatcatacccctattcaccaaatactatcgcacaatcagctacagtacccattatacagagattcccatacacactatggtcaccacaggctatccacctaaagcaggtccttagaagggaaatctatcttgccccacgcccagaaaaataggcggaaaaaagttcagagcgtttggcttttgccataaccccgttatcttaaggttgggttggcaggtctctgttgtcatgtctgacccaaccaggctccctgcctagtcaagtaagaggcgggattaagcctcctggtgagcattccctatttattccagccaagaggatcaagaggaaaccttgaaaaagtggaatgttccactgggcccccagagaacgccaatcaaaatggggagggagcttttagaagctggctgactccttcgtccctgtgtgcttacctcaatgaattataaatagagtgtgaaataattgtcactatcggtaaatgtctagtgttcatacaacatccctctccaaggaacccaaaagattgaataaatgactttccatgactctaggggcagcccggtggaaattgcaatgaagctgatgttcttttgcttctttcaatggggaagagagaggctggggtaaatggacacaagcgggccaggagagtataactcgggggccaaggtcacagactcaaggggtcaggagcagaccagagaccccttcagatctggtctaacgcgggttggtgtgaggaacagaaccacatctgtacctccgatgctgctagcgcgcgcgcacacacacgacgcccagtgtcctgcctgtccccggacgtgtcctctttcctaaggggcccccggggctgcgagggcacaggacagcacagcacctccacaaagcgccctctcgccagtcgccaggccacgcggccacgcgcacgggagccccgcgggggacccggccccaccacgcgcgggcggcccgcgggcccctgctgaccttcctctgctgcttctcccaggctgggtccaggagcaggtcgcggtcccactcctcctcctggatcatgtactcatcctcgtcgtacacgtagttgtactgcacgccgggctctatctggttcatggcgctcggttggccggggctgcggcggggcgcgaggggctcggacgcacgggctgactggcaaacggacccacggaggcggcgggcggcgggcggcgggcgcggggtgaccttcgcgcggctcctctcggggcgacacgcctgggcgctgggtctcgggcgaagcaccagctccggctgcgagcagctgccgcgcggcttaatagccgcgccgcccgtcacgtggccgcccggccacgcccccgccgccaccgcccccggccccgcccgtcgggccccagccgccccgccccgagcacgtgcgggcggacaagggcgccgggcccctccactgtctcccctgcagccgccgcccagaggccgcctgcacgccttccgccgaggcctccgggaacgtgaggggagcggccggccccgagcagagccacgcctgccacccacgctctgagagcggctggttagcggcgcggggtccgtcggtgtcccgggtgggtgatcgcgagccaggggagggacacctaagaggctgggtccctgaccaccccaacacagccaagttttccaaatatcatttggatattcgcgttttccatatattcccacatattcattggagacccctcttctctctctctcatctctctctcgtgcctctctttccgctcatcggtccctctctcttgtgtctgtctctcgtctgtctctctctcatctctgtccctctttctccagtgtctctctctcatagatctctctcatatctctctctcatctctgtctctcctgtgtctctctcacatgtctctctctcctctcatctctctctctctctcgtgtctcactgtctctcatctgtctctcgtgtctctctcctctcctcttctctcctctgtctctctctcccgtgtctctctctctctcgtctctctctctctgtcgtgtctctctttctctctctcatctgtctctctctcctgtgtctctcatacctctctcatctctgtctctctcttctctctctctgtttctcttcctccctctcacacacacacacacatacatacatacaggcccctaaggagtaaagtttaaaagctacagaacccccctcttctttctctcctcctcaccctcacctggggaaatcaaggcacaggatttggatccatcctattaaaatgttaggaaccaaaccaaaggcaggaagtgtcagctctcacctaccgggcataaatttaagagagctgacaatgaagggcaagcggccagcttcgtgttatatttccatgtcgccctgtgggttgcacttaacgccttttcatccccctagtgctggctagctgttccctatcagttatgctgccgcaggaagcaaaatgaggacccttgggacaagtaggctgaaatttttaaatcaaatatgtattaagcaactactgtaaaccagaggttgccttaggcaccagacgagctgatgggatgcctgcctgcaattcagtttatatctcaattgaataaacgttgcccacagatgctacagaattttttgtgattcagggctactaatttgtggacatgtttcaagttgagtttgtctggatttatcattgttccttagaatttttacatcactcaccgttactgtttggggctttatgcagaaagataacaattagcaaacaggttgcattaactttgttttgttttgttttgttttgagatggagcttcactcttgttgcccaggctggagtgcaagagcacgatctcggctcaccgcaacgtccacctctccggttcaagcgattctcctgcctcagcctccggagtagctgggattacaggcatgtgccaccacacccggctaattttgtatttttagtagagacggggtttttccatgttggttaggctggtctcgaactcccaacctcaggtgatccacctgcctcagccttcaaaagtggggattacaggtgtgagccaccacgccccgccacattaacattttcaaaaacattctcactaggatgtaaattcctcaaacgcagggattttgtctcgtccacagttgtagaccccagcaactacaggcgtgtccaccgcacagtggtgctcatttgttgagagaagtagtatccctggaaatagtgactgagctaatttacttggatttaaatttaaaatttagagtttatattttggattaaaatcatactct

SEQ ID NO: 24 - DNA, 4001 bp, Homo sapiens
ttaactttgtttccagcattctgcccccaaacaatgatgctataaacatcactgaaagtaaaaacaaacagaagaatcacacttgctaagcagaagtgttgattctttgtacttcctttgggagcaggacccctgagtttagagggccctaaacaaacggtgacttctgttcccgtctgttcctatctgctgagagcggcagctccaccctgttcagccgcccggcctcacacaagcagagccccggccctggcatgctaggtagggcccacacagggaggggtttcttgctgagccgtcagaacctggtgcacgcgctagtccccaccatccctgccgactctctcagcccacctaagacccttgtttagaatgcggactccagcgccctattcacctgaggcccagggccctactttcatacaaactgcagatggacacagcctggcctcagcccaggctttcttgggaggaagcgaaggggagcgggtgtggaccaagacacttcacagattcactgtcagggccagaaatgactctgccgcccccaagaaggaactgagccgaggtggccaggtgttccggcattggtcctttattgaacatcctcccaaagctggggctagggttcaccccccacggtacccaacgagaagcggccttcagaagcatcttctctgcaccacggaggtcccaaactccttgaagtctgcggcggtgacccacatctgcttgaagctactcagagaggtgacgatggaggctccaatccaggtggagaaccaccggtcggggggagccgtgatcttgatgggggtgtccttggaggccagctgctccagctccttgagaagccggtcatccagcccgtggaacagggtagtgccccccgacagcacaatctccccaaagaggatcttctggatgtcggtatcacacttggtgatgctgctggagaccatattcgagagcccggggctctggctgcccagctgctggggcacgaacagggcctcgggcgcctggtgcagcgggtccccgaggctgatgatgttcccgtcgggcagcttgtactccctcaggacctcctccggcctccgggaaagctccttctcgggctccaaggccacgtagcacagcttctttttgatgtcgtccacgagacccttgtccagctggcaggggaaggtgtggccgctggccaggagcagctgcatgaggagctccgtgatgtccctgcccgccacgtggagcttggtgactgcgtggggcagggagtaaccctcaaagatggggacagtgcaggtgaccgcatccccgctgtccaccaccaggcccgtgacacaggcagaggcgtagagagccagcaccgcctggtccgacaggtagaaagcgggcacgccgaagttctcgaacatgacttctgccatcttctcacggttctccctggggttcagggagggctccgttgcaagcaggggctggtcgctgggtttcacgcctagctcccactcaaagaggtgcttccagagtctctccacgtcatcccaccctgtgatcaggccacgctcgaaaggggagtgcagctgcagggcctcctgcttgtacagggcctcctcccccacaaagtacttcttctggttggcctctgctgagggagcctggaatttcaggtgccccacgatggagctgaccatgtgccggggtccaaactccccagacaggcccgctttgcagaaccccgagccattgtcaaaaatcacagccggggagtctaaagcgtgcggattaaacatgcccgcagccttcccttctcagcctcatcaaaataaagaccagccctccagggccgctttgtgatgcaataggggatcccacagctcttcccacagctctcggggtgtctcaaggcagggctagcaccgtgcccgggagccctgcatcctcagccgcaggtctgctctccctccaggtggcctgggcctgctgaggcctcttccagggggccagggggttgtctcctaggtaacaatctagccaaggcaacgattgtcctgagcctcagaggccctgggggtggggctctgagtcccccatcccccacagggtgaggtgagagagagagagagagacaagtgcatcctagggcggtgctggacaagcctgtgggctgaggcagagacttagctttagagtggagagaagcagcccagcctgcgtgcaccctagaaaaccagcttctctggcccctgagctgcaacttctggggtgacaacacttccctttgctaagggggaaaaccaagcaccaggtcggaggggtgttgtaagcagttctgtcccagcaggcacttagaatgtgcttttgaatagtgattcccccaggaagctctcagggatttctcctccctccatcccattagtcctggctgtctgtcccactgggtagaccctattcaaagccctctgggctgctggccctttgtccaggaatacatctctgctctggcttgaggccagcacccctcattcctctctgcagactctgaagtgccagcacacaacaaagtccagcagccatagagttgggaacccaacagccctgaagatatggcctgctggtttcacatgggtagcctggattgcagcctgtgacacctctctgtgtctatgagctgccacacagtcaggccacaaccacagagcaatgctcagaggtgaccaggccattaaaggtcaaggcctgagcatgaccaggaaggaggcaccgggccaggccaagggcacccacaacagtgcacgcccggcactcagacccccgctttgtcttccgcttggggagaaagtgggaggggatccaacctgggaaccagcttcacttttttcctaaggaggttggaggtggccttggagaatgtgaggtttattctacctctcctgtcatatccacaatcatgctccagcccagcttggccccccagagttctcccagaggacgcctcccggggtcactcccttcctggagcccctcagctcctgctggtggccccctctgtgtgtcctgcctgccctgctgacccaccagcaggcattaatccgatggtggtgtagacacatgttgtagatgggcagtctagacacgtggtacagacatgtggtgtagacacgaggtacagacgcatatggatgtgccgtgtagatgcatgggatagatgggtggtgtagacacgcgcggtacactcgttgttgatgtgtggtgtagatgtgtcttgttgacacgtggttttgtgggccccactaatccctgggtggtagtcaacaaaaacttgattattgaaggattttcctagaggggacccccccagagggaaactgagtcaaaagcgtgccagggcaggtgtggctcttaaatctccatttctctggaaactgtggcagccaccacacagcttgcttgcagtcgtctcagagaccccgggctccctgaggcagtaggtgtggacggaggcactgacccatgggcacggcctagggccctgaggcctccttcgaaacctgttgacccagacgctggagctcctccctgcccacatcaaggtcaccccgcaggtcctgctgaaggtcacctgaggcctgtgctgggggacacggagagtgtcccggggcaggggcaggcaccatcccgaccctgctcctgttcgatagcaggcacgggcagagggtgccccccttgaacgccatcttccaggggcaggcgccatcccaaccccgctcctgttcgatagcgtgcacgggcaaatggtgcccccctcgaaggtcatcttccaggcaggtcccaggctgcgaggtgactcatcctccaatgcctttctggctgtcccatgcagccacattcacaacagaaggaccaccctgcgcgggaagggttccctcctcgctgaactaggagaccacaggcgccagtcctgggaaatacaagtgggcccatccctgctgacctgc

SEQ ID NO: 25 - DNA, 4001 bp, Homo sapiens
cctggcctggagcattgttctggggggttgtgtgcggaggtcaaggaaggtatctgagccaccccttctcggcttcctgcccagagaggaagcaccgtgtaggacccagcacaagccccagcccttcctctgactcagctttagaatggggtgggggggggggggtttggtaaggtcctgactctttccaaatccccccactgagaaaaccgacaacatgagatgaagaaagcaagtttggcttcacaatttccccagtggagatggatgggttgggtggggctgaggcagacagatacacgtgtgtgcagagggagagggagataagtgaagccaggtgctggggtgtggtgggagaggcagctgggcctgggatagacccactacagtgagctctacccaccagctcctcagccaagctttggctttgagacacctggctataccggggcgtgtgtggattcgtttatttattagaggggagtgagagctcacctgaagcacctttttgaggctaattgggagatcgtcctgaaggacctggggctccaagggctccctcggggccttctctgactctgcctgctgctcctcagtgccacctgcaggtcccaggacaccccaagacagtactgagggaatcgacagcagggctgggggtgacaggtgccctcagatccaccagctcccagcccatcaagacccttaggtacctgaggggcttccacattgcatgctgagacttaaagaagaatactggaaggagagggtgtctctctaatttatggctttccacccaccaacccattcacaagtccccaagaaagactttcggcttgcgcagcctgtggccctccttgtccccttccggccaatcccaggttctcacaggaccctccccggttcccactccctcccaatcactctccccccacttcaggaacgccccctctcgagactgagctaagccttgtggccgggtgcccgctcaccctccccttcgctcacatcggagatgccaggaacgcccatttctgggtgagcagtgcaaacacccccacctccctaaacaccctcatgcccagtcaggcacacccgctgcctacagcctctgcttcctcctcgagcaccccccacccccccaacacacaatggccctctctcctccggacactccacccgcgcctgccctctcggtcccggcccaagacagcagcgggaagtgaaagttccaaggaggagttggtgtcccagcctctttcctggccaattctcccttctcctggctcatctcgggcccctcccgctcggccaggcactggtggcaacagcaccagggtgaggagtgcctggcggccccaggcctggaatagaggctagagagaatcctcttcactaaaccctacaagccatgcccgctcagcgccctggcaccgggtcgaacggttagctaggccccagagcagcgaagatgccagtcctggggagcagcgaccctctcatcacgatcttgaagtggcgctggacaggcccctcggtacctggtacctgagcctgaaagtgtccgcagggaccgcgcagaggatgaccaggcaggaggcagggggcgccggcatcccccctccttctcttttcaccccatcgccaagtcaccgggccctaggcccaggacagcggaccagggcgggccgcgctctggctgggctctcccagggtctccgtccggccccattaccctaatgccttccgactttcctgcacctccctcccagtccgccccccgacccactccaggcggaggactcacctatatttgggagcggccaggaaggcagagggctgcccgcgcccaggagccccagggcccagagcagcgccagccgcatggcagcggcgctccgggccgggcgagggcagcaagtgcggaacagcgcgcggaggagcggccggcggccaggtcgcctcggagaacccagcagcgccgcgcggccaccaggccccgccccggcccgccccctcccacccggccccaagccaagctccgcccccggcaaagcccgccccgctgcgcgccgggtgcctcgggagcggggacaccgcccactacgcccgcgctgctcagcgctaccgcttccccgcaactgtgcggagtgggagccggtgcccggtccgaccggcttgggcggcgcgccttcacccggcgccaggtccggacccctccctagtagcttcgcggcctccctgcctcctgtgcgcggcctggctcggagaggtcgggcgggcaggctttcccgactgcaggcgaggcagtgcgcggctcaccccagtccccgacccacgtgaagcgtacagggcattttattaaccgggaaggacggtgcggaagagcgagcaggacgcctcttcaccccgcgtaggcagtgtcgtcgttgctgtcactaaaggcggaggaagagagctcttcgcggggcgtgcagaccgggcaccgctgccgcatgtcgtcccagcacgaccagcagtacacggcctcgcagtccagcgtccggcacacgtaggactcgggcgtctcgggtgcctggcacaccacgcagcgccggcacagccagcggcgcaggagcgggcagccgcggtgcaggatatccgccagcgggtggcgctgttgggaggtgggcgttagcgccagcccgggagcgaggcgggaaagaaggggaactggacagcgtttcctgtctgaagtcgccaggcctgacaattcccgcgtgttggaggaggctgggttggacaaaggaaacccctggagggcgagggtgcctccctccccaactctgtgatggagaatgggaggatgcaccctccaggctctctccaagcggatatcagccacaactctcatttgcactttcctgtaaatcatcttatttggttctcacagtgaggctgagaagtgagcaggccagatcgactatcactgttgctatccccactttacagttgagaaaggtgaagtgactctcaaagtcacacagatagtaaacaatccaacttggctggaccccaggggccctgattccaaaccacaaacctagttcactatgctccctgccatccctcacgacatgtctctacacagttgtcagggattttccacaggccaccttacccaggaagcagccactctttgcccaagaaactccagaggccctgctgcctgccagacaggcagaactcttgggcttggccttcagagccttccctcacctggtccctttctagcctctttcctactttagccctccctgagagctgtctcttctgagccagtttctcctgagactagccctggcacttcgcattccctgtggactgagtctttgcacattctgcttggaatgactgtctggcacatttccatctgtgcattcacattcagtttgcttcacgaccctgtcaaggaatcccagcatgttcttttttgttttttgtttttcattttttcacaacacattcatttggcccctattgtgtgtcatgggggctgggggtatccaggccctagggaaaaagctaagcaaacacagtctcacttttatgaactttgttaggactgattaaataagaatggctgccactcattgtttataatgtcaggtcctgtactaagatactgtacataaattatttcaattctaaattagccgggcgtggtagtgtgtgcctgtaatcccagctactcgggaagctgaggcacgagaatcgcttgaactggggaggtggaggttgcagtgagccaagatcacgccactgcactccagcctgggcgacagagtgagacttagtctcaaaaaaaaaaaaaaattcaattcaattgtcatgtaaggcagatagtgttattatcatctcctttttttcaggtgagaaaactgatgcttggagatgtgatcactgcccagggtcacccaatgataacatgcatgcatatggaacttgctgcatgccagcac

SEQ ID NO: 26 - DNA, 4001 bp, Homo sapiens
acctaggtcaggtattcccatgggtttcatggatagatgatagcctgtgccccagcacatgagattttctgcctgtaaatgagtagaaattatagtcgtatgctctggcaaatcagggatggtttcaacatttatacactgtagcctgccacatattgaatttgcactttcacactttttaaaatttcgaattcctgtaatctcacagttaccaaattgatcacctattaagttaactgcatcatagcactcactaggagcctccatggcatcaggtccaaaaatgctttggcactgcatatatctggatctgcaccccttcctgaaacaacggccttcatacttgcaaggggttccatcctgcttataaacgtcatttgggcaggaacttgaattcccgtcgcagtactctgcaaggtcacattcatttccttcctgcctacacacgtatccagatggacgaaaccgacaatcatgacagcaaagtccaatgctacagttggcacctggttgcaacttacaatttgattggcaacaccgatctttctgacactcctctgtggaaccacagtcacattcctcattgtcctccacaattttgtttccacatctcttaagcacataacctagtcctgggatattatttagacatgttgctcccgaagagatatgtttaaaaaaagagatataactgcaattgctaaacccagtgcgtcctgagcccatgatgcaattaagcctacccctacattggcagtattgttcatcatgtgacattcctacagcatgacccagctcatgagcagaccaggtagcaggggcaaggatatttgtatctagtaaagtactcactgatccagcatattctagagaacacacttttccaaacgaccatgcaagagcatcattatattttctttgaagatataaatgtgcccaatctgatgacaggcgagcatttaatacactttttttatatattacaaatctgcctaaaacttcagctaactctggatatccaacgcgtattttgttaaaatctgtccatacttcaagagcctttaagtgtatcctcatacgaacatcttgaaagtaggtgtccataatcccagtcaaaagaatggcatcatgtatgacttgagaaagattgttgttcacaaacctatacctactttgatcaaagagtaggatcaattccaagtactttgggtgtttataggatccaggaaagtcccttagcctcgccttattctcataaggggccatctgccattctatttcatcatcacttaagccacaaacctgattcccaaactgctctttcttcaggagatagacgacatgttcaaaactgggagaggccttgaggggctcaatttggtaatgtttggcatcaatgttaaatacacctcggagaccccccatgcatgtgcttatagtagctttagagtccagagactctttcacggagcccatgtagttgcagtcctttggtatgtaaggatgatcctccagcagttccccatgttctgtgaaggagaaaacgcgcagatgtcggggcaacagaagtctcttgggccacaaatggaggacgtgcttcttgccttttaactgcagtaggtaggacacgggactgaccacaccctgcacctctccccggaagctcagcttctcaggaatggtgacttcatacgagtcaaactccccttcagggtgaaaaattacatcttcgccaagagacttaaggagcattgtcggaactagtagaaggagcaaacggcattgggagaggaagatctgcactgacctcatggtctgttccctactcagcctcagtttgctattcagtccctgcaactctggcctcgcgagtcagatttctgggggccgccgctagaggcgcctgagctcaaaacccggctcccctggcagggtttccgggggagcccgtagcctcccagggctcggtctagctggcgtccgcaatgcgcgcgtgacctgtccaacgcatccagttcgttttccgggccgtaccgttgggcgcaggtggaagaaaggagggaaacgtgggcgagaataaaagagaaaagaggggctgttggcacgtgggttggagagagggtagagaacaccatcggaaatggagaaggaatagagaaataggaagaacaaaggagaacgtgttaaaggctcactgtatctttgcctttactctgtgtctttacaccttaggacacaggttggaatccgatgttttatgggccactgtcctaacttcattgttggacatttcccagttttccactagggttgcttgtggcaaaagaaaggagcatcagaaccagcaagagtggaaacagcctgaaagtatcagcgtagactccacacccccagccccactctgggcagttcctctgtcttcggctgcggcttctttttagagaaggccctgaaccttagttgtgggcccaggcaacagaaaggtcctgagctcattttgcctgggagtgctttctgctgtttgtctttggggtgccaggggtcagtgtaatttttgtgtgtccatgtgcaatggtgggaagaacctagaaaaagtgcctgttataagagcaaacccaagtgctttctgagaaaggtagatagctggttatgttcctagtcgagcgatgaggctgactccacaaaggaagaagcctctggctcagaaaatggaagggtttatcgtccgtaaaagggcaaatcggaaggtcatgaggtgattctgagggattctgataagagaggaatattttcagttttgttcctgggagattccatctggctgaattacaaggaaaggttaaaaaggaacaggcttgagtcagggagactagttaaaagctcttgtaccaagcaatgttgtctgttggcagaaagcatggccttagggctgataataagcagtacttatggaagactggctcgtttcatgctacacaccccgctatgctctgcataaatcagcccattaaatcttcaccatgaccctaggttataggtactactattatcacccatactttgcacatgaggacatgaaaaccgtaccatggttcagaaggtggcgtcagctgaagcaatccctgtgaacatttaggcaactctacccggagcctgtgttctttactagtcaactctgttgtctctttagggaaggacaaaagttgacagctccaagagatttaaaaccacttagactctgctggacttaatgcttgcatggattctcccagaatgaaagaggcaaaaatgaaaaagaatgttgatgtttctggcttaggtgtatgtgtgtgtcatggttctaaccactcaaagaagaaaaacatcagaacaaatagatttagataaaggaaataaatatgaaaagctctgcttgcaaaatgtagatttccaggtgccagtaaaggagcattgaagaagggatttctcaactgcagacgagtaggcagcatcctctgggctgagatgcctgagttggagctgaactggagtcctctgcacagtggtgctgattgaagccataaaagctgatgatgatgcctcatgggatggtgaggaatgagcagagaaagaccaggttggatcgctcaggaatagtaggatttaaggtcaggctgaaggaaagaagcttgcaatgacctgtgaagtagtggatattgatataaaaagaaaggcagggtaacaggtgattgcagaagcacttcatgaacgatgttatgaccaaaaggtgaaatgctgagcagagttccagaaacactgcaatgagcacaaaggaggttatagaaactttagtgcaaactgtttcggggcactgctgatgagcaaagccacataccaggaggttggaacgtaaattggaggttagaaagaggagatcacaaacctagactgcactttcaagaaattgggtgaaggagagagaaaaggtaagaaagtagcttgggaaccatgtggtagaaaga

SEQ ID NO: 27 - DNA, 4001 bp, Homo sapiens
aaatctcagggcttttgtggtaactctgaggagtcagcagctggttctaagaaggggaggagaaggggacgccacatcccagggctgcgggagccccagaggtgaaagcagcctggactgccgtcaggagggactttggggttctccaggcctgagtgtggctggggcctatgggaccagggctagagggctgggctgcaacgtgtctgccctgtgtggttggaggaacgattcagtcagcagctagggccagggccagagctcagcgtggcggttgtggagggagcgtctggtctggattaaagctagagagggaggagggaggagggaagggaagaagggggagaccaggagtgggagggaggaaaggatggagcctcaggcagcctcgcagtccggccacagtgtgtgaaggggattgaccagaaggaggtatgggataccctccctctcttgccactcctgccctagtttgcagtttgccacagtgattttaaaggcagcatcagaagccagacaccaagccctagggcctcaaacctgactcctatagctgggagtgggggatgaaaatcaaatttggagcagagaaaagagccaaggccaaggggctgttaggagacctttactgctggggactgtgtcagtaggagatgccatggccaggaaggggtggggtggggagagggagcagttattcccagcccagagtctgtgacccacctctgagaaccctcggtgggtctggctaggagaagggtgaaggggagaggcctgagccttaccaagaaaggaggctcatggagaaaggaaaggcaggcagaagggagggaagcagaacggccagaagtgtaagtgggtggagagagggtgaataggggtcagtaggacagacatggcgggaggacaccgcaggacacagactccagagatgcctaccttggctcttcggggtctggggctggggcttccaagaggagccttgacgttgcacatgggaccttgaccgctggcaggactcttccggcgtaggatgtgagccccaggtcccccagcagagttaggggtgcctccctccaggggctggaggtggagttcagccccccgatattgtaacacgcctaacagggctcccccatcccagtgcagagatgccaccgactccggatctccattgatggtgccagtcaggtaggtgccaggctctgctccacccagcagctcaggcgcctggcccaggtactgcactgtcagcccctcgacctgcacaccggagtcctgctccagctctagtagcagcgtctccccaaaggcctgcaagcggcacaacagcctggcaggggcgcccgagccaggcaggacgctgccgttgagcttctctggaaacacgatctcctcctcccgggggagggggctggccagccgggctgagggcaggagagaggccagcagtagcagaagcagccacaccagccaggagagcggcacaatggggagcaggaggcagggttgggctccccacagccagcgccctgccaagcccctcccgggatgcgagcctgtctgggacatggcactggtactgcagctgggagggactgaggccgtctagggcaccaagtcctccacaccctagctttggaaagctcctctctgtagcctgggggcttggactcctgccaaggtcagaggcaaagttttcagaagggctgaggaccgttaaaggaaatggagaaaacttagtccttgggcttgggagaggtgcccaggggtctggcttctccaaactctcctcctgagccctcctttcctggatctttgtctctccctgcctgtgtcttctgcagcttctctggcctctccctctgtaggactctgtctgggccgcttctgtgcctgccctgtctctgccttcttccgctgtgcctttgtctctgtctctttcctcctctgtctctctcgtgcatatgtgtctgtgggtctccctgtgggttctccccagcctctctccgcgccagctcttttaagcatggtgagcctctgcgattgattggctgatctctaagccactcagctgagctctgtcggtgggactcagatgggtgtatcatcgcttcccaaaaaaatgggacttgcccaggggaggggaatctctagcagccgaatggataataggcactgggccagctgatgacatagccttttcccaaaccccacaatcagccctcagctgtctctttccctttttggtgggacagagccccaggagaggcagagagtgagggaaagggcctggccggcatgcacagataggatcacggtcctgggagaattcctgctcttatagtctaacctaccatggcttctcttttctcaaggctccctcatgctgccctttggccctagtggctggtttccagggctgaggggactgagtgagctgcctgagaaaagagggtagggaacaggtaaggaggcatcaagagggaagaacaaataaaagaggtagcttgacatggctcaggatagaactgagcagctgggaagagtaaaaaaggcagaacattgggggaggcaaggagacagtgatcagggagttgactgcccaaaggtaggatgatcctgcttggaatgaacataacagaggcggcagatgacaaggcaggaggggttaacgacttttccttttatagaaggcggatccagggtggcacctcctcttttctaacgtcccttctctccctcaggatcccccttcctgagttaccactacccaccccctccaaagcccagaacagccattccgcctccatttccccccagggttccccctccccacttcctgactccccatttccctggcccagctcccagtagcttcccccaggcttttggccctgctcctacccactcccaactgccctaaaccctcccccagcctcaagtcagccagcccccagcataggcaagacttgctctcaggaacccagattcacccagtatcaatctgggagaatccccacctggctcccaccatccaccccaccttgctctgagaacccagtggttcctggaatatctagtcatcttttctttttaattctccctggggcagggagagggtggagacagcattgtgcatatagggaaattagggtactgggagaaatccattgcctggggtggggaaagtggctggggaggaagaggtggtgttagggaaaggaagcaaattattcctttggctttggataggagggaactcggaaaagaggtcttgggtatgaactctcaaggcaaggaagggttcagaagtaggggcaatttctgctcaccccatcctctggctgcttgtttccccaggaaatccccaggaaggagagtgcagtcagcagtctctttcctttcccagaagtggaccacctcctcttgcctctattcccctattcactctgctttgtcacctcctgtcccccgcatatcatatccgtcagaatacttcctttccccctcccttcctgctcaggtcggtaatacctgccctggtgcctatcacttcctggatcacccacccccttgtgactgccagacccacctcttgacccaccacttgcctgaccctggttctaagccaacggggctgggactagaggagtcggacaaagggtgggagaccagaaggggcaggggcaagaggagctatcaccagagaactctactgcccctttccactcccctatttgagatgaggacaaagggggtgactaagcaatgaaagacaaagggctttagagtggctgcagcagtgtgtgtgggggtgttggcagcagggagaaggcacaaaagctgcagtgtcctaggcagcccctcaggagccccccaccccagtcccagctcaagctgcctccagggccaagcagcccaaagtctatcctgacttctcccaggctggatcaaggcaaataaatgcagtccttcccatcccccaccaccatggccac

SEQ ID NO: 28 - DNA, 4001 bp, Homo sapiens
acactttttggccaagggataagctaaatgggttgacggtttaatctctagagaagaagccggcaatgtaacacccactctgggtgccagcatctggagttggttcagtgagggcttgtttcctgtgcgtctctaccagctggggaagcgggaaggagaggtgcagccggggctgcctcatgccccagccacaggcctctcattctgaagagccgggaagtccatctgaagttcagctttgaacactggagaagtgaggcttggaagccaccccagccaccaagcctgactctctttgcccccttcttctcactttgagtccttcccacccctgctcctcatcccactcttagttctgctttccaggaaaaaaaaaatctgtttctgttggatctgaaaggcacccgggagaggaatccagggagccctcgcattgctgaggtgggccagctctggggcagaaaatgaccaagagaagggtaggaatgtgcctgggggcagacactcagccccactgccctccctgagacctagggttcggaatttgagggaggggtcagagtggctgagccagagcgggcgcctcagggattggggttggggtgggggttgccgatggccactccttcccctggctgggccggccactaaggtcagcaactccaccctgactgaacgggggaggccaggatctccagagaagggcccatgttccacccaagtcttcaggctctgcctgactcttgttactccagctgagggaagaagaaatggggtgatagtcactgcctgccccttctctgatgccgacccctcttcatgccctctctgcctctgcttctctctgccaccgagatctcttctcgcagcccctctccacgggtctacccagtacacataatcccatcccgagctgggtttggctttggcagttccctggagaagtgaggggtgggggtgacgtgagctcccggggcccgggccaggcctggctccctctctggaaaagtcccaccccaccctcccctgcgcagcccggcaggggcccatgccccctcctctgcagaaacacacgcacatttatgcttctcacccctttccatgtccctcatttggtgtcgttcccggcccaggacgaggaaaggagaggtcagaggtggtcactctggtgccagagtagaccctggtctggacaaacgcgggctcctcctggccacacctctccacactgcccagtgaagaccaaggaacagagacctgcgcagggctcaccccttcacccccaggtctccctgctggagagtggttggaccctgtgtttctgggcctagccatggagaatccctgtcctgagtccgaattcccgggccctcagagccctccactcctgggtctggcaggccaccccaacaggtgtctttcttttttgtcaacctcttctgccatcgggctgagctggatcaagggcacccacctgcgtccctcgcggcgaccctgtcctccaagttcaggagtgcagtgggggacacaccgtccgagagcaccctcctagagagagggcaggaggcaccggccgcgcggggaggtcatgggtctgttttccaactttactatgtgacttaggaggaattttggttcactccccgcccgggtgatggggccagagttccacgggatcagactccctccccaggaattcgaccccaggggctggaagattgtccgaggccaccggagctgggtccggggtcgtggcggggtcgcgaccgcacagcgcagggagaggggacgacgcgggcgcgcggggcgggcggtctaacgggacccgggagaggggcggccggggccggggtcccggggaggtctctacctgctctgcgagcccccggtggcccgttaacccttctgcgcccaggcgctctctccaggcaacctcgctccgcggcggccactggggcccctgagccgcgctccggtcacggccgcctcggccgcaactccgccctcgcgcccgcccccgcccagccccgcccgccacgcgccccagcccgcgcccctcggcggccccggggtggggccggtctgcctcgcagccccactcgccaggaccacccaccccgggctgcgcgccgggcgccccccgacggctgcgtgagctgaagcccgggctggcccagccggggtcggaggctgcagtcgctcccgggcgctgtcctcgtgcccggccgagactagggacttaagcagcccgggctggcccagccggggtcagaggctgcagtcgctcccgggcgctgtcctcgtgcccggctgagactagggacttaagcaacccgggcctccgagccgctcgggtgagcggtgcgaacacggcgcggcgcggcgcggcacaggcggggcagcctccaggggcgcctggagcgaggcggcctgggagagccgctggtccgggagggaagcgccctggacggaggtacccgcggcccccgatccgcgtgggtccaggctctcccctccacgcagcctcccctgcaaactcagtcactcctgcctctcccgtgttgggcagtggtggttcagattgctgggacttctatgagcttcggtttttttcctcagtaaggttttacactcgggactcagcgaaaggacagcgtgctgacttctgagtcagactgatctggatttgaacctcagctccagctcttgccagctatgtggtcttcgacgaatacttccacccctgtgtggtgcagtttgctcatctgcaaaatgggactaatctaatatatatgatgggcttggatatgtctctttatgcatttatacatggaagaatgcaccccaaactcagtagtattggtgacatctggggagggatgcagggttgggggaggactgaaaaaggcttttgctttttactctgcgttatgtttattattattatattattatttatttattttttttgagacggagtctcactctgtcgtccaggctggagtgcagtggtgctatcttggctcactgcaagctccgcctcccaggttcacgccattctcctgccctagcctcctgagtagctgggactacaggcgtctgccaccacgcccggctaattttttgtatttttagtagagacggggtttcatcgtgttagccagaatggtctcgatctcctgacctcgtgatccgtccgcctcggcctcccaaagtgctgggattacaggcgtgagccaccgcacccagctatgtaatgttatttttgtgaatttttttaaccacaagagcaatccatctattagttttatcttttttttttctttttttttttgagatggagtttcactcttgttgcccaggctggagtgcagtggcgcgatctcggctcactgcaacctccgcctcccaggttcaagtgattctcctgcctcagcctcccaagtagctgggattagaggcatgcgccaccatgcctggcttattttatattttttagtagagacgggatttctccatgttagtcaggctagcctccaactcccgacctcaagtgatcctcctgcctcggcctcccaaagttctgggattataggcgtgagccaccgcgcctggctattatttattataaataatatatgtaagctgggcatggtggtgaaagcctgtagtcctagctactcaggaggctgagcggggaggattgcttgagcccaggagtttgaggctgcagtgaactatgatcgtgccactgcactccagcccctgcgacagagagagacctcgtctcaaaaaataaacacataaataaataaaatatgtaaaatggctggcatagagtagacaataaatggtcactgctatttttatattttacttttttttttttgagaaggagtcttgtcctgtcacccaggctggagtgcaatggcgccatctcagctcactgcaacctctgcctcctgggttcaagccattctcctgcctcagcctcctgagta

SEQ ID NO: 29 - DNA, 4001 bp, Homo sapiens
ccaggatggtgtcgatctcctgatccgccctcctcggcctcccaaagtgctgggattacaggcatgagctaccacgcccggccagttattttatttttttaaaatgtgtcatatctatttgtattcacctggggataatttaggaatcatataatgttcaataaaacaacaaaaagttgtagaatagtatgtacattataatttttttccctaaacaaaaagagaaaatccatgaatgtgtatgtgtgcgcacaatggaatgaacacagagaaaagaaaggagatgtaagtttgctaaggatatcttagggcagtagggttagagggagaggaggagattattaatctttctttttgccccccttaaatcccctaaacaccaagccaccgttgagtacagccatttggaaagctacggaataggagagcaagaaagtgagcaagcaacccacagtgatcctttctaaatctctcagcatcacctctatgcaaattacataacaactcatttaacattcattgcctcccagatttcactttaatctggtctcacatatttaggatcaagagataagcactaccccctttgcctttaccacacaggttccacagtgcaatacactgacacctgtgcagaaatgcttttccttcaagttaggcgtccttaatcctttcaaaggagtgcttaaaaaaaaaaaaatatatatatatcttaacaaaattgaggtatataatttagatacagtaaaatttatccttttaagtgtataaatctatgaatttcgacaatcgccaccacaatcaagatatagaacatttctatttccctaaaaagctttttcatgccactcaacaatcaatttcttccacgatacccagtccctggcacccacggatccactttccatccctataactgtggttttttttttccagaatgtcatataaatggactcatacagtatgcagccttttgagtctggcttctcgtgcttagcataacgcacttgcgagtcacccgtgttgttacttgtaacagtatttcctcttcactactaagcagtatcccattatgtggatgtatttcagtttatctgttaacctgctgaaggccatttgtgttttcccagtttttagctataaagtggttaacaagctttctcctacagcttaagtgccatttttaactcccagaaggccttcaggaggtggataaggtgagctgaggatagtgtgcgctgctcaaagtccgaacgttgttcaagtggggctaaagcgggggtagggggttccacaaggggccctagcagaaagggagacgatgtgtctgccttgacatgggctcaggccttcctactcagacgggggcgcattttcccccaagccctcttcacgcactgctccattctgcagaattaatgagcaggatacaaattcacaaattcctaaaccagcaatgctgcttggcaagactacacacacacgcacacacacacacacacactctcacaagacgcacaaattcctaaaccagcaatgctgcttggcaagacgacacacacccacacacacacactcacaagacgcacaaattcctaaaccagcaatgctgcttggcaagacgacacacacacacacactctaacactcacaagacgcacacgctacgcactgcaacacaaagcctgtgaggttgtaaacgaacccagacggcggcgaaggtccaaggccggcccggcttacctgccgcggattcattgcgcccgcgaggcattgcccggcccgacccgccggcggcacgaccctggcccgaccgctgggccgcgccagcccctcgaggcccccacgcctccgctactccgcactggaagtggccccggggcgtcggcacgggaaactccgcgggtctgcgcgccgggcccaagatggctccggttcaatttcgctttcgtttcctcggaaagccttcccctccggaaagtttggccaagaggaggggcttgagcaaatcttgcgccacgcttggtttcaggccggttacaagtcgaacccctccgctgcatgagaactacggaaggtacttttttttttttttttgaggcggagtctcgctctttttgcccaggctggagtgcaatggcgcaatctcggctcactgcaacctctgccccccgggttcaagcgattctcctgcctcagcctacggagtagctgggattacaggcgagcgccatcactcctggctttttttttttttttttttttgtatttttagtaagaacagggtttcaccacgttagccagggtggtctcgaactcccggcttcaagagatccgcccacctcggcctcccaaagtgttgggattacaggcgtcagcccccgcgcccgtccggtactgtttaggaaaaccgccgtttcagtactgagctcctaattccccgcacaggccgtaggcaggaatacacgaatagagcaaaaggaaaacaaaggcacacaaaacctcaggccagaaacagcatgacgcccggtcctccctctctccgcgccagcgcggtggtggccgcgtctccaatgtggaggggggggggaggggatgggcgggagcgcagatctcgtcaaacgaccaaggtccccaccgtgggaccttgttaatgctcctactatgttataaacttaagcaagcagatgccagccagtaaaaagtaccaagagtagcaacagcagcagtgaacaatttaggatctaggtcataaaaactaccccaccaggcaaatggttaagtactttacatgtattatctcccttaatcttcacaacagccctccaaggtaggcattattcccactttgcaggtgtagaaaccgaggcttgactaaggccacgctgctgccaaatccaggtctgaaggctttagtaaagctcagtcttcagcgcttctctacactcattcaaattacaccattactttcaaaaagataacttttgttatctagagggacaaaagtcaaatttgcttcatggtcaggcttctctaactgctggatttttgttcaaggtatctgggaaacgattattctagggttcaacaccatcctcacctgtgagaatgttctttccctgtgtttaatcttaattttacccccatgcttatgaaattacaaggcagtccctttatagcagtatctccagctgatgccctttcatggtgttagtcactccaaattaacattcccttgcaggctgggctctgtcttccttctgggcctttgcacattctattcgttggcctagcatgcacctcctccacggcttcccgtgaatcaacctttcaaatttacaagggaggccttccccacagcaggtagggggagaggagggggagcaggtgctgtttgtggtttcctactccatgcttctcgagttactgggcgcctacccctaatagggcacttgcacactgcgctaaaaacgccccattcgatcatttaacaaaactttactaagcacctaattatgtggcagatactgtgttaagcacccaggatatgacacaaataagagcgccatcctttagctagtctgctagggaagatggatgcctcagtaatcacaattatcatgtacttcttgttcatatatctgcctctagaattgtcaagtcatctcctcgggggcaggaagcatgttttgtatccttatattcgccttcagagggctggttagttgaaagaataacagacccctcagtaggtataacaatgggcaaaaacaatcgaaagacaacttcacaggagataaaaaatatcaaacatatgaaaaggttctcaaccccatcacatcagagaaatgcacagtatagctacagtgagctactgtccattcaccagacagacagcattagccatctgattagaccaggtggcagcaaggatgcagagcagctcttagtcactacaggaaaccagtttaccattatctagaaaggtaatggtaaacccc

SEQ ID NO: 30 - DNA, 4001 bp, Homo sapiens
gcgatggagtgagactctgtctcaaaaaaaaaaaaaaaaaaaaattagccaggcatggtggtgcacatctgtgatcccagctactcgggataaaattgaaaaataataaaataaaatgagaagctataattaataaagtgagtttttttttttttgagatacagtttcgctgtcgtccaggctggggtgcaatggtggatattggctcactgcaacctccaccacctgggtttgagagattgtcctgcctcagcctcccaagtagctgggatcacagatgtgcaccatcatgctggtctaatttttgtatttttagtagagacggggtttcaccatgttggccaggctggtctcgaactcctgacctcacatgatccacctgcctcggcctcccaaagtgctgggattacaggcatgagccactgcacccggcctaaagtgagatcttcacctctttgcagttctagaatttaatgaagtgtacagcagagagattatggattttgagatttcccctccactaccacccccaagtctgcatatcatatctggcagaatagcaaacatctaaaatagcaaaaagttcccctgcttctcaagcagctgtaccaataggaaaccttcagcaagggagcaagtccaagctcctgggtactgggcccttactaataatagctagacacttcgaattctgacacctcgggcaaggtagatataattatcttcattttgtagataagcccaagtaggagtggagaggttaaataactcattcaatgtcaaacagctgcaaagtggcagacctgactccaaagttcatgtcccctttccactctatttccctttttcccatatagcaagcactaactgtttgtaaataacgaccaagatatttcaagagatctttaaaaggatgggaacaaggcttctctggtggagaaagaagttggcatcacaactgctgacagtttgacgcccctgccttctctgcccccaatgacccgctctagcaatcctgcctccctctctagcaacaagacactgtgtaggcctctgtttgcaagtctcctcccgtggcagcctagactctgctccctccgctaattgcatacttgggctcctccacacaacattcaaaatccaatgacaggtatccctttttggaaggcaagtttcccaaactctgataccaacacgaaacacctggggccggattaccctctagtggggcccccaaatcaagctaaacagagaaggaagaggaggtgacgcaactaggcctcctgcaccaggccagacaggctgagcgcggcggccgtgaccccgcagtgagctttccacagtggcctcctacgccttccctgtggaaggcacgccagggcggcgatgttatctctgggataaagggccggtcctaacgcagtttgtggtagaaggcgcagcaaaagcgcctaccgcggcgagtcccaggcagctcactctccagtcactctccgaggcgggggagccggcgagagggaaacaagggcctttggtacccagctgttgggcctttggtacccagctgctgggctccggctggcacgagcgccggagcatccgtgcgcagcctctgccgcccacactcgcgcacacacgggcgcgcacacacgcacaaaagtacaccggcccgggcgtccgcctcctggaaggctgccgagaccggccactgtgcccctaccagctgcgtccccacccagccctgcggccaccctcagtgccctgccggggcgcccccacgcttcctctaacatcaacgccagagactggagaggccgcatgggccgcgcgttccagcccaggcaggtgtagccgagaaggacagaggctcttaccgggtcttgcacttcctcgggacacggccggacacccggagactgccagtgcggccgcgaccctccccccaccctcccccaccacgtagccttctctaccttcagtcgggaatcaatggtctggtcgcagattggtgacatcattggcgcgccgggcgtgggaggaagaaccacgtgattcaacctcttttgtttgcgctctaggaaattaaggtttttgttgctacgtcttccttggttttttacgttgtgttaatgccgctgttttgggtacagtggggagtaggtacatgggtttaggatgctgcatttttgcccatggccttgattgaactccttagtcatttataacgtggttgggccggaaggcctgagaagatacgtaggtacaatcctcttttaaaaagaccacagaattagccaataatacattataaccagtagtctttgaatggcccgtttaaattaaattaaacgaattcatttttaaaataatataatgaacaccttctttaacttgacatgctaaccaagaactaaaatattatcaattaactttcatcagcttgtaagtggtccccatcttgtgccactgcctctccatcagaagtaactcccatcctgaatttgtgtttacacaactattatattgctttaatttcttttcacatttatatatattactaagcaatgtatttttacttttcttagttttgtgtgtatttccaaactctcatctagaggcctgggcctggtacatttttctttactcatctttattgaccgaagttacattttgttcattttcactgctacataaaaatccattatgtaccataatttatccattctccagctgccaagtctttgtgcaatttccagtcttttgctctttccaacagtgttggaaatcagcattgctttctggtgcccctgtgcaaaaatgtctcttgggtgtatttacctaggaataaaattgataggactttggaatgccagtattccactttatatgatagtaccaaatttttatccaaagtggttgtaccagtttatactcctaccagcatccacatcttctctaacacctcagatttcttggcttttgctaatgcatggtctcaaactgcccttattgaggttaagcatctcttttaaatatgtattgtccatctgtagtttctcttctgtgaaatgtcagtgtagggcatttgagggatttttagggctgagcaagaaaaaatatatgaccaggaggtgacagtagcacactcaagctttatttgtgtgagctttgacaggtttgtatttaggggaagtccttggcagcatgagaagatccagagattgggggtggagaggaaccatccaaaaggggaaaagagaaggaaacttccagaagagagtggccttaccatgtccaggtgatgttgttcagcggcctgtgggaagtctctgtttcagaaagctcccaagggcagcagcaaattggagtcttcataaaccacagatttatcttatctatgactaacagatgttgggcacagtttcatgaggtatacaaagcaggcaagcagctctaaatgcctaaaaatctgcttagttgtgttatatttaaaatgcctggatgtataaacatttgagttaggtgctgaaaggcttttgagataatagataccagcttgctgtgaagaaataaacaactcagggacccagatacagaggccatctttggctctttatataacagtcagtttgagtcttttattattgttttagtggattgtttgctacattattcacaaacttagggcactgattcttcatcagttatatgtgttgcaaatttatccttccatatgtatcctttcattttctattttggtagatgttcttaactttgaatttattaatatttatcctgtttttcttttccccgtaccctaatatttattcacttactcttactcctaaaaatctttaaatccttattctctctggaatttacttttgtatatggtgtgaggtagggatcccattttactttttacatacaaatgacctttatttttccccaggtttgtttattgactagccccacctttcccaactttcccacctttccca

SEQ ID NO: 31 - DNA, 4001 bp, Homo sapiens
ggtggaacctgctcctcgcatgaccccggtgaagctgccagtaagccaccctgattcttccccactctgacttcacacacctcctcaccccacctggatctcatggtcagttcccttctccacccaaggcccactgtcccccttttcttctccaaagcttcccagtggtactggagaaggaccttgacttgtgctaacagggtccataaaaattccttctcttgaacctcatttgggtcttcgctgtgtggtggtcaattgtgtttaacaaacatgccttagttcactgtggattgagtactcttcttttaaaaaattctcctcccagggtttggtgacacagcaaaggtctttcacctcttttttcttctttgtccctttttcccaccccttataattttttaatagctactgtattaacggatccaccctttatataatcagtctccaaggttttaaggacctcttcttcctttataatttatttcctaggttgctttaatcactgccccaacctaaactagccctctgaagcaagagcactcaaatctactatgtccagccactaccttgtgtgggagcttaagatctgaatttccaactatgtcgacagtctgtccacttaaatatcctgccataactcaaacagcacatattctgaaccaaattaatagttccctcaaactcagctccttctcctgtagttcttattgctaatggcatcactctcctcctagcctattaaggctagaaacctgcgtcatctttgctgcccgcctcctggcctcatctcctggatctcatcaggtagttgccaagtcccaccttgtctgccacctctgtactgtgtcttaaatgtgttttcttccagttccagcccctcattacctcttactgggccattgcaaaggcctataatctttctatccctctacatgccaatccaggtggcacatctccctccacagccacctatcacaactctgaccctttccttatagagctccttaaatgccacttgcttcaggagactcctgactcccaccttcttcagcccttggggtttcctctccttgagcttctcctactcagcacctgttaaaccatttactttccctcgtatcagagctactggattttttttttttttatggcacacacacattgcagtgtctgaaaggtaattaacattaggtgtcctataagttatactcaactctccactctcaatattcccaacacagtactgatgaggggcttcagttgattccatggtgagctcttgggggtcaaggactatgcttcaatcatctcaacctctctagcacttggcacaaagctgattctcaacaaacatttgttgaattaatgactgcatgaacaagacgccactatgcaagcaatcatttctttcttgttcctcttgctgcaccctcacgcccaccatattgctagggacagaggcaaatgtgtgtacagagtgagtgctggctcccagagctgaattatgggacttaggggttctcctattagctctttgagtgaccttgggaaaaaaaaattgtgtttcaaagtggctagagtcagttaaaagctaaatgttttttaaactgctactcttggcccaaatctggaaaatattttaatgtctgtctatagaagaattaaattatgaaacattcattctatggaatagtactcacacggttattttttttcttgtgagacggagtctcgctctgttgccaagctggagtgcagtggcatgatctcggctcactgcaatcaggctggagtgcagtgtgatctcagctcactgcaatctccgcctcccgggttcaagtgattctcctgcctcagcctccggagtagctgggattacaggcgcacgccaccacacccagctaatttttgtatttttagtagagatggggtttcaccatgctggccaggatggtgtcgatctcctgatccgccctcctcggcctcccaaagtgctgggattacaggcatgagctaccacgcccggccagttattttatttttttaaaatgtgtcatatctatttgtattcacctggggataatttaggaatcatataatgttcaataaaacaacaaaaagttgtagaatagtatgtacattataatttttttccctaaacaaaaagagaaaatccatgaatgtgtatgtgtgcgcacaatggaatgaacacagagaaaagaaaggagatgtaagtttgctaaggatatcttagggcagtagggttagagggagaggaggagattattaatctttctttttgccccccttaaatcccctaaacaccaagccaccgttgagtacagccatttggaaagctacggaataggagagcaagaaagtgagcaagcaacccacagtgatcctttctaaatctctcagcatcacctctatgcaaattacataacaactcatttaacattcattgcctcccagatttcactttaatctggtctcacatatttaggatcaagagataagcactaccccctttgcctttaccacacaggttccacagtgcaatacactgacacctgtgcagaaatgcttttccttcaagttaggcgtccttaatcctttcaaaggagtgcttaaaaaaaaaaaaatatatatatatcttaacaaaattgaggtatataatttagatacagtaaaatttatccttttaagtgtataaatctatgaatttcgacaatcgccaccacaatcaagatatagaacatttctatttccctaaaaagctttttcatgccactcaacaatcaatttcttccacgatacccagtccctggcacccacggatccactttccatccctataactgtggttttttttttccagaatgtcatataaatggactcatacagtatgcagccttttgagtctggcttctcgtgcttagcataacgcacttgcgagtcacccgtgttgttacttgtaacagtatttcctcttcactactaagcagtatcccattatgtggatgtatttcagtttatctgttaacctgctgaaggccatttgtgttttcccagtttttagctataaagtggttaacaagctttctcctacagcttaagtgccatttttaactcccagaaggccttcaggaggtggataaggtgagctgaggatagtgtgcgctgctcaaagtccgaacgttgttcaagtggggctaaagcgggggtagggggttccacaaggggccctagcagaaagggagacgatgtgtctgccttgacatgggctcaggccttcctactcagacgggggcgcattttcccccaagccctcttcacgcactgctccattctgcagaattaatgagcaggatacaaattcacaaattcctaaaccagcaatgctgcttggcaagactacacacacacgcacacacacacacacacactctcacaagacgcacaaattcctaaaccagcaatgctgcttggcaagacgacacacacccacacacacacactcacaagacgcacaaattcctaaaccagcaatgctgcttggcaagacgacacacacacacacactctaacactcacaagacgcacacgctacgcactgcaacacaaagcctgtgaggttgtaaacgaacccagacggcggcgaaggtccaaggccggcccggcttacctgccgcggattcattgcgcccgcgaggcattgcccggcccgacccgccggcggcacgaccctggcccgaccgctgggccgcgccagcccctcgaggcccccacgcctccgctactccgcactggaagtggccccggggcgtcggcacgggaaactccgcgggtctgcgcgccgggcccaagatggctccggttcaatttcgctttcgtttcctcggaaagccttcccctccggaaagtttggccaagaggaggggcttgagcaaatcttgcgccacgcttggtttcaggccggttacaagtcgaacccc

SEQ ID NO: 32 - DNA, 4001 bp, Homo sapiens
cacctactcacgggcaggtcccagagggacccctggcagcacaggacaactctttttagagttttacctcagtggttctcaatcaagggagattttgccctccaggggacacgtggcaatgtctggaaacacttttgatggtcacaacggctagaaggggtggggagcggtgctagtctagtagacagaagccagggatactgctacacatcctacaatgtataggccaggtctcccacaacgaagaattatgggtccaaaatgtcattagtccacaggttgaaaaactttgtcttagataacacactggctctgagggaggtgcccattctgcctggttcacttttcctttgagttgctcaacattaggccccaaatcattacgattctgcatagtccgcaccatttgcaaggctgaacaaaacactctaagccattgcctgagccttttttttttttttttgagattgagtctcgctctgttgcccagaggggagtgcactggcgccatcttggctcactgcaacctctgcctcccaggttcaagcaattctcccacctcagcctcctgagtagctgggattataggcgcccgccaccacatccggctaattttcgtattttttttttttcggtagagacggggtttcaccattttggccaggctggtctcgaactcctgacctacggtgatccacccgcctcggactcccaaagtgctgggattacaggcgtgagccaccgcacccagccgcctgagtcttacagatgctgctcctgtagctccccttttgtctctcctcgggagaaaggccttcctccaaaagaagagtctcccaagagccctcctgccaggatgacctacccatccacagcgtgacaactggcaggctggcatcaaggaatgttcaaatcctttggcaatcaggtaggcctggcatgaccagctactcaatcctgtcacgtagatccaaggcccaagtgaacgtgcacaagtttttcaacaggctgtaggcccgactcaggctggaagactgcacacaagcctctcacccttcaggaacctgacatctctcacccaaatggggagtcccaacacccaaacctgcccctgcagcactccccatcgcccaaagagggtttggcagaggggctgttacctctgtgcaatgggtgagaatgagcctcggaaaggttcgagtttaggggagtaagcccaaaccactcacaagaccccccagagtttggagaagaggaaaggccaaagaaaagcgaaaggaagaaaggatcaaaaaggatcccctgtcccaagttcacacaaaattcccacctgcgaagcccaacagctggctccagccaaggaagtcaaagttctcacccaaacctgcagccagcggcaacgagcctagagccccagacacacagtgcaagggggtctgggagtgaagaacaacattattagaaagcgaagcatcaaagctgtattggcgaccaaagggcatgggcaacgggcattcggcagcgggaaggcggtcgggcaagcagcgggcgtgttccagggacccaaggctctgcacgtggccctcgtctcctccccgaagcaggaacgaggggctgaggtggacccagggacgtgagacggctgcagaggacccaccctgcaactgaggcgcccccactgcgtccggacctgaggctcgcggccagcgaaactcgcggggaagctgcgctgtcacatgaagagaatgcaagaagggctgaggtgggtgttgaccccagctctggccgcagccagacggcgcctgggcacgcggcgggccggcgggtggcagccttacctggctgcaggaagctgggatccgcggtcaccttctagccgcctccgcgcccgcctctgcgcgctggccaccgcgctgacgcccgccacgcgctccggatctgtttaccaactcgcccgctccgggggagccccagctcacaagccccgccccgcgggccgctcccattggctgcaccgccgtccgcctgccgaatgccgctctgcgcgtgggagcgtgctcggcccgtgctcccggcccgtagccaatcgcgaccgagagcggagcaagaggagccaatgggaggctaccttagcggacagggccctcctgttctccttttccccacctcccggctacctttctctctagcaaaccggggctggaggcctggctttggagttgctggcctgcgcgcatgcgccttgagaacgggagcctttttcactgcgatgcagtgtgcgtggccgcaaaggcacccctgcgtgcttgttgcctccagactggtgcttgctgggcctctgcgcgggcctgggaggggaggctgtggaccaagcagacgcgactgcggggcgtggagggtgccgccgctttaaggaccgggcgatgcctgttctttgctcctctctatgtagcaagagccccttgcccagggtccacaaaaagcactccgaggaggggaaacgcggcgggcaaggccgcgcacttccacttccggcccttcggccggggcccttcaggctaaggatgcttgttttgtgtggcgccatcctcaaaacaggaagcctctgccacccgcgccccgagggtagagagatagtaccctcaccggagtcgctgtccgcccgccggtctcgtcggcgtgcaggtgcccgcagtcgctgacagccggggttttggagggcgcgcagccaacacgggatggagctcgggtgcagccctcggcgtccccgccgagcagccctgggaggcaccgccaccagcagcacgcagatttgccccgtcactccctccttaacgagaaaaggaacgtatgagccaaagtcggctcgacaatttccactcagatgaccccaaacactggtctgcagctctgttaatcgttcttgtggaaaaaagaaataacaatttagtttttcatgaaatgaaatactcaagccaaaggattgttccttattctgagcctccccccgctttttttttttttttttttttggtattgtgaaacgaaaattcactctgccaaaaggaaaaaaaattaaactgaaagctgagtcatgcaactgcctttccttttgttcctaagcagatagctacagattaaaggtgaagtatctccactctatgttcaccttatcttgtgtaaagtgccgatttactgagcgccaaatacataactgttgccctacctgctccctttatcgcaacatgtggcttcaataatgtgaacataccttccatcttccccctccagcctgcttttcccctttaaatattgaagccctcaaaatcatctttggagaaaggcacagacctgtcttctgggcgcgagtccttcaccttcgcaacataaatttctaaactgatacaggtacttttcggttcacaaatattgacatttaacttaattgaaagtcgtttgttttatattatcacttggaaaaatttaaagttagctgttctatgttgatgcctaaaattggggataggggcctgctttattataatgaaatccagaagtgaacctaatttcacagtcccccatcggctccccagagatctgcctgagttcccaagaacagaattctaagtgtgtgtgatatgggcgaacacaagctctgtgtcaggctccgttcttcctaggggtaggggaggcctttcttccaaggagaatggagactgtgccttgtggcgtctgtggctgggcactggtcggctgttgggtgctcctctctgcacattcacatgccctccccgcagtccatgttctgcctcccccatctccaccacactaaatacaaagtaaattttaaaggacaattaaggagttattttggctaaagtttcaagtaactgccccaaacagttgacaacttgccttgattaggtcagctggctccctttctccacataggagaaaaagaccaagcctcaaggcctttcaagggtggccgttgcttcctc

SEQ ID NO: 33 - DNA, 4001 bp, Homo sapiens
gtccttgggaaattttcattttttaaagcatctccagaaaatttcttgtaaagccttggctcttagagccaggccggcaacctttgataagcaaatgaaggccattagaaacagggcccacccaacatggcgattccggaggccttctttcccttgccccacatgttcctggcaacatggccacctccacatactcccacgtgtgtagaacatcatggcaccctgcatttgcatattaaaaggctagggtgagagggctagctttttcaagggctttgtgaatgacatgcctggtcaaaccaatcccctgaaccctatgcaaatcagacactgcctcctccagcgtctgtaatatatacctagctgacgtccaccccactgggggttccctctctcggctttggagcccccctccctctgtctctgtatgggggagcttcttccctctttcctcttccttcttgcctattaaactctccgatccttaaaatcactccacatgtgtctgtgtcgttttatctaaaccgggatgaggactaagaaccttggtgttcctccactcatcggagccgtatcaattctacataggttgcctcatttaatcatccaaacagcgctatgaagtagacctgatttctatagatatgaaaactgaagcacagaggtattaacttgctctgggttataaagctggaatatccaggtctgtgggacttgaaagtccctgttgtttctactatatcatgctatatcccatttgtatacgctttatagcactttggggatgtatatgacctagacaaaagatgtaggtttaatttaagagcactttcaatgcatgttgatggtacccttatcaactgttcagccaattctatcacatcaagaatacagcatgaacagcatgggtactgacaaagcgcggaagcaccttggaatgagaaatgaggatacctgagtcaaaaggcaagcaggcgaatgaggcccgaaagataaaccaagaaggattcctgaatgcggagtgtgagtaaagaaaactcagtagtacccaaaaatgaaaagagaaattagggttcgattatattcatcagtttctctaaatctctcctctagaatttcctaatagattttatattcaacttttcacctacatgtaaagtcaggtttcacgagtccaaagagggagatactctgaacttaaaggcacagtgttacctgtcatgaaagcttgcttgcctactctagccatggtaatttttcttctgagctattgtggctcttaatgtctacacttaagtggcttatttcccatacaaatatccttgattatcttttgaattgcttctattttgtcttcatctgaattgtaagctccccgtttggaaccatcttctacatatctttgtttactccacagcaccttgccagagcccccttcaagaggtaggcacttggtagttgttgactgataaaaaggaggatatcacgtgagaaactgcagaaaagaggcaaataaagaaagtaagctagaaagacagagcatccaggttgagaaggtgaggcaatatttaagccttcaagcttctaagctcatgtaagggactgacacagaggtatacacaaacttgaaccctgacttctagccccaggcttcccactcctctgcaatagctgtcttctttcctgacggtcgccctcatcttcagctctgcaatcaatctttctgctgagactcttacttccacatacctccacttcatccagggctgaggaaaagccagacctcagttagggactaggtcttttaagactgcagaagacaggagaggaggccgggtgacattattctgaagacagctgaagcgccatgtctgtctatagctgacccataaaatgacagttttgtctaaaagccgttttccaggccacaccctcatcagtagctcattgttccacgggcaccgaccatgtttctgattgggtggcactgccgtcccctcccccaccaacctgagtggcctactactgtacaaggaaggactggctgtttcaggttctcttatccgcacatttgaggcaagggtcaggggagactgacatgaccccagagtagtttacacaattcttcccttggccatgtggaggatggttgaaattaggcaatagttggtaggtgatcatcagaagtatctccagagcaagcaaacacctaattttagtcaatagtggttacagcttgtaccaggactatgaaatttaccagttataataaattcaatacttaccttcagatatatttgtgaggtaaatttttgtttgaagaattatatacctgccctttctgactggtcaagtgcacgcttttaatcaaatttatcccaaagataacttgaaatccaatgggcactggatttgagttttctttatctgatgtgacactggaaaaatgtattttaagaggctggtgtgttttctaacagcttaaatcatgtgttgattttctaaatgttcttatgtatatcatcacaaccacaattatcatttaggggcacagcttttaaaattggaatttaaaaagtcttatttaaaaagctgtacatgttctcctataaagccccgctctgtaattgtttactgtgtacttccaaatgttgtaaaacacagttgtcttagggaggaaaacaagagggtcatttaattatgttcattgagtgaattttctggtgtgagttgtggaaaccagtcttataattagaatcatacctcatttaattaaacaatccccttagggagagctattcttaataaatgccagtgttttctatttctgcttcattatataaacaggctccagtagagacctttgttttacagaaaggaaccttagctttgaggtccatcctcattaacattcaacctttcgctatgattttataagttaaaaaagaaaatatttactatgaggaaacagcagcactgacataccttggatcaaagtttccttaaaagagatgccataccacaaaaaaagactaaagaatttatctcttattgagcattctccaccccacctactactcctctaccccaagcagcttcttttctgctataaagttattagttcagaaaccgtgcaaataggttaacacagtatatcctttttgtagtaaaattaaaacttcctttaaagtacttaaagaaaagtactttctgggtctaccttcaattaataagattaccattttctgaactttcttcttgttgcccaggctggagtgcaatggcgtgatctcagctcactgcaacctccacctccctggttcaagtgattctcctgtctcagcctcccaagtagctcggattacaggcatgtgccaccatacccagctaatttttttgtatttagtagagatgcggtttcaccatgttagtcagtcttgtcgcgaactcctgacctcaggtgatccacctgcctcggcctctcaaagtgctgggatttcaggcatgcaccaccgcgcctggcccgtttcctgaactttccatatcttcaatatttactgtggaccaggcactgtgttaaaaccttatctcaatctttagaacaatcctatgaagtcagtactatgattatcctcattttgctcttgaaaatattaaaggtcagagacagaggttaacaaagtctcacagttaatgtgtggcagagttgagttgaaacccagggctgtcagacttggcattgagaaagaaaacttacatagtgaagctatcaataaagacctgtcaaaaagctgtgataaagaattcaactcaactatactaatcgatttgcaccactgtggaaattatttttacggagttcagtaactgcattgatagtaaggacttctaatatattcttactaagtctttgagaatagttgtgaaactgataactaggctatgtgttccaagtggcaatgagagtttttgacaggatacatattgttactttttgagat

SEQ ID NO: 34 - DNA, 4001 bp, Homo sapiens
aggttggtctcgaactcctgacctcaggtgatccactcgcctcagcctcccaaagtgttgggattagaggcatgagccactgtgcccggcctatgcccccaacatttctgagcaggaaaatgggaatcaacttttagcatggtgagaggaacaaaatccaggaggtgacattagggacaaatggacataacaacgttgatgagtactggtccaagaaaaaaaactcaccataattcacaaagcgtctagatataaagacgactgcttatcttacctgtgtgataataagtagatgggacaggataatgtagcaggagtgttaaagggtttcagtttggctttgtattagaagtcaaaggaaatttcctatgggaatagagaacaaatacactggcctagaaagaagggcaatttctaaccttcattaatctgagaataccgattgattacttacaatacgcatggtgttgtggccacagagacaaggcaaagaggagtcagagggttgaaatggttgttggcctctaaatgggggaaataactttcctaatatcactacaaggcttagtgccattatgtgcaggaggaattcaaaagaaaagtgcaactttagttgaagtgatcagaaaaagttttgtggaagattttatgacaggagattgatagatagagatggaaacagggcattccaggagggtatatggtgtgaacatgccatgaaagaacacagtccccagggcagtaaacaattcatttttccatagagtcctggaaaggtaaaatgaggccagacttaaaaaactgaaaatagcctaaaagcctacttaaggtggtgtactttataaatcagcaatggggatcagtggattaatgttgctccctgttatttttctgagattctctcctacctgcaggcaaagtcttgaccattgagaatagaaagctttcagtttctactctacaattaggtatagttttgcggaggtctaccataacatgggccttcacaggtaacatcagtttttatgactgatttcccaagtgcaaatcacaatatgggtacataaaagttattcctggagtaaatacatttagtagctgcaagccggtaccctgacattgcaatctgtttagcaccaccctaaattcctggcagtatacagatagtatacaacctcaggaaccgaagttgcaccatcgtagcctacccaactactaggaaaagagaaaagcagtgaaccgaccccactattacttcatttcagaaaagaaccagccattacaatcatttgttttgtagatggcagcctatgtattctccgctgtattttctagcccgtcttctgaatcacttgagggaagtactatggttaatctagtaaagtaccatggcctcctagcgctcctttgacatctgaaacggtgtaaactgaaattggccttgtcagtttcccattctcccaaagagcaccagaaactgagggaaaaaaaacacttatctattttcttaaaaatcgaaggcttgaagaccaaaattctcaaacagaagatagaatacatcaatcctagatacctaaggtaatgaaatttcattttcccccaaagtaccttcgattctgccccgcatttcagccttcaggattaccttaaccctgcagagcgatcaccaacctcccttcccaccccatcaaagtgagggcactgtcaggacttgacctgccaaagattgttggtggaggaaccttagggcttcctggcaacccaatgcggctgttccccgctgagaggcggttcgcgacctaggcccgcagccctccctccccacgcgcggcggcctcggggccaggcttaactctggctctctggtcccgatctggggaacccatgcatctccaccccgtggggctaaaggcgcagcactcacaggactgccgggagtcgggggacagccggggacgagcgcccaccgcacctaggccgcctcggaggcggcgcgcagtgggaggggccggaaatgtttacaacctgaccggctggatgcctggaggccaggcggctccttggctggggcccgagccccctggcaagtcggagcgggttcccccaacagctgtctcctccgcaggcctgggtcggggcccccggggtccccgcgctcccgccgagtccctgcccaccgcgcagcccctgggagacttacagccgggcaggcgggctctgctgggggccgcggtcccccgcgctacatcccgcggcgctggaggcggcctgcggccgagcggccccgatcttcagcgccctccccgcgccggaaggggcgcgcgacctcccgcgtcacctccgcagccgcgtcacctcctcgcgggctctgcctgggccctccaatcctaggccctctcgcggagtcccaatcacaggcccgcgcccgccggccacacctcccgccccgggccccgccctgctgccccgccttccctgccgcctgcccacctccccgccgcagccaggtaacctccacccgccccggggtagaggacgttcgtcggattctacactccacctcgttatcgcagcctgaagtgcgtgatggagaagaaatttcagagaatgagacagaacgtcgggagggaatgctgaattttctaccatacaccttatctcatctcctctgtccccaaggctagtcgtttcacctctgaaacacttcttaatctcttcttcaaccgcatggtccttccttcccttccacaaactatttattgagcccctaccatgtgccaggccctgggctagacctcagtctgcctcctgttattttcttatcagagagcagaattgtttctaactactcttgctggtgaacccgtgccccagttcctgctcccacaggcacctagagtgcagatcgcgagacaacatagggtagtgcagcccttgtctgaaccacacaacacagaaggggatttcagggtctggccattttctcatttctcccaagaatgaaatagtattattttattcccacttttcagatgaggtaactatcatttggaggggttcactaatatgctcaaggtcacagactggccagggacagaagcttggctctatgtgactctagagccccatgctctggagccccagatacagcaatacacagttgctgaaaagcagaaaagcaatgtcaatcttcctcttgtgagcaaacctttaactcacaggattatcataaggattaaactatctgatgtagatagagtacttggcacagtacctcaatatggctgttaactcaaaaaaatttttaatttttcttttttagggacaggttcttactgtcacctaggctggaatgcagtggtgcaatcatatcatagctcactgtgcaactagtgccattctagaggcagagaaagtgactcattgtaatctgatataggtgcttcagggacgtggggttaattctcttggtcctagttaaaagcatgggctctggagtcacatagagccaagcttctgtcccaggccagtctatgatcttgagcacattactgaacccctccaaatgataattacctcatctgaaaagtgggaataaaataatactatttcattgggtctttgtcaggattgagtgagataattcatgcaggctcttattatgaggcctagccaatggtaagtgctttataaatgttagctattaccgtgttgccatttgtataaaaccctcagaaacttttcactgtccacaggattgagtccaggtttcttcagcatagtgtttcgaggctctttgcgagctggctctaacttctaaggcctcatcattctccattttccctctggcatgttgggccttggtgaactagttctctgaagtgaacttctctttcattcctccaggctgttgcacatgctgatccttctgttggactgcccttctcattgtctgctgcaagatgccagcagtttacaatgcccacttctaggtttgactt

SEQ ID NO: 35 - DNA, 4001 bp, Homo sapiens
attcaaaagaaaagtgcaactttagttgaagtgatcagaaaaagttttgtggaagattttatgacaggagattgatagatagagatggaaacagggcattccaggagggtatatggtgtgaacatgccatgaaagaacacagtccccagggcagtaaacaattcatttttccatagagtcctggaaaggtaaaatgaggccagacttaaaaaactgaaaatagcctaaaagcctacttaaggtggtgtactttataaatcagcaatggggatcagtggattaatgttgctccctgttatttttctgagattctctcctacctgcaggcaaagtcttgaccattgagaatagaaagctttcagtttctactctacaattaggtatagttttgcggaggtctaccataacatgggccttcacaggtaacatcagtttttatgactgatttcccaagtgcaaatcacaatatgggtacataaaagttattcctggagtaaatacatttagtagctgcaagccggtaccctgacattgcaatctgtttagcaccaccctaaattcctggcagtatacagatagtatacaacctcaggaaccgaagttgcaccatcgtagcctacccaactactaggaaaagagaaaagcagtgaaccgaccccactattacttcatttcagaaaagaaccagccattacaatcatttgttttgtagatggcagcctatgtattctccgctgtattttctagcccgtcttctgaatcacttgagggaagtactatggttaatctagtaaagtaccatggcctcctagcgctcctttgacatctgaaacggtgtaaactgaaattggccttgtcagtttcccattctcccaaagagcaccagaaactgagggaaaaaaaacacttatctattttcttaaaaatcgaaggcttgaagaccaaaattctcaaacagaagatagaatacatcaatcctagatacctaaggtaatgaaatttcattttcccccaaagtaccttcgattctgccccgcatttcagccttcaggattaccttaaccctgcagagcgatcaccaacctcccttcccaccccatcaaagtgagggcactgtcaggacttgacctgccaaagattgttggtggaggaaccttagggcttcctggcaacccaatgcggctgttccccgctgagaggcggttcgcgacctaggcccgcagccctccctccccacgcgcggcggcctcggggccaggcttaactctggctctctggtcccgatctggggaacccatgcatctccaccccgtggggctaaaggcgcagcactcacaggactgccgggagtcgggggacagccggggacgagcgcccaccgcacctaggccgcctcggaggcggcgcgcagtgggaggggccggaaatgtttacaacctgaccggctggatgcctggaggccaggcggctccttggctggggcccgagccccctggcaagtcggagcgggttcccccaacagctgtctcctccgcaggcctgggtcggggcccccggggtccccgcgctcccgccgagtccctgcccaccgcgcagcccctgggagacttacagccgggcaggcgggctctgctgggggccgcggtcccccgcgctacatcccgcggcgctggaggcggcctgcggccgagcggccccgatcttcagcgccctccccgcgccggaaggggcgcgcgacctcccgcgtcacctccgcagccgcgtcacctcctcgcgggctctgcctgggccctccaatcctaggccctctcgcggagtcccaatcacaggcccgcgcccgccggccacacctcccgccccgggccccgccctgctgccccgccttccctgccgcctgcccacctccccgccgcagccaggtaacctccacccgccccggggtagaggacgttcgtcggattctacactccacctcgttatcgcagcctgaagtgcgtgatggagaagaaatttcagagaatgagacagaacgtcgggagggaatgctgaattttctaccatacaccttatctcatctcctctgtccccaaggctagtcgtttcacctctgaaacacttcttaatctcttcttcaaccgcatggtccttccttcccttccacaaactatttattgagcccctaccatgtgccaggccctgggctagacctcagtctgcctcctgttattttcttatcagagagcagaattgtttctaactactcttgctggtgaacccgtgccccagttcctgctcccacaggcacctagagtgcagatcgcgagacaacatagggtagtgcagcccttgtctgaaccacacaacacagaaggggatttcagggtctggccattttctcatttctcccaagaatgaaatagtattattttattcccacttttcagatgaggtaactatcatttggaggggttcactaatatgctcaaggtcacagactggccagggacagaagcttggctctatgtgactctagagccccatgctctggagccccagatacagcaatacacagttgctgaaaagcagaaaagcaatgtcaatcttcctcttgtgagcaaacctttaactcacaggattatcataaggattaaactatctgatgtagatagagtacttggcacagtacctcaatatggctgttaactcaaaaaaatttttaatttttcttttttagggacaggttcttactgtcacctaggctggaatgcagtggtgcaatcatatcatagctcactgtgcaactagtgccattctagaggcagagaaagtgactcattgtaatctgatataggtgcttcagggacgtggggttaattctcttggtcctagttaaaagcatgggctctggagtcacatagagccaagcttctgtcccaggccagtctatgatcttgagcacattactgaacccctccaaatgataattacctcatctgaaaagtgggaataaaataatactatttcattgggtctttgtcaggattgagtgagataattcatgcaggctcttattatgaggcctagccaatggtaagtgctttataaatgttagctattaccgtgttgccatttgtataaaaccctcagaaacttttcactgtccacaggattgagtccaggtttcttcagcatagtgtttcgaggctctttgcgagctggctctaacttctaaggcctcatcattctccattttccctctggcatgttgggccttggtgaactagttctctgaagtgaacttctctttcattcctccaggctgttgcacatgctgatccttctgttggactgcccttctcattgtctgctgcaagatgccagcagtttacaatgcccacttctaggtttgactttggcctcagacaatcctaaattcacatttaggctctgtcagccactgaccagctgtatgacctttggtaaattattaatcttcagctcacatgattatcataaggattaaattatgtgatgtagatcgagtacttagcacagtacttggtacatggctgttaactcaaaaccatttttgtttgtatttttagggacaggctctcaatctgtcacctaggctggagtacagtggtgtgatcataagatcatagctcactgcagcctcgaactcctgggcttcacgggatcctctcaactcagcctcccaagtagctgggctacagattcgtgccaccatgcccagttaattttttatttttgtagagatagggtctcactatgttgcccaggctgtcaaaaatgttacctctctttccccccttcctccctttctgaatctttctcaacctcttcccagctgcactttgtatgtacctctgctatggtattagtcacactgttataattatttgtcacttgttggccgggcgcagtggctcacgcctgtaatcccagcactttgggaggctgaggcgggcggatcacga

SEQ ID NO: 36 - DNA, 4001 bp, Homo sapiens
ttctaaccttcattaatctgagaataccgattgattacttacaatacgcatggtgttgtggccacagagacaaggcaaagaggagtcagagggttgaaatggttgttggcctctaaatgggggaaataactttcctaatatcactacaaggcttagtgccattatgtgcaggaggaattcaaaagaaaagtgcaactttagttgaagtgatcagaaaaagttttgtggaagattttatgacaggagattgatagatagagatggaaacagggcattccaggagggtatatggtgtgaacatgccatgaaagaacacagtccccagggcagtaaacaattcatttttccatagagtcctggaaaggtaaaatgaggccagacttaaaaaactgaaaatagcctaaaagcctacttaaggtggtgtactttataaatcagcaatggggatcagtggattaatgttgctccctgttatttttctgagattctctcctacctgcaggcaaagtcttgaccattgagaatagaaagctttcagtttctactctacaattaggtatagttttgcggaggtctaccataacatgggccttcacaggtaacatcagtttttatgactgatttcccaagtgcaaatcacaatatgggtacataaaagttattcctggagtaaatacatttagtagctgcaagccggtaccctgacattgcaatctgtttagcaccaccctaaattcctggcagtatacagatagtatacaacctcaggaaccgaagttgcaccatcgtagcctacccaactactaggaaaagagaaaagcagtgaaccgaccccactattacttcatttcagaaaagaaccagccattacaatcatttgttttgtagatggcagcctatgtattctccgctgtattttctagcccgtcttctgaatcacttgagggaagtactatggttaatctagtaaagtaccatggcctcctagcgctcctttgacatctgaaacggtgtaaactgaaattggccttgtcagtttcccattctcccaaagagcaccagaaactgagggaaaaaaaacacttatctattttcttaaaaatcgaaggcttgaagaccaaaattctcaaacagaagatagaatacatcaatcctagatacctaaggtaatgaaatttcattttcccccaaagtaccttcgattctgccccgcatttcagccttcaggattaccttaaccctgcagagcgatcaccaacctcccttcccaccccatcaaagtgagggcactgtcaggacttgacctgccaaagattgttggtggaggaaccttagggcttcctggcaacccaatgcggctgttccccgctgagaggcggttcgcgacctaggcccgcagccctccctccccacgcgcggcggcctcggggccaggcttaactctggctctctggtcccgatctggggaacccatgcatctccaccccgtggggctaaaggcgcagcactcacaggactgccgggagtcgggggacagccggggacgagcgcccaccgcacctaggccgcctcggaggcggcgcgcagtgggaggggccggaaatgtttacaacctgaccggctggatgcctggaggccaggcggctccttggctggggcccgagccccctggcaagtcggagcgggttcccccaacagctgtctcctccgcaggcctgggtcggggcccccggggtccccgcgctcccgccgagtccctgcccaccgcgcagcccctgggagacttacagccgggcaggcgggctctgctgggggccgcggtcccccgcgctacatcccgcggcgctggaggcggcctgcggccgagcggccccgatcttcagcgccctccccgcgccggaaggggcgcgcgacctcccgcgtcacctccgcagccgcgtcacctcctcgcgggctctgcctgggccctccaatcctaggccctctcgcggagtcccaatcacaggcccgcgcccgccggccacacctcccgccccgggccccgccctgctgccccgccttccctgccgcctgcccacctccccgccgcagccaggtaacctccacccgccccggggtagaggacgttcgtcggattctacactccacctcgttatcgcagcctgaagtgcgtgatggagaagaaatttcagagaatgagacagaacgtcgggagggaatgctgaattttctaccatacaccttatctcatctcctctgtccccaaggctagtcgtttcacctctgaaacacttcttaatctcttcttcaaccgcatggtccttccttcccttccacaaactatttattgagcccctaccatgtgccaggccctgggctagacctcagtctgcctcctgttattttcttatcagagagcagaattgtttctaactactcttgctggtgaacccgtgccccagttcctgctcccacaggcacctagagtgcagatcgcgagacaacatagggtagtgcagcccttgtctgaaccacacaacacagaaggggatttcagggtctggccattttctcatttctcccaagaatgaaatagtattattttattcccacttttcagatgaggtaactatcatttggaggggttcactaatatgctcaaggtcacagactggccagggacagaagcttggctctatgtgactctagagccccatgctctggagccccagatacagcaatacacagttgctgaaaagcagaaaagcaatgtcaatcttcctcttgtgagcaaacctttaactcacaggattatcataaggattaaactatctgatgtagatagagtacttggcacagtacctcaatatggctgttaactcaaaaaaatttttaatttttcttttttagggacaggttcttactgtcacctaggctggaatgcagtggtgcaatcatatcatagctcactgtgcaactagtgccattctagaggcagagaaagtgactcattgtaatctgatataggtgcttcagggacgtggggttaattctcttggtcctagttaaaagcatgggctctggagtcacatagagccaagcttctgtcccaggccagtctatgatcttgagcacattactgaacccctccaaatgataattacctcatctgaaaagtgggaataaaataatactatttcattgggtctttgtcaggattgagtgagataattcatgcaggctcttattatgaggcctagccaatggtaagtgctttataaatgttagctattaccgtgttgccatttgtataaaaccctcagaaacttttcactgtccacaggattgagtccaggtttcttcagcatagtgtttcgaggctctttgcgagctggctctaacttctaaggcctcatcattctccattttccctctggcatgttgggccttggtgaactagttctctgaagtgaacttctctttcattcctccaggctgttgcacatgctgatccttctgttggactgcccttctcattgtctgctgcaagatgccagcagtttacaatgcccacttctaggtttgactttggcctcagacaatcctaaattcacatttaggctctgtcagccactgaccagctgtatgacctttggtaaattattaatcttcagctcacatgattatcataaggattaaattatgtgatgtagatcgagtacttagcacagtacttggtacatggctgttaactcaaaaccatttttgtttgtatttttagggacaggctctcaatctgtcacctaggctggagtacagtggtgtgatcataagatcatagctcactgcagcctcgaactcctgggcttcacgggatcctctcaactcagcctcccaagtagctgggctacagattcgtgccaccatgcccagttaattttttatttttgtagagatagggtctcactatgttgcccaggctgtcaaaaatgttacctctc

SEQ ID NO: 37 - DNA, 4001 bp, Homo sapiens
acagagatacctggtgaatgagagagccaaagcgtgcctttgggaagcctgccgtggtctggctggagaagcagcactcctgcccctgttgtgccaccctcagtatgttcccaccccaccctaactctcttctctgcctcttcctcttcctcttccctgggactggcagagctcagctcattcctacccagcactcactgtgaccccatcttagtggctcttccaaatctcccacctccaccccaggcctgacaggcagcctcaggttccctggctgcaagagcttcagctctgaggtcatgggcactggtaagttcacagtacagtcctccagccacccatccccctcctgtttctctggccctgcagagcggagcacggaaaggcagagtgaggactggagcacgatggcccaaagaacatctggcttacttggggtcttatgctctaccttttttcctttctagatggccctcaagccagccatcatgtggtgctgcgagtaccttcggcgctgtggactcaccggagagggatcttgacccggaggtagcggtccacagcaattgccagcagggccaggatggagctctgggtgaggatgaggaccggacaggcaaccatgaggcaggtgtggaagtaggtctgtggcccaatgttgatgaggatggcgagggggatgaccagggcacccacggccacatcagccaccgccagcgacacgatgaagcagaaggtggcatcccgcagcgcctggttcaccttcaccgcccagatcaccagcacgttcccgggcacagagaccagggcgatgagcacctcgatgccgatgtaggcggcctggaaagctgagatggagggcggcatggcgggcacaggctgggcacatcagcagacgggcaccaaggggcacgaggcaagcacctgtgtggtcagggaagcctgggatggggagacccgtctgggaggggcagggagctcaggctgccctggaactccaggtaccctgtgatgtgtcccacttgtcacatgcagctcctacccaggctggaggggcacccggacccttctctgcctaatctttgtcccttccctttatcattcccagaggttccattcagcaacttaaaatagcagcgctcactcctccactggcttttttatcaggtgtgaggcagctcccagcgcgcgcgcacacacagacacacgcacagaggggtctcccatgactggctctgcccacccctgtgcacagaacaggatgcagggagctcaccatcctgcctgctggccggcaggggtcccagaggcagtgcccaaagttccagggaacagagctccgggccgcgcgcggtagggctgggctgggctctggacaacgcgcggcagctcatagtcctccggctcccgccgcagcgctcccagcccggcctttcaagcaatcacatggtacggcagagactcagccccggacgcttttaaagaggtagcgcccctgtttcgcacctgggactggggtggcagacgtgggtctggggacggagcccaggacaaggctggggcgtttctccctattccccagcgtgcccgcacctgccctgcgcccacccacttgagacccgtctggtgcctggatcttagcagtcctctggtcccgttccagctctgtcggggaaccttgcccatggcctgccccaagggggcattccggtctcttctttcaaccctctcctgcacccccattggggagccccaggggtgaaccgagactcagacttacccaaggtcaccaaagctggcagagctcccggctgcctgactgttctgtccaagtgcccccacacctcgacgccttcagcagccgctagctccagggattcctggggaagccaaggccggccggtaagctccagagggatggtagctggctgggactcgactcgggcgcctgcggctctgtcgcccccggcgcaggagctgagtgacaatcgggctccgcacaccgggagggggcgggggcggcggcggcacccgccagcccctccctcctcatcctccgtctcctcccccaccccctcctcttaacaaaggaagtgatactgggtgagaaaagctggaaaaaatgtgagcttttcgaagggcctggtgtgtgcgcccagcctcaggactggacagaggcgcatccttcctgtgtccactctctcccttctcaatgcaggactcctgggagccctggtctggcctccagcgacccctcacccctcacggcacagcatctcttctgcaggacttcagaatgccccctctgggatctcccaaagcagtcggtagccctggcaccctcccccaatcctaaaaccctgctctctccatgaaaccagtccctgcatcttctcatcccatattgttttgcaggctctaccctgagtcattatattcctttctcatccatctttcagaattgccttttagtctattagcaatttctattttgcagataaggatgctgaggctcagggaagtgacctagcttcccaggatctcctggcagtgtaacccgctctgcgctccttttccttcctccttcttcctcttcatagcacagcgctaagccataaggcatccagtccaatcccctcatgttacagataaagaagcaggctcagggaagcaagggacttccggagggtcacagggcaaatcctaacaggaccaaaataagaatcccaggctcctgactctctccactgggtccagacccctcccctggccaccttctgccagtttcggtttaggcagtccactgatattaactaatgaccagaccctggacatggatggatgcctcgcagagatcccaacctgagaaatccttgtttgtgggtattgggcaagggttctaggaaggcaaagagagtcaggctggggaccccaatgttagctagccacaacccaacctggcctctgggggtactgcccccctcactggatctcagaatgcaaggaaaagggttctgcccagaggagggtgggcacgttgctcccattgggggctgcactgaatcacagtgaggaatgatgtgggacccggaacctgggtagctgggaggcagggaggaagggcagttgagtcttctgaggaggagggggaagccctctgtggggaaaaataacttccatttctgcctttagggggagcaaggaatcagtgcctcagacagcaaaattacattccttccctagaagctagttggagaaattaggaagtgtaaactctccttcctcctcgtccccttgcacttcccctgctgactttgtcaacacgcccaacagcacctgacgtcctgcctactccccctgccacccagacatgcaggcctttgcgaccatcccctgcctctccaccctttgcttgacttaagccatttttggctcaaggctttctctctcagtttacactcagcttcccaatggtcactcaactagatgtcagaagagactgtgaagacccagatgggcccagcttggggacggggatgggtgagtggggtcaccctgtctaactattgacagcatcttcagctctggagggcaactgagcacccaccaccacctcccatacacatacactcccacctccgattcatcttaccacaggttgctgacatgtagtggatgcatttgcataatgcctgtaggtaatttgtttctcagttctgggcaaaataagccaaaatcttcttcccttatcttctccatccttccacccctgcctgttcccagcctcagggattagaccagcctatttgacaacagaactggccaaggcagggtctattccagaaagctgccttgggggaagcacacggtctcctcagtcctctggcttgacacggaggtaggagggtcggtgctgagatctcctgggcagcagggtcatttggtgcggtgaaaagagcacttgaccgagagtcagaagagctggaagctggcttctaggc

SEQ ID NO: 38 - DNA, 4001 bp, Homo sapiens
ataggatatatatttaatataataaatatataggatatatatttattataataaatatataggatatatatattataataaatatataggatatatatttattataatgaatatataggatatatttattataataaatatataggatatatattcattataataaatatataggatatatattcattataatgaatatatataggatacatatatttattataatgaatatatataggatacatatatttattataatgaatatatataggatacatatatttattatagtgaatatatataggatacatatatttattataatgaatatatataggatacatatatttattataataaatatatatatattggaatatatatatattccaagaatccctttctcaacattgaagtaggcacagaataggaagcaaagataaaataataacctacatttgcaaaacaacagaaccatcagtttatctcctcttatgtttatctgcctgcttctcctaaaataataagtcttatctagtaggcttttatcatttctaaaactgaagagcattttttactaattaaagatgcatcaagatttcatcatttttagccaaggattagtaattacagctggagggattgagcacccacccctagtcagtggagaaaggattggagcattcctctgattctagctcctgagtcccagcccattgttgctaaccccctcacagaccatatcacaaaaagacacttattgccctctttcaacatcaagggccaatttggatacatttttactcaaaaagtctgggctctgggctttgtagcctcatttcccagctgcctcaattgctgcccaccccacgccgcaggctacctgacggtaagcttgacccgcaagtatcggtccacagcgatggccagcaaggacatgatggaggcgtgggtaaagataagcagtaggcaagtcataaaaaggcagctgtagaagtggattgtgatgcccaggctgacaacaatggccaaaggcatgaccagcaccccaacagcaatgtcagccagggctagagagacaatgaaatagaaggtggtggtctgcaggctggggttcagcttgaccacgcagatgaccagcacgttgcccactatggcgcagagtccaatgaaaatttccatggtgatgtaggtaacattggccaatgacagagcagtgctgttgttgggcatcttgccttcccaggggaacctccacagggacaggtgagccagcaagatccgtctgtagggccagtgggcctagctctcgccagacgtcttcccagaggtccatgtgcagtgacagtctaaaattcccaacttgctcattcctacccttttctggtggggtgatctcttggaaacccttctccttagaaagggctcatcacaggtgggtcacttccagcccctttatgcaccgcacatcctcaagtttccagaatgctgtaggacagctctatatggactgaatctgaaagtgctgctgctcttagttccccaaacagatgtcctcaacgcctctgcctgcagctttttggctttttgagttccatcaagataagcaaccctcttcaggggtgtttcaggaagtgagatgggccaagaggaagtacagagctcagaactctcagcaaaaagatggaaagagcagaagaggagccatgagtggcatagagaaggctcgagacaagattgggtatcagagttcattcattcagggaccagaggacagtgcaggatcaggtgggagcagagctggaagcactgactatgcaatctttctgccagcttagcaaaaagatctcatgataaggaggcaaacgggagaagcagaggaacaaaaaagagactttggtggcagcctcctaaccttagccagaactattcctgctaagttcttgcacgagttgacgctttgctgagcacagccgatacccagcctttgcagcaaagatccttggtcaaagggataagcaaagattccctgctcagaagggcaaaaactcagcacctctgagaagcatcacacctgcttagcctccacctctctttctcagctcacaccctagcaaaatcacactggcacttatgctggcagccggccaatgtccaacctatgtgaggaacgacagaatagcagaatgaccagacatacagaaagaagggaaaagaacgtgtgcaacagaatcaaatggcatatcctcctgcccacattccccaagcctcagccccatccccgcaggaacaggcgactgtctgggaatcagccccctctccctgaagctgcttacctagtcaccaacttctgggaaccagacacttgcacgccattgttatttggggacccacttggttcaggtgcttctcagcaccatccaaagggattattttaaccaggcgtgttagagaggcagcaagaaggaacacttggacccaaacccacacagtggcttgagggctttatcatttttaccttaagcatctaaatatgtacagcccaaaataaaattcagcagtaacaacaatggcgttctggtgtttactaacaaacacttcagagtggggcataagggagacgcctctgcctggggctcatcagggtcctcttgttagttgatctgctctggcatcattcattgattccactcccgacccccaccctgtatcccaagttgatccaagtcttaccaaatcccatacttgtccccgccagacttgtcatttctccctgagcagactccccagacattaaaaagggcagtcctctccaactgaatttccatcattctagtattttccaatgtcagttctgcccacatccctgcactgctggaacttgaaaagcttcatcggcctccaatgtgtccctcataaatgtttctactgtaattgttttctttatctgtgcttcagagaaggaagttaccaagagaaatttctaggaggcagcactctgccaaaaaaaaaaaaaaaaaaaaaaaagaagcctttctcactatatagcactctttgaaccttagttaaatactgcaaaaaaccctccctcccctaccccagtacataggtgagttcttttggaatcagtccatctcagctgggtcagagaaaccaaggaaaggggtttgtgtccaaacacagcatgctgtaggcaagataccacatgaaagaataacccactagagagaataaaggcaggagacacacttagggtcaccagcccagccacctctgcccatctgggaattctaccctcagaattctctgcacataccatgggggtttcttttctgtgaacaagagaagcccttccttcatgttctctgaatagacaaggtccatcagtgctgggtggggtgatttgagaacagaggagaaggactttcacagtcacttaacattttggcctggaacctgaccgtagattgaaaaccaaaaggcaatctgggaaagaggacagagaggctggggcagaaggtcacttcatttgcccattcctaccgctgcacccacagcccatggcgcacagccactcttggtcatgtgcctcatcacatctcaagtaggagatgctgcagcctcctactcggtgcctcaggcaaccagaggaaccacgccagagctccatgcccaggatgacccctgccccttctaaaccatttggtctgcacattgccttaggatcaagtccagactccttagagtggcttatacccttctgatgggtctcccagcctctgcagtctcctgtcacctgggtccgcacagacaccattggctgcaccagactgagcaactcgtggctcagagtcattctctttcacttcctctcccctgtgcacacactctttgtctggtttgcagggcccttctcccccaagtccatctagaaaacaaatacttttcctccaagactgttacccaacaggaccttgaagaaaacttcccagtcttcacct

SEQ ID NO: 39 - DNA, 4001 bp, Homo sapiens
tttggtacagggtctcactctgttgcctaagctgcagtgcagtggtacgaccatggctcactccatctcgacctcccaggctcaaggagcctcttgccccagcctcccgagtagctgggactacaggtgcacaccactgcgcctggcttttttttttttttttttttttttttgtagagatggagtttcatcctgttgccaggctggtctcaaactcttgggctcaagtggactctcccaaagcgctgggattacagttgtggctacggcacccagcctctactcatgtttcagagttaccacatctaaaatgacctcaaatcagtttctcactcccattcactttcgtgggcctgggaagccttaggatctcagcaatgggattttcagcaattctttattccaagtcagtcctgctgctttctattttatgtatttatttattatgagcctacatcatggtttgatcttctgatttctgaaagaaaacttccatccccttgtggctgccatccttgcagctccagtctttttgtttttgttttgtttttcttttttatagacaggatcttgccatgttgcccaggctagtctcgaactcctggacttaagcgatgatccttccacctcagtctctggagtagctgggattataggtgtgcgccaccatacccagattgaaaatgatagtttctggatccagatctcctcctacttcacttctctggagcacaccaccagtgatcagtgtcttcattttgaaattcttttcctaggtttcgttgatagccactcctgcttctcctcctatcaaactgtttccttccctaatccccttccctccctccctccctcttaattaccggtgttctccagggttctgaccatggccctttcttcttactatgctacctgctctccaagaagattcacctcctctgcttgacctcacacctgctacctgagccgggatctgagcccacaagggaagggaagttagttttacaggcgagacagcgcatgcaaacgcctggcctagaggaatcatggtgtgaggaaccgaagagcagaaagcaaggccaaggctggcggaaaacgaaactgcagacgtgtgggagggccggaccacgtcggacacgttaaggaatgtggctctgtactaagggtaatgggaaatcacagcagggttttaggcaggggaggacgcgattagagtcaggcttccaaagcacgccttgcggggtggagaacgggctggtggtatactgactctagagaaccgggaaaaagaggtcaagtcggcaagggtggacagacagtccccgacttaggatggttcaacttaagtttttttcggctttctgataacgctgatacgcattcataggctcctcgacgtccgatggggctgcgtccagataaaacggtcgtctaagctgaaagcgcactttccacttcaggtattttcaacttacgatgggtttatccacaccctgcacggttgaggccccggtgctgccacgccccgagcacgggatgttcggggcgagacgtctataaggccggagatcgcactggcactcgctgagctcaagctgtctgcgggtcatccggctctggccccggtgccctcggcagcctcatccccgcgcacccccgacccgtcgcccccggaggctccgcgccccttcggcctccctcccgcacggcctctgacttgcgcccggccccgcccacctgtccgctcactcccgggcgtgccggggtccggctccagactctggacatgacgcaggactgacgtcaggtcgacggtgtcgtgggcctcgtagaaggagcccacgcagtccccgagcagcgcgccagccaggcagcctcggaagcgcgagagggagcgggccgcgccagcccctccacctgccgctgccgccatcgccgctgcggccatccgcgcgcagactgctcgccacttccggtgccgccctcacagtttccctacttccgtccgcagcgctccctggggcctagagtttccactccgccgccaggcccacagcgccgcccagcggcccggagtcgcggcgccgcgcacttcccgccagcctgtgctttgagtctcggttttccgctcctcaccactgggctaactgggtgggaaggccactatggggtctccgggggatgggcactgagccagaccattggatcactgcagcccacactgccttccgcaggcgagcaaccctaactccgcacccccagccggccctccccaccgaggccgggaccacccccaagccctcccaccgggcccttgccccctgtgggcctcccttaagcatcaggagggcggaccaggggccaactgggacacagccaggtagaggccgcgctgctgcagcccaggagtgctgacccagcccagagaggggtgccctgaggggagggaaagaactggatttggtacatggagttcggaggaatagtgttccccatctttgctcctccatagacaggagggtgttcaagaaccctctccctgctggctacatacagtggggcagagaacagccggcctgagatcctctgcatttattccattcatttctctcctccctccttccattgcccacccaaccctgccctcctcctgcagtcctccaaggctaggccagctccagctggcagcttttgagtggactcagggtgctatttgtggtacgtgtgaaggtgtccacctcaggcacgaacctctcagcaggcacggtcagcttgcgccgtgtgtccatgcacttggtgtccagcagcatggagttggccttgcaggcaatgtcagcctgcagccgggccaggtgcttgcacagggcgtccagtgcgtccctagggaaggacattgacaaccccccagcccccatgaggctgggaggcctgggctgcgtgcatagccttcagtcaggaagacagccccagggagccagcagccagcaagaggccccatttgtgggcagcgtctcactgctccttccgcccactcccgagacctactgtgcttgcgccagcttctgcttcagggcagcgatggttgcctctagctggtgaacctcgtcggtgaggccgtactgtgcctggaggcagaggggttgggagttccaagtcagccacactgtcctttacctgagtgctgccccttgacagcagtgcccttgctccatcaggaatatgagaaaaccttggctagggggcccgtgcgccactgggacaccctctcacctggtcccggcagagttccacgttgggccggtaggttctggcctctagccgggtatgggacagcttcaggctcaggagctttgtgcgcagatcctcctccaggtgccggatgtcctcctgcagctcagcgatctcctccaaggtctgcaggggacagagtgactggtttccacctgctggactcacgtgcatgcctggtccagtgcctcctggcgggggcatgcggcttctcatcccacagcaggaagtccaggcccctggagatgctcacattcttctcttgccacttgagctcactgtacactttctccatctcccgcagccgcttcctgaaggcaaattccgttgcaactctctgggcttcaagctcgttgttggtctgaaggagaaaacacagggcaaggggagggtctacactcagggctgcctgaggatattactcaagcgaggggcagggggccacatgcacagcagggaacagaagataagggctgagcgcacactgggaccatccattagctgtgggtggcctgtcacctcagcaatagttagagcagtggcctccctcagctctgtggctgccttcatctcagcctccgctcggtccttgttgaaccgactgaagtcatcccactgctggagtgtggtggagctgcaggtggcagggaaaatgggggtcatgagggtgtggcctgggaggggaggagaagagactggctgaaacactcttc

SEQ ID NO: 40 - DNA, 4001 bp, Homo sapiens
ggtattcggatacgtcttccccacagcatgaccagatctgaatgtaagacaaaaggtaggtaaaggctggatttctggagtatttcctaagaaagtgcggggcaggaatttaatggcaacaccctgaagattgctaaggtacaaagtgtgttgccagaggggtggagaaataataggctggaagggaaggagggagaggtggtagtgacagtttcctaagaggcaattagtgcaacagctatttcagaatgggcagggtggatttctaaatgaaaacaaaacaaaacgaaacaaggtaaatcagagaatatttgcagtatttgcatttagctttttaacatacctgtgatttcattgtttctgcatgctcaaaatggtattcaagggggcctataacttactagaacatatacagcatggcaccatcatatcatgccatgcatgttcaaaaacaaatattcttgcaacctaaacagatagcagttaacttcaaatattacattatgctttgttttgaaagtggttattgctcatctgcttagaattttgaaactggagagagttatctgagagcctttacaaaggccttaccctgtatgctgcgtcaaaggaaacgacaaataggaagaaaggttacactgaaaaccacgtgtctcccgttagaagtacattaccacctcgttttccgaaagttcactttcgatgtcaccttaacaatgcaaatatttatttccaaatactcaatttgacatccatgtatttacttccctcactttttttgaacagagaagggattccttcctctgggaccaactagtaaaagtaatttctccttaactttcatgtatggagcacactgtaaaaacaaaaacaaaaacaagaaactcagggccctaaaacaacagtccaaagcccagaggtgggtgggtttggatgtcaacaaagtggaccagaggaagcaaagcactgcatgccacggtcctgcagatgggggatcggtgagtctgatttcaggacgtttcgaaacaatccactcccactccgccgccctgggcggggcgggggggcggtgatggggggttctgccgtcgcgccgggtctccgcccgcagtcggaagagttgggagcaggcctcgggcggtagctcctcaaactcggaccgcatcccacctccaccccggcctcagtcccggcgctgagcaccactcgccagacgcaaaactgcaactgccaggcatcgcgcatctctcaaaggctccccgccagcccacctcttcctccagggccaccccaagtttcacccgacgctccaggtcaggggtccccgacctcccgccatttctccacgtagccgcagctcaggacaggaggagagagcctcaaggtgacacctcattttggccagtggatccgggttctgggtccgagttcccgggcaccaggagccaggcagcccgagctcccgggcccggcttcccatgagaggccccgtcgcctcacctggcagcggcacacgatgtcggcgtcctgcgccagcaggtccaccaccttccctttgccttcgtcgccccactgcgcaccgagcaccaccgtcacccggtttcctccgggccgcgccctggggcggccgcaatcgccgttgggcagggaggatgccgccgggtaggtctcggcgaacgccatggctccagtgacgcgaggagagcccgaaggagaggcggccggcgaggagtgagcgaactgaactgctctgcggccgccagccacatgcagaggaagaaggagccagaggccggccccgcccccgccccgccgggccgccaccctccagccagtccccgccccgctctccgccacagcccgctcaagggggtaccatgactgccccgcgcaggccggcctcggcagcaccgcccgcaggaagaggccctggtggcggcaacggccgccaccccggaccgaggccacgccccttccgcggcctggcgcgccactcccgtgcaaacctcgcgagcggaaaaggtcaggggcggggcttcgagagcgcttctccttcagcaccccgcctacccgctctacctctcgctttcaaactggagaggcgcggaagcgcgtgtggagcgtcggactacaaatcccagcatgcaacgctctgggctgcggcggtgtattctggggccactgtgtctgccatctgcaggtttgtctggatttgtctttattaaggaatgaatgtgtacaaaatacaaactgtggaatttcgcagtacaaacagcataaaatcggaacgtgtaagtgtagaattggaaattaaaagtccggaagtaacagagatggggacagggatcaaaaaagacaaaattcaaaagtaaggcaataagataaaggacatgagacctgaaatcaatagatcaaataaagtcctaatcctcattttacatagtagtaacaaaggctcagagaggaggagtggattacctatgtcgcatatagtacatatatgcagataccgtcatgcacttctttattttttaatccccacaaccatataaggtaggtgatcctctattatccttattttacaggatttaaaagctgggtaacttgccctagtgaggcttgaattggtacttcgataatctaagtccagagcccatgtccttcctgtagattccactgtctctcagttacatttgtaactagattctggtgtatacctactgttcatctaatgccctttcgacaccaacacaaattaactatgatgtttaattctgataaaaggtgcttcgaaaaaaagtgggaatggaatcacattatatgtaccgtctcccaaatcgcctgtacatactgtatgttcactaatggtccctagagtacactttagtattttatttctagtcaatgagttaagtcaggaacattgagaacctgctattaactaactaagtgtcctgggcactgataacataggagaaataaagatacaattcagccctcaaggattcaaattatttggtctattgattagtaaacaattataatactatgtgataattgttgtctatcttggccttattacaagatcacaaacattttggaaacaagaatgccatctatttctttctagtcaaatgcccgaggtagtgttgggcagatagtagatactgaataagcacaccttactagtcatttccattcaattttttaaaatcatttatgggagactgatttgagtaataataaaactctggtttcctgcacagccagctctacatgaattactctttctctattgccatttgcctgtcttgatgaattggctctgtctaggcagtggacaaggtgaaccccttgggcggttacaaatttgggggcttgtctggcattgcctttgtggctacctactcgtggttcagtggcccccctccagcaatggatccagaagcctgcccaagcggccacccagttctcttggactgggggctgactctggtactctctctactggtggggtgctgccaacccagtgtgcatggatttaattgcaatggagaaatagccccggggagacgtcccttaactgtaaccctatcacagggtgtctgtctgtagccccattgcagggcagggtgtctggattggtgagtatcctaggtgctgccaacgcctcctttctcccaactggttctgtagccctatggtgaggtgtctgtagccccattgcagggtgtctgttcggctcctgggggggtctcatttggctctttctaactagtaggaagagtccaggtttgggagacttctcctgaatcaggaagatttcaaggaggtttctcagaaggagaataggaggatagtttggaagggatactcccggagttcttggttagggatctgattgggaacgccttctgtcctctcgtctttgtgtgcgtttgtatatgtggaagggatctcagaagaggttgctgatggaagtccagcagacctaactcaaa

SEQ ID NO: 41 - DNA, 4001 bp, Homo sapiens
acacttgtctcctttcagttcctcaaacacagcataacatgtttccacctgcttgggttctttgcacatggttttcctgctgcctcgaccactctttgccctttttttcaattatccaatccctatcatatgtcagctaaaatatcacttccagacaatatcagtaattcagttattcatttaagaaatctttattgagaacatactatacacttagaaaagttctagacatgtggtattgataaaacaatgcccttgtagagcttacattgtagtggaaggagacaggaaataagcaatacaagcaagtaaattaaatagtatgttcaaaggcaataaatgctatgagaaaaaaaggaaaagaagaacaaggtaagctcatccaaagcagggaatttccaatgcctaacttattgccaggcatatagttagcactcgatatttgttgagtggatgaatgaataaaggaataagcctgttcaagttatgagggagctaaaactataaaatgagtagaggagctactcaataaaacagaggtgccatgaaagaaagagaaataatgaaggccttgagacataatggttcctcgaacttatttctgagggtgtcatagttttcagttccagtttctggggtgtggtgtgtatgtaccataaccacacacacacacacacacacacacacacacacacacacacacacaccaggaccaaagtaattcaagtggatcactcttgtaatgataatacctgatcaggacatatatacaaggttatgtataccactgccaacacccatcacacacatattcccaaagccacttcttttctacccacacacccatgccatcccgtaacatccagttcttcagtggtcagcctcatttagaggcaaactccctcccacatactcaaaactgtaaaaacctttgctttcttctatgaccctgtgagaaacttaaagtcagtatctcacaaatcccagccatatgcacaaggggtcccctcaggaataggatcctgggtctcccttcctgtcagtcttcctgtcccttaaaggctatcttctacccacagaagtgtggacatgcactcctttgattctgaatgaccttcaagatcattgaacccacacacactcacactcacgctccagcctcctttggtaggctcctaaaggactggggctccgggtatcccctcaaggcctcttgtctttttaaggacccatacaagaattatttgcataaatttctctgtgaccaggagtgaccctgaggacactgcacatccccaaacacaaatactctaactcccccttccatggcactgtctgatattaaagtaacacaccttccacgtatacctccctctttagagtcagagcctcctactcccaccccgagcccaaatcatgcccctttagggatctctcccatgctcccacagggcagtgtacaccctttccatgacacagcctagccctaggattagccttcaccacaggtgatcccaggattaagatcctgtctcttccctcaggtcccagcccctttcgggcccatgttctgtcagaagtgtgcacactaacccacactcccctccaccacccggacttcgaggtccctgcccgccattcagaggggtgcacgccacccttgacccctgaccctgaagtcataacccaccgcgcaaatatacaggaccgcctcctcaggagtaggaccatgcccgagtcccctgttgcctgagacccaggacagcctggccgcctcagccttccccagatcggccgcccccacagacctgcctcaggcgccgactggctcccctccgccatttttgttgtccctcagtctccgagctcacgcgaagaccgcggggcagtagggagcgggtggtgggatcagtgggctgacaggagctacctcaggaagacgcggcacgacggttgcctgggcaacgggcggcaggcgcgcgggtggccggcgcgcggctgagggcgggagggacgcctgggaggagcgtgcgtccaaggccccgcccccgcggcgcgagcccgggcctgagctgggacttgggccccggggcgctgctcctccgcaaccgatccaccgcatcctggcaactgagcaggctccgccacccctagagcacaggggccaggtctgtagggatggcgctttcctgacggcgaccggggtcctcgtactgaccgcccagactagctaaactggcttttctgtggttggtgctcaactttggggacttgggacaggtttcttgatttcccaaagcttctccccttggtttgcctgggttactcgtcttcaactgaaatgcactgaaaaccaactgtgtgcccaccccaacccaaacacacagaggcccaaagggttctggctccttgcccctctgcgacagcaaccctcaaccccagaaaagacttatccttttgctgacgtatttttcagtaaatatgggctgctgtttcccacctttcagtagtgacacgccgttatcgtctaaaaccaagctggaacattacccgtcctgaccagctctgccctcccgcagtcccctgtatattccctctattccaaatgctttatgcattatttccttctcgaccatgagctctctgatacctacggttgttctcttatctttgtatactccatagtgcagcgtggtgcatgacacaaagtaggatctcagtcaatgtctgctgaatggaaaatggtggtaatctgaaaggaaatgaggtggagagagtgaaagagggaagggggaaaaacgctaagaaaaatgtgttattgagctgattgctttagtagacaactatttttaatcttgcttcagactctgaaaaacagggtagaatgtgtgcctgccgttgtcccactgaagaacacagagtctggggcatttgtctcctaatttctgtctccattggttgagggttgctctccaccttccagcttgaactctctcacatttcctggttatgcttgccagggctgagcagacttctagagtttgagagaaagccttgaggcagaaatgcagagacggaccggaaggccttctaagtaagatgctggccacatgcatggaactgtccattcatctgcattaaaatcagggataagaatcttgtacagaaagttacatgaaaatagctatcagaattatctctcacatttgaacagtttaaaattcacaagccatgtccacacaactatcaagatgaatatatatgtgctttccacagtcctaatgacacttatgtaaaggctgtgagggttttgggaatttcggtgtcggaggagtcaataagggctaagaagaacaaaagaactacattaagtatagggagatggaaaaataaagagaaagatgtgggttctactcagactgatgttatagctttataatcttgggcaaatcacttaaacttactgagcctcagtttcctcttccaacaaactgagacaaaggtcctgcctaccacaaagagtagctctaagacacaaatagggtgatgaatgaaaatgcatttgatgagtatgagccaggctctgtgcagatgctgaggataaagagacaaatataacattattaaattgaaccacattggtcaatttaaattttaagtaaaatttagaactcagttatttaatcagaattgccacttttcaagtgctcaatagctacatgtggctactggctaccatattggacaacatatgtatagaacatttccatcactgcagaaagttttgttagtcagaattgatagacaaatgccttactgggcagaggagacgaaaagcctggaaaaccagcttgctgacaggaccaggttcggttctcctctgtgtcagctattcctcaggaagcagtgcaggagggagtatagacttcttcactactgctggagtcttcagagacttcccttttgttgtgtgaaaaataacacagcatgggaagtggggg

SEQ ID NO: 42 - DNA, 4001 bp, Homo sapiens
aaacagggaagctgagaaataaaggatcgagaatgggcaggggatatttttggacatgctagatttaagcatatccaagttgagctatcctaatactattctattgcataatatcaggttgaagccaaggtccagggtgggaatacatggagtgattcatatcaatgccttatatttatttagggctttatcacaaaaaattcatgtattattaattttgagtctcaaaacctagaaaggtagaagaacagaaattaccactttcatctcaccaataaataaattaatgctcagaattggggccatgcccggtggcttatgcttgtaatcccagtactttcagaggccaaagagggagggttgcttgagtccaggagttcaatatcaacctgggcaacatagtgagacccagtttctacaaaaaaaaaaaaaaaaaaaattagcggggcatagtgatgtatgcctgcagtcccagctacttgggaggctgaggcaggagaactgcttgagcccaggaagttgaggcagcactgagccatgatcatgccacaacactcagcttgggcaacagagtaagaccctgtctcagaaaaagagaaaaggaaaaaaaaaaaaaaaaaaaaagaaatgaatgctcagaattaatgtaacttgccccaagtcagcttgttagcagcagagccaggagaattctggctctagatctacccgtcatcaaatgctgaaagcttccaagaagaagaaagctcaaggcttttcctccaaaagtagtcattagcacagaggcaacagttgaggccatgagactgtgtaactaattctttgaaggagaacagaaaaagaattcctagcagatacccataattaattaaaaagtgaaaggaagagagcctagtaagagacaccaagttgacaagaatatgcaacaggggagggggaaaaaaaaatcaaaaccagaaaagtgcagagtcaggaaagccaaaaatggagtaggtactcagtgattttaaatgccaaagttggaaaaaggcgcggatttggcatgaagatatcacattgtatgtgtgaaatttttttcaaaaatttaattcttaaaacattagcgaaatttaaaaattcctttgaaatgtttatgactagcaacatccatttggtacattaataagggggactggatttttcatatattacacttcttcaatgttgaaaaattacaaaggctaagaaaataaaacatctattaactagccttgtagaaaagtaatttgatcttttaaatacagatcaactatatatagttcaacataaccagatgagttattgcactttttatttgctaagaaaatattttcagcttttacctactccacatttgagaagtttttgatatacataaacaatagtttactatactttttgctgcaatctattttgtcaattcaaaggttcaacaaaggaaaagagacagttatacaaaggcaaaactacatgcatacccaaagcaaaattacatatgaagtaatttaccaagttttaatagtaaatgttattagaaataatatgggcaatcttctgatcatatatttaacttcaatcttaagtgggaattagtacgcagagaaaagagaactattttatccttatcctaacacgagggatataaaatatttttaattcaaatcaacattaattagtgatatatggagaacacagcaccatctttgcacaaatcaagttttagacccttggaaataatatttatcttagagctttaaaacatttaacaggactgccaatgaattaaaagtttaaaagacgcaaatgagcaaatcaaaacaacttgctactgaccttgttcaagtctgaagagggtcttttccagtttctccatttcgttcagaagtaaaattcgaatctgtttactgtgtcccattttggcttctagaggatttgaaatctttcataagaattaaaagaactccacagtcgaatgagttacccctatgaaacaaaaaggagttaaaatatcgaaaataactattgccttaaactctccagagctgacagcggcacttacatgttcgaagtgtgttttatgcctagcagagcaatgaaagagaatgaatcttataactattaagattcgagaaggcaaattaatagttgtttcctgcctttgagcacaacgaataagaccgaaataaaaatgctgtattacagattcttacaattaaaaaattaaaaacctagaccattctcagagaaaagcaatacacttaggaaagcctgaagtcagggggacattcccagccccaagccacagggctctggagactccgaatggcacttctgcttacaagagattagtctgctcaaagataacaggtgggcaatctccccattcccaaattcgggtcgccagccaccaatggggagatgagaacagagggaagcagttgttgcctctggaatagctgccgtagacagaagatgtacagagcgagctatagatagaaagaatgcgtttccccgcgaggccagcggcattcctagcacttacgccgagggagttatacgtgcggcttctggggcactgcaggacccgcgactctggtgctacggtcggggggaggggacggggagaaacagaaggggaagggctggctgcccagcctcgcacagaagccgcagcccaaggagggccgggcgccgtgaagggcaaagggaggggcggcgagcgaccggggcagcgccgaggcagctgggtgagaagcaggcagagtctcagcgacttcgcctcgcgcgggttcctgggcgcacccggtacccaacctggccgtgcgcgcactcgccccaggtgggagcggaccgtacctctggcccacttccgggaggctcgacccgcccgccccgaccgctagtctcgcgagagcgtgggcaccgcaccgtctcagtcggctccgggccgggggacctggagcctgctgcggctgaggccgggagcggcgctttctccttgccctggggaaggtgcaccggccaaggcgcggccttcctttaacagcctgcgagctcacagttgcacattaaaatcccgcggtaccggctgcgagctaggttgagctgcacagtaggatcttttgctgggaagggctgaatggtgaggggcaaacgacctggcttctggtgtcttttgtgccaccacgtgttttgtttctttgttttgataatttttacttggcctaagttctcagagtcctgatttctaagtgtctaaaataaggggcctggctacagccttgacattccagccaacacgtgtccatcacttctagtgctaacagacaggacacatgttcctgaatgcagacccagtaggtaaggtgtggccagtctgcaaaccatcgagagtgcaaacaccactgatacttaacggtgtccgggtgtacctcatgtacactagatagacccggagatcgtctgagattaagctgcacttatgttaggccagtaactcagaactttttgcagatgcttaaggagatttaatgcctgagggtaaaggaaaacccatcttccagggcttttggagggctcctaatggttatgagaaaatggacagaagatttggttaactaagacttgtggcgtgtggagaagattcttgcattctttattgtggaatgactgtaggtccaaagaggatataagttaaaaaaaaaaaccccatactgaagtatttgtttatttctgtagatttctgagaatggctagttgcaaatggtccgtaactgactttgggaacccacagctcattttctggcccctactatttgccaggcacataaggtgctgggaatgcagcaataaaacagtcactgccctcaaggaactcctacattttattggtgggagacagataaattaaataaattatacaggatataatatatcctatataataagaaggatatgttatatcctatatataataggaaggg

SEQ ID NO: 43 - DNA, 4001 bp, Homo sapiens
atcccagcactttgggaggccaaggtgggcagatcacgaggtcagaagtttgagaccagcctggccaacatggtgaaaccccgtctctactaaaaatacaaaaattagtgaggcatggtggcaggtgcctataatcccagctactcaggaggctgaggcaggaaaatcgtttgaacccgggaggtggaggttgtagtgagctgagatcgcaccattgcagcctacgtgacagggtgatactccgtctcaaaaaaaaaaaatttttttttaatatggttctatctacttatattactaaataataagaaacaaaattaaacatagaggcaaaaagatatggtttggatttgtgtccctgcccaaatctcattcgaattgtaatccccgatgttggaggaggggcctggtgagaggtgtttgatcacagaggtggatttcccccttgttctcatgatagtgagtgagttttcacaagatctggttgtttaaaagcacgtagcacctcccactttgttctcttcctccttctctggccatgtaagacatgcctgcttcccctttgccttctgccatgactgtaagtttcttgaggcctccccagccatgcttcctgtatagcctgcggaactgtgagtcaaacctcttttctttataaattacccagtctcaggtagttctttactgcaatgagagaatggactaatacacaaaacttttgaaatctatatcacagaggataattacatttatttttttaaataagaaaaagaaagcaagctgacattacctgattcttttgcaaccctaagtctgctttcccattcatcaaaaggtcccaaacacttagctaaaaatgtctgaagagtaacacagtccaagggtagcacatgattatcagcaccaacacgtaaaatggggtccacaactatgtaacctccaccacttttctcatttctaagggaaaaaacaaaacaaaaacttttcagtcagtgatagaaaaaaaatcctcatataatatagtctgactctaactaaaaggttaattgtcccaaataaaatgtatttatttctaagcacataaaatcattttaaaagttgcaacaaaacttaatggaaaagctacttttaccctttcacaatctacataattacatgtataatacacaaaatatccaagaatgttggtttaatgaaatataagtatactaaaacctatcagtaataacaagggcacgcaaataaacagcaacctataatcaggttgcatgaaattactacattttaagatgttacttaaaatacatttacttgatactttagctctgcaatggaccataaaattacctcctagaaatcaaagaatattctatttgcatctcaaggaagcactataaaaattgcactgccatggttcatacagtaacatttacaagttaggtgacttcaaattacagaacaaattaactttttttctcacaaacaaaacacctgacttacccttgaaggaaataatactgaaatgaaccagattgttgcagattaagtttacagtatttatcagaatcatcttctctttctgttggattttcccaatccagagaacggaatttttctctattaaatgtttctccaggaaatgggtaatttgtatacacggtaactgcttttccctgtaaagttgggcctaatcggaactgtagctcataccctaaataaaaagcacatgttaataaactcatcgtaggacttaaattaccacattgaaaaacagatgttttatttaaagtattaaaaaaccttgatttttcaattatgtttaaaataactccgcaaacctaatgctgttttggcactactttgtattccaatttagctgaatttcacattttagcaagtatagtaaacatcatagagctgtctgctctgtaatgtctctttctccttcccctggaaacgcattcctattcacatagcaacttgggatgtgcaaattcttatacaaccccatttaccatgatcccccatcctcacccctgaattaagtacccaatggcaggcatctgaggagagaccttctctagtatttttctaactgcaacagagaaagctagtttctctatggtgtcagaaagtatgtgatagtctgtaaaacttgggagctaccatgggactattatctcaccatactgagaaagctagtcttcactgacagaagtcaacctctatagaggcagaattcaggattctaacaggagttctgaaggcaactgaacccgactgatatctgctcaagtccagtgatgtgctaataaagatttagcaactgactagggtggtgggaacctctgacttggagtgtttgctgactttctggtggaaataatcccgacatgggcaatcttaagctaccaacacgacaacattgaacgtggaagtgggaagggatgtgcacaatcagctcttgtgagccagcaaaagcacctccaacacactactgcctatatccctatgcttcatggtttagttactaaagctgtcttgtaatcctgagagccaatgcatttctacttttgcccaagttaggttatttttaaaaaaacataccttagacttgtgcaatgtgttacaaatattttgccataagcgaaaacaaataagcacattacagttaaaactgtactgtgaaagaaacattttggttggtttaaagcagactttaaaccttctttataattattagaatacaaaaatactgactatggtcaagtctattagaaatataatacatataaattttaaacacgaatataactttcaattaataatgggcaataataactgatgaggcaggaaagtttagttccactgagtaaaatctttaatatctaaggaatttctttgagaggaaaaaaactaatatttacctatttaatatatattatttataatttataatccttgacttattaaacatccaacaaagtaataaaagaggatatactaacagggatattttctgtgaacaaaagatttcagtaaaagacactaagagaatgctctatagtgaaactaagaatttcttctctaagcaactaaatgtactttttctataatacaatttggcattaatatattaagaatgtttatattttttgatctaggaattttatatagattttttgagaaaagtatcagtgatgtaaacagagattatgtataaggatatttatcacagcctcatttattgaaatgaaataaactgacaacaacctaaatatctaatgattggcagtgattaaataaattatggtaaatctacaagctggcatattgtaaagccattataaatcatgttatcaaaagacatttggccaggcacagtagctcacgcctgtaatctcaacactctgggaggccgaggcgagaggatcacctgaggtcagaagtttgagaccagcctgaccaacatggtgaaaccccatctctactaaacgcaaaaatagctgggtgtggtggtgtgcacctgtaatcccaactactcaggaggctggggcagaattgcttcaacccaggaggcagaggttgcagtgagctaggatcgcaccactgcactccagcatgggtgacagagcaagactccattaaaaaaaaaatgtaataaccacttttaatttattctattttgttacattgtacacatttatgtagagcttttaaaatatcttctggaaaaaagtatggctgaaacatggcagtaggcagggaggtagagtacatacaccataatactactacaaacgggaaaaaggcaggttacaaaattgtttagatagtataatcctaattaaaaaaaaaacacagaaaaaatgctttttatacatttgcataattttataattagggaaaacattttaaaattagagctacaattatgaagggatagactaagaaataattacagaaagaattaaaacatgaagtaaaatacttagtgactgaga

SEQ ID NO: 44 - DNA, 4001 bp, Homo sapiens
ctagtaagagacaccaagttgacaagaatatgcaacaggggagggggaaaaaaaaatcaaaaccagaaaagtgcagagtcaggaaagccaaaaatggagtaggtactcagtgattttaaatgccaaagttggaaaaaggcgcggatttggcatgaagatatcacattgtatgtgtgaaatttttttcaaaaatttaattcttaaaacattagcgaaatttaaaaattcctttgaaatgtttatgactagcaacatccatttggtacattaataagggggactggatttttcatatattacacttcttcaatgttgaaaaattacaaaggctaagaaaataaaacatctattaactagccttgtagaaaagtaatttgatcttttaaatacagatcaactatatatagttcaacataaccagatgagttattgcactttttatttgctaagaaaatattttcagcttttacctactccacatttgagaagtttttgatatacataaacaatagtttactatactttttgctgcaatctattttgtcaattcaaaggttcaacaaaggaaaagagacagttatacaaaggcaaaactacatgcatacccaaagcaaaattacatatgaagtaatttaccaagttttaatagtaaatgttattagaaataatatgggcaatcttctgatcatatatttaacttcaatcttaagtgggaattagtacgcagagaaaagagaactattttatccttatcctaacacgagggatataaaatatttttaattcaaatcaacattaattagtgatatatggagaacacagcaccatctttgcacaaatcaagttttagacccttggaaataatatttatcttagagctttaaaacatttaacaggactgccaatgaattaaaagtttaaaagacgcaaatgagcaaatcaaaacaacttgctactgaccttgttcaagtctgaagagggtcttttccagtttctccatttcgttcagaagtaaaattcgaatctgtttactgtgtcccattttggcttctagaggatttgaaatctttcataagaattaaaagaactccacagtcgaatgagttacccctatgaaacaaaaaggagttaaaatatcgaaaataactattgccttaaactctccagagctgacagcggcacttacatgttcgaagtgtgttttatgcctagcagagcaatgaaagagaatgaatcttataactattaagattcgagaaggcaaattaatagttgtttcctgcctttgagcacaacgaataagaccgaaataaaaatgctgtattacagattcttacaattaaaaaattaaaaacctagaccattctcagagaaaagcaatacacttaggaaagcctgaagtcagggggacattcccagccccaagccacagggctctggagactccgaatggcacttctgcttacaagagattagtctgctcaaagataacaggtgggcaatctccccattcccaaattcgggtcgccagccaccaatggggagatgagaacagagggaagcagttgttgcctctggaatagctgccgtagacagaagatgtacagagcgagctatagatagaaagaatgcgtttccccgcgaggccagcggcattcctagcacttacgccgagggagttatacgtgcggcttctggggcactgcaggacccgcgactctggtgctacggtcggggggaggggacggggagaaacagaaggggaagggctggctgcccagcctcgcacagaagccgcagcccaaggagggccgggcgccgtgaagggcaaagggaggggcggcgagcgaccggggcagcgccgaggcagctgggtgagaagcaggcagagtctcagcgacttcgcctcgcgcgggttcctgggcgcacccggtacccaacctggccgtgcgcgcactcgccccaggtgggagcggaccgtacctctggcccacttccgggaggctcgacccgcccgccccgaccgctagtctcgcgagagcgtgggcaccgcaccgtctcagtcggctccgggccgggggacctggagcctgctgcggctgaggccgggagcggcgctttctccttgccctggggaaggtgcaccggccaaggcgcggccttcctttaacagcctgcgagctcacagttgcacattaaaatcccgcggtaccggctgcgagctaggttgagctgcacagtaggatcttttgctgggaagggctgaatggtgaggggcaaacgacctggcttctggtgtcttttgtgccaccacgtgttttgtttctttgttttgataatttttacttggcctaagttctcagagtcctgatttctaagtgtctaaaataaggggcctggctacagccttgacattccagccaacacgtgtccatcacttctagtgctaacagacaggacacatgttcctgaatgcagacccagtaggtaaggtgtggccagtctgcaaaccatcgagagtgcaaacaccactgatacttaacggtgtccgggtgtacctcatgtacactagatagacccggagatcgtctgagattaagctgcacttatgttaggccagtaactcagaactttttgcagatgcttaaggagatttaatgcctgagggtaaaggaaaacccatcttccagggcttttggagggctcctaatggttatgagaaaatggacagaagatttggttaactaagacttgtggcgtgtggagaagattcttgcattctttattgtggaatgactgtaggtccaaagaggatataagttaaaaaaaaaaaccccatactgaagtatttgtttatttctgtagatttctgagaatggctagttgcaaatggtccgtaactgactttgggaacccacagctcattttctggcccctactatttgccaggcacataaggtgctgggaatgcagcaataaaacagtcactgccctcaaggaactcctacattttattggtgggagacagataaattaaataaattatacaggatataatatatcctatataataagaaggatatgttatatcctatatataataggaagggggaagtgtggaagagtaagcagagagaggtttgcatttctaaatataacgttcagtaaagtgatgccaaactgcgagaaagaagaagtctaaggtagagggttacatgtagaggtataggaagtacaaaggccatgaggcaggagcatacttggtgaaccgaagaagatcaccatagctgagtgaagaagagagtggtaagagattaggacagacagatggggcaggagaagggatcaggagcacagacgggtgaccagatcttttaaggctttgtaggccattgcaaggacttgggcttttaaactttggaaaaaaagccatggagattttgaacagaggagtgacataatctgattgaccttttaaaaggatcgctccgcaactttatgggaaatagttgaataaactgtagagtgtagcaaggaaggaagcaaggagaccagttagaaagctattttagttattcaagcaagagaaagtgacttgtgtgtgttttctctgtgtcggggggttgggggtgatgggggggaggtggtatagcaggtggtgtagttgctgaattctggactattttgaagatagaacctacaggattggtggagaaaggagtcaaggatgactccaaggtttttggcctgaatgagcagaaagcactgtccaatagaaatattaagtgccacataggtcatttaaaattttcaagtagccacattaaaaaaacttttttaaatacaaaaattagccaggcatggtggcacatgcctgtagtcccaactactgtggaggctgaggcaggagaatcgcttcaacctgggaggtggaagttgcagtgaacccagatcatgtcactgcacttcagcctgggtgacagagcgagactgtctcaaaa

SEQ ID NO: 45 - DNA, 4001 bp, Homo sapiens
gctgaggcaggagaactgcttgagcccaggaagttgaggcagcactgagccatgatcatgccacaacactcagcttgggcaacagagtaagaccctgtctcagaaaaagagaaaaggaaaaaaaaaaaaaaaaaaaaagaaatgaatgctcagaattaatgtaacttgccccaagtcagcttgttagcagcagagccaggagaattctggctctagatctacccgtcatcaaatgctgaaagcttccaagaagaagaaagctcaaggcttttcctccaaaagtagtcattagcacagaggcaacagttgaggccatgagactgtgtaactaattctttgaaggagaacagaaaaagaattcctagcagatacccataattaattaaaaagtgaaaggaagagagcctagtaagagacaccaagttgacaagaatatgcaacaggggagggggaaaaaaaaatcaaaaccagaaaagtgcagagtcaggaaagccaaaaatggagtaggtactcagtgattttaaatgccaaagttggaaaaaggcgcggatttggcatgaagatatcacattgtatgtgtgaaatttttttcaaaaatttaattcttaaaacattagcgaaatttaaaaattcctttgaaatgtttatgactagcaacatccatttggtacattaataagggggactggatttttcatatattacacttcttcaatgttgaaaaattacaaaggctaagaaaataaaacatctattaactagccttgtagaaaagtaatttgatcttttaaatacagatcaactatatatagttcaacataaccagatgagttattgcactttttatttgctaagaaaatattttcagcttttacctactccacatttgagaagtttttgatatacataaacaatagtttactatactttttgctgcaatctattttgtcaattcaaaggttcaacaaaggaaaagagacagttatacaaaggcaaaactacatgcatacccaaagcaaaattacatatgaagtaatttaccaagttttaatagtaaatgttattagaaataatatgggcaatcttctgatcatatatttaacttcaatcttaagtgggaattagtacgcagagaaaagagaactattttatccttatcctaacacgagggatataaaatatttttaattcaaatcaacattaattagtgatatatggagaacacagcaccatctttgcacaaatcaagttttagacccttggaaataatatttatcttagagctttaaaacatttaacaggactgccaatgaattaaaagtttaaaagacgcaaatgagcaaatcaaaacaacttgctactgaccttgttcaagtctgaagagggtcttttccagtttctccatttcgttcagaagtaaaattcgaatctgtttactgtgtcccattttggcttctagaggatttgaaatctttcataagaattaaaagaactccacagtcgaatgagttacccctatgaaacaaaaaggagttaaaatatcgaaaataactattgccttaaactctccagagctgacagcggcacttacatgttcgaagtgtgttttatgcctagcagagcaatgaaagagaatgaatcttataactattaagattcgagaaggcaaattaatagttgtttcctgcctttgagcacaacgaataagaccgaaataaaaatgctgtattacagattcttacaattaaaaaattaaaaacctagaccattctcagagaaaagcaatacacttaggaaagcctgaagtcagggggacattcccagccccaagccacagggctctggagactccgaatggcacttctgcttacaagagattagtctgctcaaagataacaggtgggcaatctccccattcccaaattcgggtcgccagccaccaatggggagatgagaacagagggaagcagttgttgcctctggaatagctgccgtagacagaagatgtacagagcgagctatagatagaaagaatgcgtttccccgcgaggccagcggcattcctagcacttacgccgagggagttatacgtgcggcttctggggcactgcaggacccgcgactctggtgctacggtcggggggaggggacggggagaaacagaaggggaagggctggctgcccagcctcgcacagaagccgcagcccaaggagggccgggcgccgtgaagggcaaagggaggggcggcgagcgaccggggcagcgccgaggcagctgggtgagaagcaggcagagtctcagcgacttcgcctcgcgcgggttcctgggcgcacccggtacccaacctggccgtgcgcgcactcgccccaggtgggagcggaccgtacctctggcccacttccgggaggctcgacccgcccgccccgaccgctagtctcgcgagagcgtgggcaccgcaccgtctcagtcggctccgggccgggggacctggagcctgctgcggctgaggccgggagcggcgctttctccttgccctggggaaggtgcaccggccaaggcgcggccttcctttaacagcctgcgagctcacagttgcacattaaaatcccgcggtaccggctgcgagctaggttgagctgcacagtaggatcttttgctgggaagggctgaatggtgaggggcaaacgacctggcttctggtgtcttttgtgccaccacgtgttttgtttctttgttttgataatttttacttggcctaagttctcagagtcctgatttctaagtgtctaaaataaggggcctggctacagccttgacattccagccaacacgtgtccatcacttctagtgctaacagacaggacacatgttcctgaatgcagacccagtaggtaaggtgtggccagtctgcaaaccatcgagagtgcaaacaccactgatacttaacggtgtccgggtgtacctcatgtacactagatagacccggagatcgtctgagattaagctgcacttatgttaggccagtaactcagaactttttgcagatgcttaaggagatttaatgcctgagggtaaaggaaaacccatcttccagggcttttggagggctcctaatggttatgagaaaatggacagaagatttggttaactaagacttgtggcgtgtggagaagattcttgcattctttattgtggaatgactgtaggtccaaagaggatataagttaaaaaaaaaaaccccatactgaagtatttgtttatttctgtagatttctgagaatggctagttgcaaatggtccgtaactgactttgggaacccacagctcattttctggcccctactatttgccaggcacataaggtgctgggaatgcagcaataaaacagtcactgccctcaaggaactcctacattttattggtgggagacagataaattaaataaattatacaggatataatatatcctatataataagaaggatatgttatatcctatatataataggaagggggaagtgtggaagagtaagcagagagaggtttgcatttctaaatataacgttcagtaaagtgatgccaaactgcgagaaagaagaagtctaaggtagagggttacatgtagaggtataggaagtacaaaggccatgaggcaggagcatacttggtgaaccgaagaagatcaccatagctgagtgaagaagagagtggtaagagattaggacagacagatggggcaggagaagggatcaggagcacagacgggtgaccagatcttttaaggctttgtaggccattgcaaggacttgggcttttaaactttggaaaaaaagccatggagattttgaacagaggagtgacataatctgattgaccttttaaaaggatcgctccgcaactttatgggaaatagttgaataaactgtagagtgtagcaaggaaggaagcaaggagaccagttagaaagctattttagttattcaagcaagagaaagtgact

SEQ ID NO: 46 - DNA, 4001 bp, Homo sapiens
tagctgtactcaagcccctgagtacaggataagtaaaccctgagtgcagggaactactctggctcttgcagactgacattacccaaggtcagaggaatacagccagctgctacaattttctcataggcctcttgaattcgccggcagctgtcctgaaggttgtaaagattgacattcacatcgcctaggtctgcaaccatgagggactggaaggggagggcccccgtgctaggattgactgtcccaagcatcactgattcttcccggatgcggcgaggtccgaatctgcagaaggaagaatcatcctgtcagccatcatctgcagagatttcaggctttgcttaggccagggcttctcagcctcagcaatttggggccagatgattccgtgtcgcggcattgcataatggaatgcttagcagcatcccggcctgtactcactaggtgccagtagcacccttcctccaaggtgtaacaacccaaaacgcctccagatactgccaaatgtccccggagtgcaaaaccgccccacttgagaatcaccgatctaggctatgtatcgaagagactaaataagtgtactaaatggcattagtgaatttcatgatctacctgagtctcagtttcctaatttgtaaaatatttaccttgcactgtagtaaaaattaaatgaggtaatctatgcaaagcaccttgcacttaggagacatttaataagtgctggctttcataattcagatcagtacggtcagatatagtgttgctgagctgaatcagaaattgctgacgttcaataactaggaagatgaattttgcttcctccgacttgatcctaggaaaattgccttcatttgagcatttcttgagtcaggtgacatcttcagatttggggaaggggcagccagtttctgctctcaaatgcaatgtcacctgccactgtaagctggggagaggagaggggaggaatccacagcagccatcccagcaaggccccaggatggggacacagagaaggttcaggctccagaatcccttcttttttctttttttgagacggagtctcactctgttgcccaggctggagcgcagtggcgcaatctcagctcactgcaacctccgtctcccgggttcaagcgattctcctgcctcagcctcccgagtagctgggattacaggcccgcgccaccatgcccggctttttttttcttttttttgtacctttgtagagacagagtttcaccatgttggtcaggatggtctcgaactcctgacctcgtgatccgcccgcctcagcctcccaaagtgctgggattacaggcatgagccaccgggccggccaaaatcccttcttgaccaatgatgacactaagatgtgggaggccacgcccatgttgagccctggggtttgcttattgagggtccaggtaaatcaaccatctcaaaccataaggggcattttggagccggccaccagcttccaactcgacccggggccagcaggggcgcctgtctcggtgctttccatgcccgacagccagcaagcagtccctccacgtgtacccggcccccgtccttccggccttacctcgccccaggccggttggaggtcccagtatccaggggcaccccgatgaaggcagcgtccagcccctcgggggaggtctgcaccggcaggcgcatcatggagcagacgcccaccggccgggccacgaactcggggctggggggctggttccggggcgcgtcggaagcctggcggctctggcggcgccccggatgaaagagccctgcggcaggacgcgcgcccacgccgggccccgggccccgggcgcacccggacgccagcagcctcagcattgccgcgcgcggccaagacctcaccgaccaaaccgcccgcgaggccgccgcgatctggctggtcccgaacggcgaggcgagtgtgcacgcgccagagccggaacccgagccggctcaaaggtcaggggcgccctaggatcaaggcgggggaggggccccaggacctgccgtgctctcccctcaacccctctggacttcagcctctggcaaatagagtcaggctgggggtgcccactggccggcactgtgccaggggtgtctgcgccctgctccccactgtggccttcagcagcctcttctcccattcagagtaattgtttgtttttatagagacggtctcactgtgttgcccagactggtctccaacttctggactcaagtgattctcccaccttggcctcccaaagtgctgggattacaggtgtgagccacagcagccaccccagagtaatatttttaaagccagaaagatatgaaggaaaatgatctttctctaagccagaaaaataggaaatgcatttttttaaataatgtatttttaaatgtccagggataggaatctcaagaagcagtaaagttagttagctacttagctagctagctagttattttgagacagggtcttgctgtgttgctcaggctggagtgcagtggcacaatcatagctcactgcagcctcaaactgctgggctcaagcaatcgtctcacctcagcctcccgagtagttgggactacaagcgtgagccatcgcgcctggccagtaaagtctttttaaataaccttgttaaaaaaggactagaggccaggggcggtggctcacgcctgtaatcccagcactttgggaggctgaggcgggcggatcacgaggtcaggagatcgagaccatcctggctaacacggtgaaaccccatctctactaaaagtacaaaaatttagccgggcatggtggcaggtgcctgtagtcccagctacttgggaggctgaggcaggagaatggcatgaacccgggaggcggagcttgcagtgagctgagatcaggccactgcactccagcctgggcaacagagcaagactccgtctcaaaaataaataaataaataaataaataaataaataaataaataaaggacttacaggcaagctgtaaggaaggtcacagtgccagagaacctgttacatcctctttatttctaaggggaaagaaaaacacacgtggaaagaaagaagtgatttgtaatggaattatgtgagccatttagcagtattatatatattattttttctgatctctaaatgttgagattgaatggaaaaggctcacatttgcatttacgttgcaacctctacacaaaggttgcacattaggccaggcgcggtggctcacacctgtaatcccagcactttgggaggccgaggtgggcggatcatgaggtcaggagatgagaccatcttggctaacatggtgaaaccccatctctactaaaaatacaaaaaattagccaggcgtggtggtgggcacctgtagtaccagctactcgggagcctgaggcgggagaatgacgtgaacccgggagggtggagtttgcagtgagccaagatcgcgccactgcactccagcctgggcaacacagcaagactctgtcaaaaaaaaaaaaaaaggttgcacattaaaccccacaccactccagcctccactctggagtggagcctccactctgcaggtcgggacagagtttcctaatggtcaattatcagtgcttagtgttggccttggggcaggtcccagccattttctggaacaaatgcaacaatctctcagttattttttcctttttttctcccttatgccacttaaagggtctcagttattctcttgactcccaaattcaactgctatttctttcatgttgcttgtcctgaatgtatcatgttcttactccgggtttttctttcattcagctcacaaatattgagtgtccgctatgtgccaggcgttccaatgaggtgtccccaacatccactactgctgagcaccctctctccttgaaacgttcctcaggcggcctcttgactgggactcccctggtctccttccaccttcgtggctccttctcggctggcaatcccttttaatacggaggtga

SEQ ID NO: 47 - DNA, 4001 bp, Homo sapiens
cccagccttgaaaaacagaagttcctgggatggagagagggtcctgacagagaggaagtactcaagtcagttgctccctgtgcttatccttacgactacacagtctatacaaggctggttgttaagagggaaaacagtcactaagtacttagagatcactaaatggataacttgagtgaggtcgtaggagctatttccttgggagggtgggagggagttaggtctgctacaaaaaaaacaaaataattccactaggaaagtaatgaagttcatggcctaaatggaaatttgattcccatccccagaccaaatgtaaggaagtggtgagagatgacctgaaggattcccaggtccaggctcctcgtcccatcacagggtaagacacttaagacacaagaggtatcaccaccccacagcccatcctaaggactccagttttcttgaggcaatcctgcctcagtttatcctctgttcctatgtcttttcctcctcattgcctgcaaataagaagttaaggctatcacctaggcctcaccaggatgaaggctataaactcccccatcctccaacgtgtttgtagggtttagatcttggctctaaagacagccctgacagtttctggggagtggggagaggaaaacggaaagatatccagtggaagataggagccatgaaaatattaagaaatattagaataaatgttataaatgtagagtgtaaccttaacagacaattcaatggaaaatctttggattaaaagcccccatcactactcagtattggagcagaaacttgcaaaccaagcagacaactccttccaggtagcccctgccctgtccttgattcctccgtaaccaatacctttcctaaggcctatcttcaggaggacccacccccagaacccatcgcttcggtcccagtctttcctgtggcagaaaaatgcactttggcagcttccctcaacccattcttagcaaactgtgactgagggccaagtgtaagagcccctaaaatgggggaggggaccataaccatttgcacactgccagcataacctaagagagaatgcaccccatcagcgcgctcctttttccaagccaaacggggcggggcgggggggtgtggagaggtgggggtattcggacagccacgcccccaccacgtcgggcagccccttccagctgccacctccgcgcatgctctggagcctccgctccgactccccagacccacggggggtaatcccgggactgggtccccacccaccgccccctgaccctcgccctcgcgtcaggcccagtggggcggagctcacagtccagctctggcgccttctcccaagagacattagcctattccagcccagcggagcccccgcccccggcatgcggtagctccaggcccatctgtgtcgccccctcctctcctggacacctggagcccgtcccctgccacctgccgggcctctccgtaggcctccacggatgtctgggagtccttccgtgcgtgcaggcccttctcccagattacttccaacccgcaggactgtatacagcctccttggacaaacagcccccatctcagggctctcttcacatggttctcccccggaactgcacacagcctccttcaaactgggcccccatcgtgggagagcccttctcctcactcaggagcgcttccatcacttggaaaccacgcttttcatgcgggatcccccagtccttggagcatgcaccgttccccctcctggggacccttacctgctcccgagggtcccgcttccatcccatatacccgtgcggaggtcaggcggcccggagactgtgaagtccagcgtgaggggcctaggtaccccacactctcgctgctcgggatcccgggccgggctcggctcccctaccaagcccggccgctcgcgccgccgcccccgcagcctccgttgccgccgccgcggagcctgcagcagctcccactgcgagcgcccggccagctgccagtgcgcaggcgcgaccgccgggcccagggggcggaccggaacgagtcaagcggggcgctccgacggcaacaaaggccaatggagaggggcgggggcaccggggacccaaggcagcggcccctggcggtcacccgtcgccatgcagcccggcgggagggcgccagtagaggtgccttggaaccgcgcagtggtataagtggggcagggcgaagggacatcccgccacagcagccttcagccctgtgtcttttccccaaataggtccctccaaacctacacacagcccccgcctgtcgcaccgagctgcgcgcacacattatgggaaccccacttcattcccagaccccctggcactccagcgcccaggggccctgcctcccacctctcctcccaatcaccctcatccttcaagccttggctgcaaagcgactgcctccacgaagtctttctccgtccctagtcactgaactcactgacgccaccccctcttccacgccatgtgctggacgctgagaccacagataagtagagacgcggcctaccctggaagatgtcacagtttgaacttaagtgcagctacagagctctatccgccggacctgggaagcacctgcctccactttctcatctacagttcatgcctgaactgtcaatcagcttctgccctcatcacgtcacttaaatgacttttggggttgacatccaaaggatacttttcaattatttctctgcagcatctgtcactgtgcctctacttcccttctgagccttctacttggctgcggcatcttctgcagtctcctattgcctaagtccttttcagtctttctaaagggccccttttgcttttgcctcattaactgttcactgtggttccaaacccagctctcttctcattccactctccccttaaaggtctcatccactcttacggcccaactatccttccaaatctctgtttccaaccatgtctcatactcacatttccaagtgtttgctggacagctccacctggatatcctaccagcacttcaaatttaagaagtccaaaccaaacactttatctttcactcacaaacatacttgccctgtgcttcctatctcagcgaacagcaccttcatgtcagaaatgacagttcctctatcccttgttctttccatctattcagctgttcaccacgtcttgacatgtttaccttctgaactgctctcacatgattcactgccattctgatggtttcttatgctggtgcagacccttatcatatcttgctagacgtatcacaaccacttccttgctagtctcaaagtttctgggaactcccattctccctcctattcggtctggtgcagtgataggcggggtaagagacccagctcaaacatcactttcccataaactcacaaatttttgatgcctgctttacactagatgccatgcagaggctgggaacttaagggatggaccataaccggtccttactcatgaggagattaatttctgacacttataccatgccttgcttctagaggttctcaaacagcaaccatcagaatcacctggaaagcttgttaaaacttggattggtggctgggcgcagtggctcacgcctgtaatcccagcactttgggaggccaaggcgggtggatcacctgaggtcaggagttcaagaccagcctagccaacatagtgaagtctcgtctctactaaaaatacaaaaaattagccaggtgttgtggcagacacctgtaatcccagctactcaggaggctaaggcaggagaatagcttgaaccggggagggggaggttgcagtgagctgagatcacgccattgtacttcagcctgggcaacaagagtgaaactccgtctcaaaaaaaaacaaaaaccaaaaaacaaaacttggattggtaagccctgcctctagagttttcgattcagtaggtgttgggtgggacccaaaaatgtgcatttctaacaagtttccagataaggctgatga

SEQ ID NO: 48 - DNA, 4001 bp, Homo sapiens
tgggacacccaaaaaagaagaggtaaaatgtattttctgagctgtacttggcttagttgtaccagttgactaggtggtttgatgtaacaaatgttttctaagacatttcccatatatatgggcacaatatcatatgaaaaaccctaaggagaaaaagaaaaaactttaaaaacttttttgaaatatctttaaaagttttgggatgattaataaagggtctgaccttcatgacttgttttccagacttgacaacaggacagttatgtacaaagatcacctatggtcccaaataatcacatctcctgtacagtaaaacagtagtatggtaatttttttaaaagggcaggacagtttcagaaatacacaaatcaaaactgaataagagtcgaaatcttttcacaatccagacagaccttttaagacgatatgggggaaagcgaaacaatggagcaggaaaaagagatatggtctaaattgattagagaaacttccatgtaacaaaatttgtaaaaaaaaaaaaaaaaaatttgtaactctctccccatctcatctccccagtttgagtgcttttttgcaaccatttgacacgtaatctattcaacaaagttcttagctatcgttatgtcactggtttcttttacgtaagtttttcttatatcaaattggcaaaaagagatatggaattcaggaacttgtaacaccattagtaacaagacagccccgcaaatattttgaaaattaatttacgaacttgtgatcgtctgaagcatactttcaaatttaataagccaagcatgatcatttgttaggcaaaccgttatgcaacacctttctgtccctgaattaattactttagaaccataaacaatacttttccttttttaaggacaagtactatccatgttgcaattttctcttaagactgcaaaactgctgctcttgcccccagagataaagcagttttcttaaattccaaatttccaggaatatgacaactacttctctaaggaatagagaatgaaaaaaaatatactgtcagcaattttaagaaccacctcctcgtataagcagggatccaggctgctatgacatttccaagctcctcagaaactatctaccatgctgccacaaacaacagaaaagaactcgagggtaggagcaatgccatgttgaatttaacgttgcaccaacacctccttcgaacttaatctgaagttatccgttatctcagcctatcttcacaactatcctaagaggtaggtaagggagctggctggctgcccagcctctacggaacacacaacctggctaaaggacacgcactccaactagacaatggcaaaccattctaaagtctagaagaagggtactccagcaaagagtaatgccgcctagataaccccaaacttaaatcctccaagcgtttccccgcctcgcagtttcgccgactcaggggcccccggggaactggggctgggctgcggggaggtcgcggaggagcagggcgaggggcgggagaccgagcgatgcccgcccgacgctcacctcgcgcacctgggccgggcgggaggagcagggatgctcagaggacagtagctgggtgacatcccctacctggcccagctactctgactcacctgcggagccgatttccattcatggagctggggggagtgcttcgagggagaacggagcccgccactggcggcaaggaggcggcccggggggcgacgcggcgcgacgcgacgggcactctcactcggccccgaggcgggggcggcgacggcttcccctgagcaaccgcactccgaaagctctgggccggaagagtcgcggacggaaaacggcacaggactaggcgagaggaaggggagatgtgaggcgcggacagaggggagtcccgtccggaagttgcatcgcccgcggccgccgacgctcccaccgctcctccacgactgcgggccgccgccgccgacctgcccggggccgccccggaagctcgccggcgtcagttccgctgcctggcttgcccggcgtcctcgcctcgcctctgggccccgagccgtgccggagcgacgtcggggcaggagcggccggcgcggaggacgccggggaggtgtccgggagccgggccacatgcggcgggctcggccgtaccccgccgggccgtgccggccggagacaacgcggaggggcaggactactcgcgccgcacgagtgggggcggtgcctgtctgcgacgacgtcgcggctggcggcggggcttacctgaggagtagcctacctggagccggcgggtgaaggaccccgaactgccgcggaggccccgagccgagcccgctggggtagggccaccctccttcctgagcccccgccacgcccagtccgatccaccccacgcgccgcctcctcacaggcggtcaagtgaccaccgcaattgacctaagtcctaggctgctttaacgaccatttttaggaaaaaaaaaatgtattatagtttggaaaagatgactaacaaacaggacactacacaaacatcagatcgagtaatttccatgtttaaaactctttaatagcgcctcgtcacacttgaaaacccaaactcctttccagggtgaaaacgcacggcgtaaatgggccccgcctgtgctacagctatactggttggcttccaattctcccaacgggccaaccgctgcttttttctgacttggagcttctctgcttttggttcccttggccaggaaccctctctctcttctccaccctccccttacgccctaccccacagcttttttttgcgtctcaacgaaagacatctgagacgccttttccggaccacccatctatggtggggcacctgttagtctactacagtattgccttggtagccctttgcccagtctgttatttatttactacttgtgtgccccccacctcacttgaatgtcaggcaaatattaggtccttaataaatatttgttgccttaatgaaacatactattttattcaggctgaggaatcattcataatttctccccatgtccctatgcttcagtaatacggttttttttaatcaaaataattttttaaagaggaaaaggagaaagaatatcctatcttcagttcccctcactgtgggactttggatcagtcacttgatctctctgggcttcaattttcttatctgaaaaattgagagaacagcatgtaccttacacagtttgtaaggttaggtaatatacataaagcacagagaaaatcctccccaaatgttagtgaataacacaagtatttactatttaccattttaaagtacttaccatataatattaaacaataaatgtatgggactcaaaaccacatctgactccaattcttactttcttcttctttcacatccctacccccatggctgaaaataccctccccaattttaaaatatcaaattaaatgtcaccagatgaaacactgcatcttaaaagtcatttttaatcctcgactgtacacaatccaaatcttggtagcagcatctgacagggtaaataccaactcttgtgcaagggtcttttatatcctcaacccctctgattctggaaccggttccctaaacaaaggcagacttcttcagcttcttccagaatagacattagacatggtgacagtgataaacctttggggtgggctagtctttttcaacattgatggagcagaatttacaccctctgattcaatccatctcagtaaatgtcaatgatgccttcctatctacttctgctatccaggaacccacctctttagagtcaatgcatgtgaaaggctcatgatttgtaatatcaagaagtaggaagacaaagaggtttgaaggattctgccaaaggcaaagctgtatgaggctctctcctgactacatgtacaccctatatttggataactcattcccaactgagtctgctcttaagggtacagagcagggtcattgggtattatcttaactgtca

SEQ ID NO: 49 - DNA, 4001 bp, Homo sapiens
acaccaaaaaaggagtttgctagagagcagacaggaaaatattccactcaacagaaaagatccatgtgacattttggcttattcattagtgtcttataaatgtggttagtgagaattaattttccacaatctgaacaatcctgagtgaaccactaagtcctcaaacctgcaaaagctaaaatcaaaacaaaaaaaaaaaagagtccctgggcagtgcctaatatcaccaggttgatcctttccatgaaattcagtttatgcccacagttacacaatttctttcgatatcagatcataaatgcaacagttgtttcaattatgaattactagggggagggaagaaacatctgttgagcatctataggcactagtctctacaataagacttatcatatactctcatttcattctctcaacaatcttacagaacatacttattattaccctcaatttatagacgagaaaatgaaagttcaaaggaattgagtaattttcccagggtcatacaactattacattactagattgaatctgttacattcctaaagacctgagcatgtctttagccaggggacatatctgaagttaacctggcataatacactgaagtttatcaaacaatattaatgcggcaagccaatttatttttaaaaggcatatgaaatttgattatgagggcctttaaacaatactttaagaagcaaattagggtggggcttaatcactcagctatgcaaacaagtgctaagtaaacaaacgtgccaagtttccaaactcaaatggcaactcgaattttctacgcactaaaaagatgaaacactctacgactaagttcattatgtaggtaaagtttgaatattaaagtgaattccaccacagcccctaaacactgagctacttagccaaggcattagaaacctgttgggctttgaggtggaagcaccaggccccaatactcaggacacttgttacagcctggaatggttcttctggtttggatagagagaaataaccagaggccatccatatccacaacaaattagtttccaaagcactttctccttcatttgatcctcacaaccactcataacccaattagaagagaactcagggcattgaagcctgtggtggagcagactgactggcaactcctgtgtcactcaaaggctggctcagaccactctgagactaacacacagactgagtgacagaggcacaggaccatgttctttgggacatcagggcctttcagaaagggtgggcattttgtcccttgaccttcagagatcatgagaggtgtttggatgaagttcttcttcctcatctgaaggctctggaccatctgccagtgcaaagaaaaataggggcgcggccccaaaccaggactaccggctggtagtaggcagcggggcccttttcccggtctgggccaggcctccgcgcgcactgggtagcggatcgcccccttctgaggcccaaactaccctcgtcgcgaccccgggcacatatcgtctccccgaggtggggccaagagtggcctccgcccggcagcgccggtcaccttcccgaacctcccccctggacctcgggatccacccaacggccggctggggcgcggtcaccgccccccaggcccgggtcagctccctccgcttcgtgctgcggggctcgggtccccttccccgaggcctggcggcccgaacccggcgaggcgacggggcagcgaaagtcccggccgcccgccccgggtcccgggtcccgggtcccgccccgacccgagctcgctcctcaccgggtcccagcgcctccatggcggcggcgggggccgcctcgccccggtccccggcgcctcccgctccgggccccgccgccgccgccgccgccgccgcgtaacgcttgatctccggaatattggcgctggggtggcgccgcggagacgcgggcgctgggcagggggcggcggcggcgcccggcccggggacagggacccggctccggctcttccggcctcagcgacaacaaaaacaatccccgccgccgccgccgccgccgccgccaacgggagcgggagcgggagccagcgcgcgcgcccgccgggagggaagggggcgcggggtgcgcggacccagggtcccggcgggcggagggggcgtgcgcggccccgggcgcggggtccacagagcccggcaggcggcgaggcgggtcggggaacgagcgcgcgcccggagggtgcagagcccggtggacgtgtcgggcacgcgcccgctggcccgctctgccccgtccacccgaggaggccgtccggtggccaacggctctgggggctacgtgccatccccccagggcgtcctgcaaaagatctggattccagttccgctgacccacagattcagttttccacttctgtgagtggaaagtgtactgagattcacaggagccacctcgcctccctcctccctcctcccaccccagatcgcttctgtcatctcgtcttttagggtcaccttagacgctagcagtcctccttcatcccttcattcagcaccacacacccaactgcgcgtccctctccgtatagccggaaggcaccacgggaatggaccctgatgaatgatgcattccctccctggtcccatgacaagcgcctctggtcagcaaatcaccagtcactttagaagagaaaggtcttggccgggcgtggtggctcacgcctgtaataccagcactttgggaggcggaggcgggtggatcacctggggtcaggagtttgagaccatcctggccaacatggcggaagcccatctctactaaaaacacaaaaaattagccgggcgtggaggcaggcgcctgtaatcccagctacttgggaggctgaggcaggagaatcgcttgaacccgggaggcagaggtttcagtgagccgaaatcgggccactgcactccagcctgggcgacagagcaagactgtctgaaaaaaaaaaaataaaaataaaagagagagagagagagaaaggtcttgctttcttggatgccttccccttagcagacaaaagccaagggagcagcaccacctccaaggcagcatggtcagcccagcaggcacagcatctttagggctttcagtaaggactttgagtgggagaacactggacaacaggccaagaagcagtttctagtcagcagaaggaaggagccccttgtccaccaattgaaaaggtacgatgagtttgtgtgtgtgtgttgtattcctttgctacggcataacgtaacaaagtaccacagactgggtggcttaaacaacagaaatttattttctcacaattctggaggctggcagtcagagatacgatgtaggcagggttggttccttctgaggcctatctccttcacttggtagatagtggccttctcccagtgacttcacgtggtcttccctctgtgcacgtctgtgtccaaatttcctcttcttataaggacagcagtcctattagagtagggctcactctagtgacctcgttttaatttaattacctcttcagagaccctgtttccaattacagtcacatcctggggtgctagagttaggacttcaatatacaaattattggggtgggggataatttaggcccctagcatgtgtggtgggatattcatttgagcacctgccatgtgctgtcacagagccaggtagtttttttatgtaatgataaaaaatattagcatcacatcctggccatgcactctgctatgggcttctcattgtcactcaatctttacaaccaccagtaaggtagatattgttaagaaaggtatttgtacagatgatgacaccgaagctcagggaagttaagtaagtcgggctttgcattacatgatgctgaagtgaagcatgggaaaaattggagttcaaatcttgcatttaagtcctggctaattctctccctgattggctatggaactaggacttttatttttttattttttattttttgagacggagtc

SEQ ID NO: 50 - DNA, 4001 bp, Homo sapiens
gcaaatgtccacagtagactcaagccctgggcagagatgtggggagacctctgagtcagcccgctgggcggaagctgggggaagcccacactggccaccacagcccatgcgggaacgctcagagatgcgtcacctgtgaacacatcccctcccccaggtctaaccaacttcagccaccccagctccaataacgtccctatcagctaaggccgaatttgggaagggggcccacctggcttggggtgcctgccttccacacttctccccacctgcccagtgctcagggcccacctcccagcaagcttgggcagtggaggagggggatggggcgttggggtaaggggccagcttggccctgtggctgggctgagacgccccttcctcgggcttctacagtctgtgcactcagggcagcctgtgaaccacgaaatcaagtttgggcagtgcagggtgccccaccctccaccttctcagctcctggggccctgagggcagctgctctgacggtggcctgtggtaaaggctacagccgacctggcggccctcacggggacagggacccacgcactcacgcactcccctgagaacaaagccgggagaagcagccccttcctcagatctggggggctggggctgccggatggggggagagacaatggttggcctgtccactgcgcagcccctgctgggagcctcaggactgcggcatccgcagggaccccctccagttgcgcaggcagagcctcttccacgccccccaacagtaggctccaggaggcagatgacccaggcagggggagggcctggtggctttcatcgccttcccccaccccagccacacccaggagcagcggggaggaagtcgggaaaatcctgcaggggcctggcaaagtgccctggccgctgtggaggagactgggccggcgggggagcccagctgtagcccgcaccggccagtctgaaagaagctgccaccttctccacctccgtggagggaaatgagtggatttctggtcccaggagatggttttgggggtacacgggcgccggctctgggtcccccgagcccctactaggagaagatggtgggggtcccagcgtacctaccccgggggctcccagaagcacctgaaggagaaaccagggaaacttcccctccccggggtggggagccccggttcccgcaggagcgcgatggggcaccggccctgcccccaagcacacgaggcccggtgacggccccgcccacctctctgctcctgcacgccccccccccgcaccactgcggcaccccccacctggctcccggggttgggagctcaggctgtgcgcccctttttctctcctgaccaacccctctcgccccgggaaaggcctctggggaggggaacaagcggatcccaggcccagcccccgctccccgcccgggcaaaggccccccctccccaggcccctctccttctcggccggtagggagggcgcgcggcagccgcagtccgtgggcgaggtgcacttgtctccgcgaggagggaggcggcggcgggcggaggacggcggcggcgcagcaactttccccggcgcccgcgagtttcccgggacccggcgaccccccctcccggggcttggcggtcgccaagggagccggagcgggggctgcggagcgaccggggctggttcccacggcctggggcgggggtcccggcggggcggcaggcgtcgcgaggggaggccggggtccgggtgggcgcaccttgcaggagtacgtgtgctgcaccgggtccacgttgaggatctcctccaccgtcccggtgagcaccacgttcgcctcctcctcgcgccgctccagcgcgcgctccgggcatgtcccgccggctccgggcaggacgcacgcggccaccacaaggagcggcagcagcggccgcagcgggcccgggtgggaccggccggccatggcgcaggcgagaggcggcggaggagcgcgcgggccgcgccggggacgggactggacaggacgggacgcagctccggaggcggcggagcgcgggcgggcgggcgggggggggcggggccagggcggcgcccctccccctctctcctccccgcccccctaccccctccccgcgccctcctcctccccctcctccttccttccccctcccgccccctccctcctccctcccccggcccgcccggaggccggcgacccgcgccgccgcgaacaaagccccgggacgcagcgcccggcgcggccgtggggcgggaaaggggcggcccgggagggggcggggagaggagagtggggggcgggtctggatcccgcaggcgcccctcccccgccgcggccccccggaagtgcggctgcacccgagttaatgcctaatctggaggagacgtgacgggactgccgaggggctccgggcggcgcggagccgggcggcagggctcgaaggccgccgggaggggccccagacccggccccgatcccgctccgcaggccgcgcccctcccccgcggggccggacaccgaggctcggccgggccggaccccccgggagctgcggcgcggaggcgggtcccggtgccggggcgggcgctgattggccagcacggggcgcggccccgcccctcccggccccgcccccccaggccccgccgcggggaggttcgcgcccccttccgtcccgcggctgcaagcgcgggtcccgccacgccccttcccagctctgggccgggcgcctctgcagcttggcctggctgggtgcagggggaaactgagggctggaggacccaagtgggagcctggcctagctgaagattgaaaggagggagcggaggccccctttgtcccttcagaactgtgtctaggctgggcgtggtgactcacgcctgtcatcccagcactctgggaggcggaggcagcaagatctcttgacaccgggtgttcgagactagcctgggcaaaatagcaagaccccatctctcaaaaaaattaaaaattagctggatgggccgggcgcagtggctcacgcctgtaatcccagcactttgggaggctgaggcaggtggatcacgggaggtcaggagttcgagaccagcctggccaacatggtgaaaccccgtctctactaaaaatacaaaaattggccggtgtggtggcaggcgcctgtagtcctagctacttgggaggctgaggcaggagaatcgcttgaacccaggaggcggaggttgcagtgagctgagatggtgctgagaggtgacagcgtgctggcagtcctcacagccctctctcggtcttcacgcctcctctgcctgggctcccactttggtggcacttgaggagcccttcagcccaccgctgcactgtgggagcccctttctgggctggccaaggcgggagccggctccctcagcttgcagggaggtgtggagggagaggcatgagcgggaaccggggctgcgcgcggctcttgcgggccagctggagttccgagtgggcgtgggcttggtgggccccgcacttggagcagccggccggccctgccggcccggagcaatgaggggcttagcacccgggccagcggctgcggagggtgtagtgggtcccccagcagtgccagcccactggcgctgcactcgattactcgccaggccttagctgccttccggcggggcagagctggggacctgcagcccaccatgcctgagcctcccaccccctccgtgggctcctgtgcggcccaagcctccccgatgagcgctgccccctgctccaccgtgcctagtcccatgaccacccaagggctgaggagtgcgggtgcacagcgcaggactggcaggcagctccacttgcagccccagtgcgggatccactgggtgaagccagctgggctcctgagtggtggagacgtggagaacctttatgtctagctcagggattgtaaatacaccaatcagcaccctgtgtctagctcagagtctgtgaatgcaccaatagacagaca

SEQ ID NO: 51 - DNA, 4001 bp, Homo sapiens
gactgctgggaagtcctgcctgacaagcgccaactgttcggggtttggatggcgctggtcgatgcagcccgctcactgtgctgctcctgctcaggcagcgtctccagagacgcaattccatgggccatttttgaggcagagactgtcgtttgttctcagttgtgatctgcggctgctccctaggctggttccaggtctgcacgcagccgcgtcctgggagtaatggtgctctggggtggcgggcctgacaccctcgccctgagtgcccctccgccttctcctctcctgcccctgcctcttggccagcacctgccccttctatgtctccctacttctcccgggctgaatgctaaaggtgaagatgacggctcatgctcctgtggtgcctgccatttgcagggcactgttctcatatcaacccctctgacctcaccatagtcctcaccttccctgaggtttccctgatgcagtatttcaccctgcagctttccccaccacaccgggcactctcaactctctcatccagctccccttttccctccttataaccctctgtaccatgtagttatgcacttattctgtccagcgtctttgtctgtttgctctgatgtgaatgtgagccccggaacagggttcccgctgttgtgtttactaatacagcccacattcctaggatagtccctgggacctactgcatcctggagaagtagttaatgaattggttcatgctgttttgcagaggaacagagaggtccagtgacttgttcaacgtcacacagctgggaagagacagaactaggactcagaaccaggccccctgactctgtcatccacgagctgaagcaccaatctacgctgccctcgaataaaattggaatctgccttttagcttatcccaaagcttagaaagcactttcatgttatattagttctcttcagctataccagagcccctgagacagggagcccaggcatcgttattagttccattttataggtgagcaaatcgaggttcagggagatggtgaccagcctgatgacacacagtcaggcagtctgtctcgagggaggggtagggtgaccactctggggatcccagctggagactgaccgagcccggcccttccctccagccccaattcctgcacaagccctgctattcctcctgatggcaagaggacccggtggactcttggccatgatgactctgttcctgtaccagtctgctccgttcctgaggaccctaacttttctcagcggaagcaggaagacctgaccatcttgtcctattgctgaggaggagcagctcctcctgtaagaccccaggtgggcaccgagtgggggaaagcccgcgtccggatgactggtcttatgagaggggagaggtttttcagtcatcaccgtgcctcctcccggccttttcctcctagcccacagctcagttacatctgagagagacaagaccgagaaggagctgagggggcccccggcttaccttctgctgtagtacccagaacaacggcagcttcttcccccggccgggtcacgatgccctatttatagctgaggggtggggatggagctgttcccaggctgcctgtgcacaggctggagaggagggttacatcacttggccagaccacaggctggccagaaggacagatgccagaagcgacactcacgctgggacctcttccaggaagtcttagtgatcgatgcagagtttcactgctgaacagagtgagccggtgcagggtcgagttacacatttaccgaagtttgcaggagtcggggccaaggttcccagaaacgggagcatctccctaggtgtgtgacagcctgaggccaaccacccaggccttctgacccagccccgggagatgtacccccaagaggccacagggacatgcaggccggaggtgcagagggcagagggcaggggagagtcttgcttaggcaacacgggggccacttctgaccctgctgcccgctcatgggatgtgtgaccttcagctgctccaaagagcctaccctgtgcaaaggcctctaatagacactggggaaaacacacaagcaagtgaaaagtgccttctggaagtttccagtgtagctggggagactgttaaacaccaacaatagcacagccagattgaaagacacaaacaaaatgccttcaggatgcaggcattgaaagatgtgctgttctgtgtttatgctgtacaaattgcaaatggtaagtttcacatgaccagtaaaagggttataattcttattttcctataggtaagacttgcttttgtagtcattataacagggcatgacagagaccttggtgagagtcgccagaagccagtgatcacaagtgacgcagtgggtgaggcaggttgggagtggtgatgtgtccagccttaaatacatggtattagggcactgaagggacaggaaggaagatcctgcttcaacacaagcaggttcaaggagccacggcatatccacgatggcagacatgaaattacccaggaatggaacatttaacaacaaagagcaggaagagatggtgcctggatatgaggcagaagctgtacattcactgactgaacaatcaacaaacacacaaatacctcttttttacccattactctaaatcttcatttaaaaaaatcatatctcacatgggcctgtaaattctgaaatacatttttttaattactttgttcctatagatagggactcctcaaaaatcacttgtctggggccccacagcgacttagaggtggctttgtctgaacagaacattcgggccaggtacagtgcctcgcatctgtaattcaaacactttttgaggccaggagatggaggttacagtgagctatgattgcaccactgcactcgagcctgggctacagagtaagactctgtctctaaataaatagacaattttaatttaatttttttaaaataagagaccattcaaagtgctcctgcctgcgaatgggttagttggaacagtagagactggggtcctaggcctggctgtgccactaactagttgtttgaggatcagcaagtggtttaactgcagtaacaagtccacctggacacaagggggaggtaaggatctagcactgattaagcaacaaccttgtgcccagtgtttaaatatttcggctctttaaagcctcacaatttgtttcattcactcactattcctggtgctcagcatatgtcagggaacaaaacaaagatcctggtctttgggagagtttccactgtgcctgggcctcctgcctcgggcccttggaatgatcactccattcaacagcaaagataataaacaactgatcaggtaacatgctggaaagtggtgtaaaagaaaataaaatttcaggaccctctaaatttggcctctaagcaagccaaacttctcttaataatgacacgttactggggagaacataagaaaataattttggttagattggacccaataaagaatatctgcttaaacttgttgcaagattggttaaaagcccttaatccatgcccaaggctgactatcagctgggggatcttctacgtaaggctttaaagctcattaaaatcaatcagaaaattgctagagaattttattgagaatgtaaattattcccataaggagcagccattcaaactgactgcagacatttgacccagctcagattcaggccagttttcttcccagtaggcaccttctgtgttcattccatcagtggaagtttcttatgtgtacattccatcagtggaagttagggacagagcttatctgtggctaaatgaagactgttgaatgaaaagcagaggttctacatagaaaccaaataagccatctgatatggtttggctgtgtccccacccaaatctccaattgtagctcccataattcccatgtgtcatgggagggacccagtgggaggtaattgaatcatgagggtggatctttctgatgctgttcttgtgatagt

SEQ ID NO: 52 - DNA, 4001 bp, Homo sapiens
acaaaaatacagaacacccagttaatttccaatatcagatcatgaataatttgttaatatgtcccacatattgcctgagacttactcatactaaaaaactgttcgttgttgatctgaaattcaaattcacctggatctcctgtacacgacctgacaaccctgacccctcagggccttccagcactttgttgtctctgactggtagcggctaacacccttggagactggggtctcgtttgccaagtcaaggggaggaccagccttttcatcctgggtaccgaaagccagcatagctcatacctgtggatgctcttagcctgtcaggcccaaaaagttgctcaaaaaaagccccaaagagactaagccctcccaaaggacagaaacagccaacgttaaagtcagccctaagctggtaccccagaaaggacctggccctggagtctgatccctatgggttcaaatcctgatattgccacttactccccgtgggaccttggcaatttacccagtctaagctgaagtttgctcatctgtaaaaagatgaccatatcagctttctcataaggctgccttgattaaataacctggcacaccacagaagcccataaattagagctctgtccctcccactgccctcacctgatcctctgtcagcaattattttaagcaaatccctcatcagagaaaaggcagttggtgttaaccccacattgcctggaatagagtgcatattgataccaacaagcctcggctgctgtcacgtaaatttcttcccagctgaacgttccatccaagcccattcccttgctccagccatgtctccccaccacctttgactggaagcttcaggaaggtttgctgaagcaagtatgattaagaagggaaacatgcctatagcaagtcatagcacagatgttgtgtaataataaagtgtattaagccattgttttgtaaccatctatttctcaggttcctttagtcccagacaccaacagggagctaaatgctctgtcattcatgagtaagaggacattcctggatattgcctcaaaggaggctgcactaagacccaaaatggccggtttggtccaaggtccacaccttcctgaccaaaactacagcccctagcccctctaatgcaaatggagcccagacacgtgggcggcggggctgggcggggagaaaaagaacagccgctggcacccagacccggactgagctcacggctcgggaaatgaagacaccacaggaagccctgcagtgttttccccagtgcacaaagttggggttttctgcttttaagtaatttctgttggagttcgcgcttcttgattatgaaataagggcgctggatgtgtaaactttataaaaccaactgcttgggaacatctgatttccttaacccgacttagcaaacaaggaggctcctgaaacggtgctgggacccggggggcaagcccagtccctgaccccgcgcgggggaggtgagccgcctacaagcccctcccgcgcaccttcctcctcctccaggggaattctgggcgtgcaggcaacagcaatgctgggaccggcgctgcccgctgggagggtctgagtccgggagggggcggcccttgccctccgctgccacctcccacggcccctcagtgtcgccctgctggcctgtgcctggatcactctccctgctgtggcctgcctgcccatctccttcttgcgtggggtctgtaccttcccttcctccctaccatccctctttccccaaaactccggtccttcctcccaccttccgggaaaatgcaaatgtcccacttcctcccgcaaaggggaccctccccccagcccgtcgccaccttcaggttcacagcaggcagctccatcccgactcaggccgagggcacctgcgccgcagccgcggggggctcctaggctccgaactcggggaacaaacttgcccggccccgccccgccccgcccgttgcggccactccaaccccagcgcagctcaagaccacgtgaaacgggctggagcgggtcacgtgaccgccgcttggttgctaggagacggcgtcggcagctcgcgccttcagccaagctccagactcccgccaccgcccaggcagtacttgggggccgctggcgaaagttggagtttctgtcgcccagggcgtatcctgcctggctaatattccaggaagcggactgttcggactgcctgcagccaggacaactgggggaccgtccaggcgcaaagtgctgatgtggcaacagcttgtgtctcatccttgggggcaccctctctccttcccacttccctgtgtaaatgggctatttaggctacctacctcatatgatccttatgaggattaaatgagctaactgctgttgttaaagaaaacgttattgggactgttgttaaaccagtactgttcaagacttgctgtagggttattgccatggagtgagagtttgggctcaacaccgaatacaacaaggaccaaggagggatttatagccagagcagaatgagggagcaggaatggaagattcctaggaggagacatcaaggatgggggagttcttgctaacttagcaggactcttgctgaaactggtttattatgcaggctcaggcccagcaaggacaggaagacacagaggtccaaggccgaggcctagtcaagatgaggactcagaggagtctaactacggtttgttctaggagagaacagtgcccggcacttagtaaatgggcaggacacacaagctattgttattaccaacacaagatgaggctgggcgcagtggctcacccctgttatcccagcactttgggaggccaaggagggtggatcacctgaactcagtagttcgagaccagcctggccaacatggtgaaaccccgtctctactaaaaataccaaaattagcagggcatggtggtgtgcacctgcagtcccagctactcaggaggctgaggcacgagaattgcttgaaccggggaggctgcagtgagccgagatcacgccactacactccagcctggacgacagggtgagaccttgtctgggaaaaacaaacaaacaaaaagcaacacctgaggagccaaattggtgggagcccactttaatcagcataccaaaagttttagaaaactctagctgaaaaaccataagaaattcctcccccaattgtacatgaggaaagaaagggctgtctcctgcctcacctggcacctcccttaaagattgttgaccaccacatccccccaccgcaacaagaacattaatccgctctacctccaggtcccttcctaacatcaactttcctttagagaacaccagcttttgtttagtgtcacctaggtatggaaaccttcagggtacacctgagcacttggtcttattcctagggtgggggaaaccaggtgggaacctacaaaactgcctgggtgagtccttagataataccaagacccatagtctctccagatgcaaagaaagggtttctctggatggatgaggagagttttgcagggctgcagggcccataggcctaacttaatgccctcttaggaggcacagatccccccagtctaggggtaaattagagaccagccaaatggctacatccagtttgatttaggactggttgctattattattattagttcattattggtaattaattattgttattagtaaagtacttagaagagagtaatttctcagtaagcagtcaatattagaatattatgttattattatcttttttttttttgagatggagtctggctctgtcacccaggctggagtgcagtggcgcgatctcagctcactgcaacctccgtctcccgggtttaagtgattctcctgcctcagcctcctgagtggctgagactacaggtgggtgccaacatgcccggctgatttttgtatttttagtagcgatagggttttgccacgttggccaggctggtctcaaactcctgacctcaggtgatct

SEQ ID NO: 53 - DNA, 4001 bp, Homo sapiens
aaataaaaatacagtgaaaacattggatttagaaggaggacctgaaatttgagtatttaaaaaaggaaagatggcactccaggatgaaggacatgagcaaagaaacatcagagtggaaacatctcttccacagaatgagtccaggattgatgacgattctggaatagcaaaagcataaaatttgttaacatatgaggatagacagtagcatatacttattgtagagacctttgagctaaccgagggaagttacacttcattctgggaagaaagaaaagtccctgaaaatattaaaggtaggcgtgaaagacacaacgttttgcttcctcttaaaatatatctgtaccagccgggcgcggtggctcacgcctgtaatcccagcactctgggaggccaaggcgggcggatcacgaggtcagaagttcaagaccagcctggccaatatggtgaaaccccgtctctactaaaaatacaaaaattagccgggtgtggtggcgtgcgcctgtaatcccagctactcaggaggctgaggcaggagaatcgcttgaacctgggagacggaggttgcagtgagccaagattgtgccactgcactccagcctgggcaacagagcaagaccccgtctcaaaaaaaaaaaaagatgtatctgtacctatgaaaaaggagaagcataaaaagaaaacaaaagtctcaaaactgatgtataacgatcttttttattttattttagcaacaggttctcgctctgtcacacaggctgagtgcagcggcgcgatcctagctcactgcaaccctcgaactctcagtttgaggctgaagctcaaacgttccccccgcctcagcctcccaagtaggcgcgcgactagaggcgccaccaattcccggttgacatgatgttttaaaaattttttcaagataattattgttgtttgcaaactcgtgacagcttggtagtatgttactgaaggatcaggatccaaaaatcacagtacagagacaacgtagacttcccatagcgcttggcacacttaaaacatcccttcaagtattaaccttaactgggcttgtcatcccaggtcaaatcctccgaaataagtaaaccactctaatttcttctctcctaagagactctatcagtgaaagctcacaaaaaaacagtttaaaaaaaaaaaagggggggtctcgccatgttgctcaggctggtctcaaactcctgggttcaagcgatcctcccgcctcagcctctcaaagtgctgggattacagacaggagccactgcgcccagccaaagacagttcttaaaatctacaggttctttaggatattctgagaataaatatcgtttaggatttccccaaaggatttacgttttgttctatgaagaacccagttcttccaaaaatttctacaactgacgatttggaaataaaaataacgctcatctcataaaactttgcacacagatagtatgaacctcgtaagctttgagaacaaaatttccccatctctcaaaacaaaacacccaaaccaaaacagtcaaccagtggcaaaagaaaccgtcctgtttcccaggtaggaaaaaggaaggcaaagcaccccaagatgtgcttttattttaaatctccttgatctgaccaatcgggtgagctggaacctcacggctgagccccgagtccaacttcttccccgccaggactactcactgtggccaggcccaagcgcatgtggaacacacgccaacacaggacaggctcagcacgccggccgcttccctcggggaaaggcccgccaacgagtccatcgcgtgggagaacagtgggaaagggtcgcggccccggccgtccgtaaagggacccgactgccggcgcaggacgcgaaccaccagcgccgctccgccgccatgtgccgccgctcctccggtccgagattatgtaacgaagcccggcgcccgcgagcctgccgtacccgccaccgccaccgctcgccccctcgagccccatccgttggccccgcgcacgcccggcctaggcccggcgctcgcggggcagaagccccgccgccgccgccgccgccgccgccgccgccgcgggtccaggccgcgcgacccgccctccgccgcgcgggcccaaccccctccctcccttccccctacctgaacggggcgggtgagcgcgccgccgcgggccgagtccaccgggtcgccaggccaggcgcgagctcctcccgtgcgggtccgtcacagcatctcccgggagacgtggccgccacgggccgggctcacacccctccgcccggctgaagccgctcctctgcgctccggccgccgcctgcgacctccccggccacctcagagccacacgcccccgagagtgccttcgcgggctgtaggcctgcagaccgctcagcggctaaaacgcagtcgctgctcccgccgcgcttctgggtccttccccttgcaacgctgcctgctcgcctcggacagcgccggccccgctctgcgcattaccctgcgccgacaaaaccgagttccacacgccccggaagggagggagcagaggaaagggcggagagggaggggagaaccggcgggagatcgcggctgcagggaccagagttctcgcgatggttccgcgctctagcgccggctccgcgggaattttcaaactctcggtgaaagaaggaggtgggagggaaagggaggaaagagaagcagggcctggaagggcggatcatttacaaaaaaatcgggtctctccgcctccgaggagctggtggggagaaagactacgagtcccacagtgccttgcgcgtgaagccgccctggcggccccggcggcgcgccccgtgcgcagttgggagtggtagtcttcgctgggggtcgcgccgggctctgccagccgcctgctgcgattgcaggcggactctcttgtcacgtaatcgtgtggccctgccagctgggggccgagtgataatctttctcccataattggcagcttgcattctgtattttctgttctgtgctcccacttttctttttttctttttcttttttttggagacggagtcttgctctgttgcccaggctggagtgctgtggcacgatcttggctcactacaacctgtgctcccgcttttcatgccaaaggtgggctcccagacttctggggaaacgctttttccacggtgctgttttttctagcatcctcctgtgctttcatggccaaaaatgctcgcgcagcctagcctaatctttttagtcaaaattttaccccaaatcactgttatctttttggtcaccgcgggttttcattgtggaatttcttatttcttgttagtatcttcctttgaagcaaatcccagcgccaaacatgtttcaaacagatagggaacgtatccttaatactaagtagtaagtaaaaggattataacatgaggtagagtagggattttaagaagatgctcttttatcaggaaagtttctacttttctgttacctttcatatgtgctttttaaatttttttatttttgagacagtgtctcgctctgtcgcccaggctggagtgcagtggtgtaatcaaggctcacagcagcctcgaactcgtgggctcaaatgatcctcctacctcagccctccaagtagctgggactatgggcatggaccaccatgcgccactacgtcccattaatttttttattttatttatttatttatttatttatttatttgagacggagtctcgctctgtcaccaggctggagtgcagtggcacaatctcggctcactgcaacctccgcctcccaggttcaagaggttctcctgtctcagcctccagagtagctaggactacaggtgtgcgccaccatgcccagctgatttttgtatttttagtagagacagggtttcaccatgttggccaggatggtcttgaactcttgacctcgtgatccacctgcctcagcctcccaaagtgctgggattataggcgtgagccaccgcgc

SEQ ID NO: 54 - DNA, 4001 bp, Homo sapiens
taatgagtttttacaatctacgatatagactttgtcttatcaacagtggtactttcaagaatacagatttactaacataaaggcaagtaacagcaaagaagacagagtctgggaaattcaggtattagggctttcccattctttcctctaactcatctaaggtcccaccctcaatcattctgcttataaggactgtgactgtttctccaaagaatagtgcagattgcaaagggtcattgtcccaacaaagcagtcaactgaactctcagcactaaagttaatcagatgcctcagagtcaaggaatcttccacaatcttttaaaggaattaaattcttaattttgtgagaaaacagcgaaagcacacaatggcgactcgtcttttttgatcttgcatttgatttctggagtggcaggttaattcacttaaaaaaaaaaaaaagagccatctctcccacttaagacagcttaactagttgaagcctcaaggacttaactattcctgcagcccttgctttgttcagccctgcatcccattaaacactggatgcaggcagagacagctttgtaagactctgtctttataaagaagggagacatttatctgggttctcactggcttcaggaaggtcacctctttgtaaaggttctctggtctactgctaactgggtgccaggtgtatggaaaatcaagatgtggttggcagtaaatgatgagaaagcaataaggatcccaattccaccactcggagagctagtcagactaaaatctccaaaggttgccatttatgagagaattcgaagggtgtcctttgagtcaacctacagcacaatagatcaaacttgttctgcctcaaaagtacagtcaagagtgagcaatcttcccttaccacccactactccaacccacccaagctcctttctccagggatgcctaagtgatctattcacatgactctaggatccacctgtatccatgacagtgtctgctgtcaccaacctccaaatgtcaatttcttacatatttcgaagtaattggaatgctgtagaaagtgaaaatcatagattttcagtttcatgttaccctcatcgctttcacctgtatatcagagctagcttcacgcattcttttctcttgcctcccagctatcacgcagttgttggataaagcggccactgctcccaaagatttgatggaagttctgccagatttacccactcacctgaagggagattttctgtacaccccatgcccccggactggtcacaagggtcagctgagttggttcaccccctcccactctcgtcttcgaggcccttcatccaggaaaagtcagtcgcaaatttaaggcctggccctgtcgggtttcaaaacgatcccggaggacttgggccgagggacaaaggaaagcgaggtcagaggcggcctttcagcccgggagaggcctggggccgcacagccgccaccccctacatcacctccgccgtccccagtcacccccagaagtcccaaactagccagagcccgggcttgctcgcgtcccttccgcgaggccggagcccgagcccccgccgccacccagagcccccgcaccttcttgggcgccttggtgacggtggccatgaaggagtacttctcggcgtcctcgatctccttggcctgcttcagctcctccccgaccccgggcagcggcatcgcgtcaggcatcgacattccccggccggcccggccagcggctgacccgccgcccccgcctctttccccctctggcgcccgcccgcctgcccgcgcggcgccctccgacacgcgatcgcccaccctcctgccggcccctgcgtcgagctgcgtcggcttctgaggtgctgtggcccacgccttgtctgttcggcagcccaaggcagccggacagcgacggcggccacaagagaaccagaacagcagctccgagctccgacctgcccgcgccgccacctccgctgtacgcaaacacgcacgcaaagcgagggtagagggcggtgacgccacgtcaagtactggcagctcccgggagggggaagaggcggggagaaagggcactctgtcgtgacgtcaccacgctgggctgggccacagaagccgttcctctcccgctcgagagcgaagttcccagggtgagcaggaccctttgtgccaccaggtggcaccatcagccctgggagcagcgcgaggttcatgcaacgatgctgcggaacggagggtctttgggctgcggggttcctggcaaggcctcagaggcgcatgaaaggggtgtttgggagcaaagaccagagccccacacgacacatcctacagcgattcctaggaaatgtccggggctcgagacagcccactcactcactggcccagccccaggccctttggattaaagctccttcccaaggggccgtgcctgtctttttgacttcatagggggcagaactgactcagagtagtctggtttctgcacaacgctttgtgacttcctccaccaccatctccgactgggccttgcctgtttacaaaaccctcattgggatagggctgatgggtatgagggtggagaccaggagagctgatggagaagtccccagccagaatggccttccggtccttgctccaccaaagcattagacccttccagctctcagtgggcatccaggacattcatggactgctcacacccttttactgggcctactatgtgcagtgcctgtgctgaggccctgctggcaaaaggacatgtgacgcattttatgttttgcaaggcttagttcagctggagaggcaaaacctgcttgtatcctaatgtcagctgaggtagcttgtcctttgagattcaaatgacattggctccaattaccatgtcctgtggaaagtccattactgggaggacttggattttcatggtcacctctggctctagtttttttgccttgtctggcattttattcactattctggtcttgtgactgtttctgtagctcctggggtcaattcagccgcttctcctttcaacccccaccccatgctaaacaactacaaaataaggctgtaacatgtagtaaaacttttaataaaggtttgtgggtcacaggggagagattacatcacacagcaaacaatttaagaacacatttctgaaatgttctgaaaagttattttggctgtcttaccacccggggatttctcaatggccacaagatcccaccacgctccctagcccattgccatctaatctagcttcctcctgttcctcccttcccatctctgcacctcatccttccttccttgatagactctgggaagccagattctcctctgctgtgctgagcaattccagtcttcccagtgccctttccctaaattcctccccaggaccaccttttttttttttttgagatgacgtctcgctctgttgcccaagctggagtgctctcagctcactgcaacctccgcctgccgggttcaagtgattctcctgcctcagcctcctgagtgagtagctgggactataggcgtgcgccaccgtgcccggctaatttttgtatttttagtagagacggggtttcaccatcttggccaggctggtctcggatcctgacctcgtgatccacctgcctcggcctcccaaagtgctgggattacaggcgtgagccaccgcgcctggccaggaccaccttttaacatccagaaacctcccaggtttttaacagggcataccctttcaagaaggaagttttggtttgaaatggcattttccccactgatttgtgttcagggctggggagagtgtgaaatattcacctctagggccctaaaagtcttagtcagggaatcctgtgttccagccacctagcctcatgagactgtctgtttgaaaagggctgtagaagtgcctggaagaatgcaccctttgcacatctgcagaccttggtcttgaactgtttgtattctttcatctgctcacttttttgagcactcac

SEQ ID NO: 55 - DNA, 4001 bp, Homo sapiens
taccaaacgaataatttggggtatatgcactacctagtgggaagtctgctgacaaagtgagctgaaagaattgtgcagaccttaccaagagaaggggatcagagacaatccaaaaaagttacatacctcaagagaagaaaaattgtatgctattcctttagttgatcctaattgattttttttttttttaccattagaagctgagtttactttcataaacacacatcctatattctcagatgttaaatagcccagctacactccttcccagggcccacccaattttgcctgctatctcctgaatgagaaagaattaacagccaccagaattccactacaacattttagccaagaaatggtgatcaggataatatctgtgatgcattatattctttagtcatcacatttgctaggcaccaactaagtatccagtgctactccaggaaagttctatgcaaggaaacacggtcccttaaaatctgtagacatgttttgacccacagtatagtaatgtaagtggctttggcatggaatttcactgctccatgaggaacatgccagatattatagtcttcacagccttatctggatattgtttaacttaggtttaacttagacatcttgtcaaattcgttatttcaaataccaatctaacagcttttaatttcctcaaaaaggtttcttcctaagtgtcaagaactagattcaaagataaacaacaattactaggaaaacaaatcattaagaaagtgtaatgtagaagtgagcagagcagtctttcttactgcagagaattatttgaagggctaggatccctcttttggtacactactgattctctgggacattcctaaatttatatattctgtcccattgtctgtcctagcatattgtgtgcagagatttttctgtttagaaattatggtcagcatatttcttagcaactgagcaaaaaaaaagtaacaataaaaaactagatattttaacaagatcatcattactaagcatagtgtgtcagaacacttttcaagattcctacatcttttctaatccctttttcacacatattttctggttaatttattttttcttctacagattctaccctcacccactcctttttcagaggaaaggaagagaatatggcagacagccaaaacaggtgtaacacctttacttccttacgttctctctctttttaaagagacagggtctcactatgtttgccaggctggctgcaaactgctgggctcaaacaatcttcccacctcctgagtagctaggactataggcccacaccaccatgcccagtttttcttgatatttaccagtctgattcccacttcagatgaacccaaagaaacagttatcaataaacacccactccttggtacaagaaatacacaagtctgaatacctttcacttcaagtaaaaaaaaaagtgtttcccaaagaaaggaattcccttcccaacacaatgctcccagacacacccaccagaaaacaacttatctcaagggaatcaatctcaggccagagttgaatccacagccacctccagtcacttcttccattcccttgtgcagaaaccagtcttctgagacttagcaggttttggctgctcccggctctccttccctgtctcaagtttcttaagttctcactctccccagatggggcctgagtttcttgggggagagggagggcaggctgactaatctcagcacatatcttcccccgccgactcccgcctctgtgtctcaacagtaacaggatataacacacacacagctagaatccaattccacagtcagaagcaatactcctttcaaagtaggactcaactagatcttctgtcaatgctcgcggcgagaagaggtgaggcaataccaggccccaaactgctgagtcacttaaaaggtaaggaacacacagcttgaaaaactctgccaaagagtagtttgacccttgtgagctactcccctctcttcctgtaagactaaacacttcactgacttcacttcactattatctcctaaagtgctccagtcaatgagtaatcgaggcctgcaactgccaactagaagtaaacataagaagttagaaaaaaggcagtaagtaggacagaaaagggcttcccaatcttttgaacaccacaatttgcaacagaatgtaacacacacccagactgtttcaatgcctatttagctatctactacctacctagttgcctgacctgtccatacttcttttctcagtcccaccaccaatattatataaacacatgccagtcatctctgtttctcccgatattgatttatcatcaattctaggtttaaaaaaaaaaatcagtacaggtgactgaagaaatcctggttcctggaacatacccactactttagtgacaacattaaagtctcctctcccaccccctaccctccatccccactcgctagcaccattgttgtactttacttttccaactttattataatcattttcagcacataaaaaaattcaaaagcatagtataataaacacctgtactctccacctagaataaatctttccgttttccataataggttttttctctctctatatatatacacatacacatgcatactttcacatggtcctgtaaaaataaaggttgcaaacatgaacattaccaataaattgttcagaatgtatcttctaagaataagaatattctcctacagaaccatgatgacatatcacacttaatattaacaattattctatatattcatatatccagactgtccagattatattcaaatttccccaattttctcaagaatatttatttatatcccaacagtctcctcaaccctgccaacccagcatggattcaaggttcattaaatgcagttggttgttaggttcctttagcctctgctaatctagaacagtctctccaatgtctcccacccccttgtgatactgacttttctttgaggaatccagactaattgtcttataaaatcactcatgttttgaatttttcagagggtttccttcctataaactggaagttcagttctgaggttttatttgaaaaaggttaaaattctggcaagaatatttcctgcattatgtagtatatttcaccttgcatcattatcaggaggcacatgtcgggttgttccactattagcaatgctaagattgagtcctggttaaagtgagaacatcagatctcttctttgaaaggtacattttctcttttgcaagtaaaagttaatttgtagggcaatacttttttcatcatgttaatatcctattccctaatgacttcaccatctgttaataatccttgcctgaaccaattatattgggaaggttatagaatcgcaacttctatttttctatcaatgcttccacattagctggcattcttttgtaaagaaaaatcttctccctttgtcattcagatttttatgtatttaacagattacacttaattatacattaattgcactgaatactcatattgtctcaaattgggccagtgggagcctccttcaagctggctcttctgtcctttgacatgattccattacagtccttccactctttttgacaaaagaagatataccaggctcaccttgttcttcctcttctccaaacctggaatcaaccatttctctcaggagcctttcttttagaagggagtagtatttagaagctaatacctggagtaagaggtgtgataattgctattagagatgcactactcctaggttcttttggtagagagagaaatcaatccttttacttatgagttcatattgatatttctacttcagatttagtattaccttttttaaaaaaagtttaattttcctattgtatgtcttgtctctaatgtttgtttattctataatgcatacaaaagtttcaaaatgacaagactaatgttattacgcaccaaaatttactgagtgacgtgtcaaggtttcattgaagttcttctc

SEQ ID NO: 56 - DNA, 4001 bp, Homo sapiens
tgaatttttcagagggtttccttcctataaactggaagttcagttctgaggttttatttgaaaaaggttaaaattctggcaagaatatttcctgcattatgtagtatatttcaccttgcatcattatcaggaggcacatgtcgggttgttccactattagcaatgctaagattgagtcctggttaaagtgagaacatcagatctcttctttgaaaggtacattttctcttttgcaagtaaaagttaatttgtagggcaatacttttttcatcatgttaatatcctattccctaatgacttcaccatctgttaataatccttgcctgaaccaattatattgggaaggttatagaatcgcaacttctatttttctatcaatgcttccacattagctggcattcttttgtaaagaaaaatcttctccctttgtcattcagatttttatgtatttaacagattacacttaattatacattaattgcactgaatactcatattgtctcaaattgggccagtgggagcctccttcaagctggctcttctgtcctttgacatgattccattacagtccttccactctttttgacaaaagaagatataccaggctcaccttgttcttcctcttctccaaacctggaatcaaccatttctctcaggagcctttcttttagaagggagtagtatttagaagctaatacctggagtaagaggtgtgataattgctattagagatgcactactcctaggttcttttggtagagagagaaatcaatccttttacttatgagttcatattgatatttctacttcagatttagtattaccttttttaaaaaaagtttaattttcctattgtatgtcttgtctctaatgtttgtttattctataatgcatacaaaagtttcaaaatgacaagactaatgttattacgcaccaaaatttactgagtgacgtgtcaaggtttcattgaagttcttctcgtcctcagaatatatttcataaagatatataatcaaagtactattttctgtgtgactgagtaatcaatttgatatattaggttaagattttatattttagttgggttcattcctttgtgtttgtaagaacttaaagctttccttttttctctttgattttgacatataaaacatttacatgtctcaaaactttaaaaggtacactcagagaagtttcactgctattcctagccctgatactctacgtgtccctccccattttcactggtttctggtttatcctttttatgtttctttttaggagtgtgggaagcgaatacatattattttccctcccttactcaaaaggtagcatgataatatagtctgcaccttgtttttttcacttgggaatcattttgtattggttcatagggtataagaaccaactagtataggctcagggaaataaaaagctgtcaaggccgggtgtggtggctcacgcctgtaatcccagcactttgggaggtcgagcagggtggatcacctaaggtcaggagtttgagaccagcctgaccaatatggtgaaacccatctctactaaaattacaaaaattagccgggcatggtggcgtgtgcctgtagtcccagctactcaggaggctgaggcaggagaatcgcttgaacctgggaggcagaggttgcagtgagctgagatcatgccactgcactcccgcctgggcaacagagcgagactccgtctcaaaaaaaaaaaaaattaattttgtatagcaaaatattggcaaattttgtcaatatatatcactgctagaatatcactgatctaaatattttacaaaccatttttgttgaactcttggcatacaaagaacaagcatcactggtaacaccacctgatagcactacatgaagatttttacttaaagttgattgtacaggaagtttgaaatcccacttactagtagggtggacaccaagatcctgaatgcctagatttatatgactttaagtgctttgcctcaacacctgtggcttacagtttacagagggtttgtattttcaaaacattctagaatcctttcaatgttgcatctatgcttcacaaatgagaaaacagaacaggggttggggctaagtgacttgcttaaggcaatttgctaccaacactgaggtttaaaaagcaaaaagcaaaaaaaaaaaagaacaaaaacaaaaaacacccataagcccagttctattttccttcttttggaataggctggggaaacagcagctttcccctttatttccaaggggtcagtttaccttggagtggtctactgttgcactataagctttctgagcttataacaccagataaagatttgtaagcactggtaaaggaaaataattctttaagttccaaaaacctttattaattttcagaaaagtaaaatgatgcaaagaaatgtaatgtttttacgttgccaacaaattgccattgaaaagtactgctccatagatctggaaagggtgaggagagcccagtaatagcagagcccaaacactgtggtaacaaaatgttccattctagaatacacttccattgtcttctggggatggagtaaggaggagaatgtatgggcaatctaatctagactactttactaggacaaaagaaattaattcagaattccctatttgtatgatttccacctgcgtttaagcaaaatttttagtttagtatggtcaaattggccactgattttttctttttcctcttttggtcactggggaaattcgctggttatttcatgagaagttaccatattctaaaacatgcaacagagaatatactttaaatgtgctttttgaagaggtttatcctgtgctgaatggtgctggaggaatatttctttcacacatgaacacttagcacaatcagataatttcttttaaactaaaaacattccattaggttcctttctcatctgtggtgtgccactcaaaaagcaccctttccaagtcttatgtctaaaagatctagcacagctgaattccaccaacagaaaaagagttatatttggccaggtgcagtggctcacatttataaaccaagcctgggaggtcgaggctgcagtgagctgtgactgtgccagtgtactccagggcaacagagcaagaccctgtctccaaaaaataaaaataaaaataaaataaatgttgtattaaatttgaagacctcaggttaaaaaaaaaaaaaattttaccattgatgtatttctactttctggtaccacctttctgactactacaactaacaaaagttcttgtaaggctattatttttattgaagtattctggatttaagtaacatgatatctgattactgaatcttggtttcatagttatggtagatatttatttaaagtaatcaattaaataatctcacttttatgtgcaatctaaaaaagccaaactcatggaagcaaaaagcagaaggttcttaccaggcgtcaggaaggtggaagaaatgaggaaatgttggttaaagggtacagtttggagttataagataaataagttctggagagttagtgaatagcacagtaactacagttaacaataacattgtatactagaaatctgctaagagtagatcctaagtattctcatcacatacaatacacacacatatacacaaagtaactatgaggtgatggatatattaactagcttgactgtggtaataatttcacaatgtatacataaaaatatcacactgtacaccttgaatactttttttttttttaaagagacagagtctcactgtcaccaagactaaagtaaagtggcaggatcatagctcactgcaaccccaaattctgggctcaagcaatcatccagcctcagcctcctgagtggctaggataacagtcatgtgccaccgtgcccagctaatcttttttttcttttttgtaaaagatggggacttcactatgttgccctagctagtcttgaactcttcgccttgagcaatct

SEQ ID NO: 57 - DNA, 4001 bp, Homo sapiens
cccctgaagagtgggagctctggggccagaagttcaccagtctctggggattactccaactattgacacagcaggagaaaaaaatgaattcaacttactatccagtttgattttccattactataaaaataaatatacatctgctcaaaggagggagatggcaagcagcatgcacatgccacctggggggtccccccacaacccagccttcctacccccccaccccaggttgggggacagactggtaatctttcacttacagccccagctcacacagccacacagaacaggaacaagccaacaatagaaacaccccaaatgcccctggcaggactctgcccaggcccgggcacatgcccccgcccagccggcggcgacagcagcagcggacaaaatgtggccaccctgacccggaggcaaagcttgtcctcacaccctgagctctgcccagggagctggggccaagtcccgcctgacaccaactggtccggcgggaaacgcctgcccagccagacaggcacaggccccccaagggtccctccttgtgctcagggaccaggctggtacagtccggccctgcctcccagggtgacgcctgggcccaaattcagctggccctgccagtcaggcactggtgcagaaccgagggcaccaggctcagcccctcccagcccagccccagggcccccaagctgggagggaggggagactccccacccctccacatctggccctggcccccagggtctgcggtagagaattcccgcccccgcttctctccctcctcccgctctgtgcccgctgcccgcctcagggacagccccagctcccgcctccggccagcaaggcccacatccttcctccctcagctggccccttcgcctggcaggaggctggggggtcaggctgctggggaacccccccaagctcccatcagtcctcatccccagcccccaaactctgggttgctgtcccttttcctgtagaacaggaaacaaggttatttcctagactcagagccagccccctgcccctctggctctgcccggggacccagacccagcaggggaaggcgccctcaagcagcgagcagagattcagcaattcaccccagctccctgcctagggggctgacagctgtcactcagcaccccaccccctggggaagagggggccgattcaatcagagccccagaggaaacgcattgataggcgattatttatttatttatgcaaaagtgagccgactttgttcgccaggtaaccgggcacgcggcccaacccctccagccctagccgcccccaaatccctcctccgccccacaccccctccgggtcattaggtccccgcccctcaactccccgagagccagtggatcctagggatttgggggttggaggggaggggctcctccctccgcagtctccccttttcccagcgccgatcctaaaatccagccttgttctccgctcccacggtccccccttcattccccccccccccacattctcagcaagctggagagcaaattgcagttttaaatccaaaggcggagggagggggaaggaggagggggcgcgcggcagcgctgggcgcgcacctcgcccccgagccgggggagccgcggggcggccaggaaacccgagaaccccccctccccgccccccctccccgtccacctccccctcccccttcccggcgctgcctgccaggcttcgagccgagcccagccgagccgcgggccccggtggaaacaaagaccgatcgcaccgcgggcaccgcagccaccgggtccagcggaccggaccgggggacgcaggccccccccgtgcgctgcacaaaagagcctggccggccggtccccagcgggggtctggggctggggaggaggcgccactcaccggagtgctgggctgccggctccgtgggtccgagccaggcgaggggttttgggggacgtctgtcttccggcggtggcagcgacgcgggcgcccggctgctgaggagaggagtcgtggaggagccctgagccgcccgccgtcgctgacagcatggctcgcgcctcggctcacattctccgccgctaactccgctggacacggccccccgctcccgcggcgcccccccacctcgatcactccttcgctctctctgcgcccccctcgccctcccgccgcgcacacactctcccagccctggacacccccgcccccaccccccccaatagcaaacctgggagggaacgcgccccgcgtagtcctcctgctcctcctcctccgccctcctccctcccgctctctctggctgtctgtctgtctctcagactgtctctatttctcgctctctctgcctttctctgctctccaagctgggtgggaaaaggaaatgaggacagaaagcagacgctggctttgggtggtggtagctggattccctctctccctccctccccctcctcccctccctcctcctgccttctgctctctccgctgcgagcggggctgagcgcagcctggcgggtggctcgctctgcccgcccgcccgcctgtctgtctgtctggtccgcctcgctcgctccctccctccgtctctcgccctcgccctgcctgcctgcctctctccgtctccgccgccgccgccgctgcctctgcgagctcgccttaccttcgccgctcaccatccggaaccccaggggggagcgcgcgcgcggcacgccgggacttgtagtccccgccccggccgctccgcgcgcggggagggcggggccgcgccggctgctccgacggcgcggccaggagccccggggaccccgcgcctggggctcgtctggctggagcgcgtcctcgtttaccaacgggcgaagatcctccccaagggttaagaatggtccctgtgttccttgtctccaccggggggctctggatcgagcggaggttgcgggtgggagtgaaggggcggggtctgagagtggaatgggagtggaatagggaaccaggggattagccaaaggggctgcgactttctggggcgtcccaattaaatgggagggggagagggcagaggagaggaccggctctctcaatctggggacgttatccttttctgaaaaggtttcttattgagtaaagctcaagtatatatggcgggagggctgctggggcgggggagcgggggagacccagccagcgctgcttcctcactcagtgacccctcctctcaaactccgacctcggtttcgcccttgcaactcccagctttcctatatgtccaagggcggcgagggctcaaaagtcctggataatccgcagatagaacacacacacccttttccgaattctgctgagcatttgcgttgtgtcaggaagcaggattcagattgaacggtgctgacctcctgccgcggccgggggctgggctcagcactttcacctacctcctcttcaggtcacatgtgttctccagcccctgcctagcctatcccacagatgggaatgtgcgctgcttgggggccttgttaccgcccccggagatggctgaactgctgcggtaaaatagtgctgttatttccattttagagatgggggcactgaggtccaggttctccagttagcaagtggctgaacccagctggatttgaaccagggtctgactaactccaaaccccacaagcttaacccctgggctatgacaaggagttgtgactccctccatttctgtaactgaccttctctccctgtgtctgtgtgtcctttcttggcacttcaacaaatgttaactgaggtatgcagggcttgcaagggacacggagatgaataatgcatagtggctgtcgtgtcctgtgtcctaggtgtctaccaacgccggccctgactggccctgcggcggtcccacctcactggaccacctcatctgtgtgtctgatgttccacaccctgtgtctgctggccttgtctatcttgctccaggtctgaagttcctagagcagtgcctttgtctctgg

SEQ ID NO: 58 - DNA, 4001 bp, Homo sapiens
agagatggctttctatttcaaactatgcaatattagttaatatacagaatgggtatacataggtgcttactaattggctacagtatggaagggtgtgttctccagtaataaagaaaatcttatcatttgtctaattcacttacagaattactctctcagtacatcttaagcactctgtagtagagacaggatttggattttcttttttaaatcccagatttcagtggtatcagcttgtgacctgagtaatctgtttaacctgagcttcagttttcctcatttcgtaaaatgagaataattatattctcactgggttattgcaagagcaaatgaaatcatgtgaaagtgcaaaacaaatgctagtagttgttacacatcgcaaaatggctcagagcacgggtttttgtcagagctttttgaagctacaggcgattcaaagtcagtacctacacatttaaattatcttaatagataaaaacaaataactattgcggggagacgataagagtttagatcttccaagtaccaagcgtatattcttgccagaaatcgttgtgtgtcgggggcggatggggggtgggggaggccgggggtattctactcatacgtggtttcatactcagtgaaatctcaaacaataacttgctttaaacagagaataattaatggcgagtttgcaaacaatagcattttggcagacagttcttaagttcagtaaaatgtgcaaaaacctaagcaaggttttatgtgtatataaatcttgtcttttattttttaagacaaccctgaagttttctgtggaaaccagaaagggcaagaaattggtcttaggttgctcaaggaaactggtactcacttgtaccctgcggctatacattatatacaggaaaaggaggagggatccaaggagggcgtggagctcctgtgcgtggtccattaattcacattttgctctcttcggttcacatcctgcgcggactccacccaaggcaaccgagcgagggggtgggtgggactcacagcctaccaaataacagtcccagaaaccgaaacgaaatcgaggtggaattctgaaaacacggctcaccagaaagaggggtggagaaggagcgcgagaggagacccttcttttggcagaagaggtatccctggccctcgttgcttcctgggctcccccccatcccctcaatcgcaaacagttccctcctttcctacgcatggaagaaggaagacacacacagagcaaggccactcatccttggaacgtgggcggagaacacacaagtattcctcagagaatttcaaaaggaaatcgaggaaaagcaacctgggagaggaggaggaaaggaaactgactgccaagtgggggacccgcgagacggtggaaaggaactaagcagatagcctgctggggcctgcgccccaggaaagaagggctacctgttgaatggaactgtccctgcggaggcggagagggaagaaggcgagtcaccccagagagcggagccgttgtccctagagcagcctcgctggggctggtggcgagggatctcagccccagtgcctgcggagccccaccctgagaagccttggctgcagatacggtgatgagagacaccgacagaaacaagggagaggcgcacgactggagccggtctggcctgctcccgcggttagtcactcacatctgatactcgtctatcgcctccaccagctggccccaagagtcgaagtcggcgcctctcctaaaactggcgccccagcgctgcagcagactccgggtcacctccgacatggccggtccccaccccgtcccctcccgcccctaccccagcaaggccgggttctagggcgccatcctcccccggcctggccccgacattaacagggccaggaggaaccgctacggccaccaccgccacccgccgaggagccgcccaagcccatttgccgccacagccaaactttgcggctccaaagcgaccgccccgccgagaccccgcccccgaggccccgccccgggttaggttgaggccgccccactgcgccgagggccgccatcgctattgcggcattctccctcggctccggaggtaggggcaactcttctcttcctgtctgggaaaaagaccatagctcaaaaggaaggccgagggagaagttagaaagggatgatgaacgaagcgttttgaggggactgcaacgccgcggcaatacccgcccctgagctgcgcgcactaccgcctcggtagctatcatggccgccgggtcacgtgactccggcttggcgccgtcctggttttccgtcaccctggttctgtagtctcggttctccgactccctctttttctcgcttgtggactccgatatattgcccttcttcccttagaagaactgctgaaccgactctgagaaatttggtaagtatgtcagaggatgggtgtttctcagtaatatcccccgctacttccccggagtctcaagcaataggatcacccccttttacattagtctccatagacccctggacagtggaccaaaagtctccttctagtgccttgaaacaaacgacagaaagaaaatccatattggtcaccacaaatcagtggcattaacagctagatccgctgaatccccttgccccgcatctccattggtcattggagagcttataatacaagctaaactggggttcgttcggccgttgtctggccacctctcccgggttgacagtatcggctttccacaaaaatgcctgtttggaaagaggggaactcaagtgttggcgcgtgcgcacggtcgccgcccgctgcctcgaacgggactgggcacgggaggaagaggctgggtggtaaacaggaagtgggcgctcagagctcgggggcggcgctcaggtaggttcctctggggactcggggcttccggggtgggggtcccttgttaggagcgggagtcctcttgtggaagtgtgttagcttacagcttcgatccgaatgttgtattggtggctctaaaggcacccttgtccctgcgggtgggtgtgtcgttcttctatcccaccctaggaactcccgaaaactgaagaccgccgggtcgcagaaggggagaagatggggcaggggcagaaaccctcttctttcctgaagtaaagattcgcaaaacttcagacattttcatccaggaagtaggaggccgcattaaaagaagtatttgtggaagatttcgcagcctcaagtgctgagtgtgatattatttgtaggcacatagatgctgtattaggctatcggaatttatatggaagatgtgtagaagatgatattttctgaaataactcgttaaatgttttgagtcctaaataaacctgctcagtttttcgttgggtacacactgtattctctattcattaagtatgtggtgctcctcaaaaccagctttgtcatgaataaatagcataaaggaagcacttaatgtaggcatttcatacactgtacagccaccattattttctaatactaggaaaagtcgattgtcagaattttttagtgccttcaaattaaatgaaccttatcagaattttttctcagttacttcctggaatctaattgccatgtttaggtcttcgcctgggctttctccttattatctgctgcactacctacccaaggacatttagacaagacatgctgcttttttttttttttttttttgagacggagtctccctctgtcgcccaggctggagtgcagtggtgccatctcggctcactgcaagctccgcctcctgggttctcctgcctcagcctcccaagtagctgggactacaggcgaccgccaccatgcccggctaattttttttttgtacttttagtagagtcaccgtgttagccaggatggtctcgatctcctgaccttgtgatctgcccgcctcggcctcccaaagtgctgggattacaggcgtgagccaccgcgcgtttttttttttttaagtagaaggcatggaac

SEQ ID NO: 59 - DNA, 4001 bp, Homo sapiens
actaggccaaaccagtccacaggcccacatgcaggcaaacacatgctgtgtcacacagacgcaggcacagacacacagacagataccgacacagacccacaatcacacaggcacaaagatacacctagaagcctataaaaacatacacaaccagggacacacacacaaatatacactcacccaagaaatacaaacacgcacaggcactcagagccacaacagacacacaaatcacatacagacagaaacacaggcacagtgacacacacgtgcacacattcacaatacacacacagtcaattcacagccccaagctctcttccccttgaaattcacctacccctgaacgtggacacacacgcttggatgcacacgtatcttacacattcccactggcagtcccagctatgtctcacttcttctcgactcccatatttgccaatcttggcccagagaaccttctcccaggaaggggacatagaaggatgatgtttctggaggtcacctgccccccactctaagtgagccctagcctcccacctgagtctgtcattatccacctgggcccaaaatacccaggtagtggcagatagaaaccacctccccccagctaaccctacttctctttcccgtccccctctccaaggtagcctcctccaccccccttccctctctctgcagcccttgtcccccagcccctgacttctggggcatccaagcaggtctcagagccagcctgggtcctacatctccctcttccttggcacggaagcagtcacattgacccctgcttggaggaccccagcattcctgattctgcctctgctactacaatgctgcccaatccaccgccataggagcctagaaaaccctggagcccacacagcaacctcactcaaccctccactctctgcacagggccaaagaggtttcttccaggcaggatggagcagtggttagagcacaggcactggagttatagaaacctaagttcagattctagccccttcactttctagttgactttgagcaagtgactttcagagcctcctagaattaggtgacaggggttgggatcagtccctactcatgggatggttgggaagattaaataaaattatgcttagaaaacaaattgcaaatgacagccaccccatcatccttaagcacccttcaaaaccccaccccaggctcatttcctcttcagggtcatccctgggaggttccatgttcatccctccttgatgagctttgggggacatatccttccacctctgcgccccccaggcagatttaggagagtcatttcaacacaaataaaactaggcttgggaaactcgacacccactcctttggcttccagctcagagccaggtggggtaattattgctgtcactgagacgtaattaataagcatccctgctattttggcacccccagtctctggagttcaaagtatattcctgtagccacctcctccttcctcattttcagctaccaaatcctctcaacaactcaaggcccagagaggttaagcaactcgcctcaggacacccagcacctaggctgggtgccaattcccaggctgagtctgtggcctcctgaacagaactggggagtggtgtatgctgtgaagaaggcaaccccccttcctgcccatcctctccctgacagactttcccctttctcagatggacagtgggggtgagaagcagtgggttccaggaggtagcctgtgggcaaagggagggagaggaaggcagggttggagcagggagggaaggcagagtcggctcagggtcctgaatgaatgggcctagagctggagaggcccagggaataggcaaagtctcaagacagggcagccaggccagtctcccctcccatctccacacacagaccgacctctactcacagtctgcgtggggacccaggtgtccagccagcctggagctcctgctgctgggccgtgctcccctgatgcgattgggctctcagctggggttcctgaggcggggccgtccggcaccctgtgatggggcgtggcccctggggaggctcccaccagccctcagattcctcagggccgcagaggtgtggagctggttgggccggttcttcaccctcctcccctggtgcttgcctgtgccccagcagggtgacagtgatgtagtagcgggtcctcctggaagagggacgcgtgtgtagggtctgggcaggctctggcaaggcagtccctggggtggcgggcttgccctttgtcccctctgccctggggaaggatgcagggtggagcagcaggggtgcgtcttccaggttgctgggtggctcaggcctcagagggacctctgaagctgtgggtggagactgctgacaggtgcagcctgaggatccctgctccccatgtccaggagcaggccctgggtattgggggagcctggtacgagcagactctcctgaggccacttccagggccaggctctcaggccccagggaggcatggctggccaggtcgaaggcgctgcccaccgctggcctctgtaggcgccccagggactgagcaggaccccccgagattccttgttgcttccaaatccagaaatcatcatggtcccctacatggatgtcccattctgagcagctctggccttgggcctgggtgaaaacagagatagacactgagagaggcaggggcatagtgacagctccccctgccctccaggcacccctggtacctggtatcttccctgtcacaaggaagctgaacagggctctgacaccaaggtaagctgccctagggagaggctgctaaggccaccagagctggacaaagggacagagctctgggaaggcccttcagcatttaactcaccccttcccattctacgtaagaggaaagtggggcccaaagaagacggcgacatgactgagatcacacagcaagccagcgagggctcccaacgctcaggtgccgcactccctcccaggtgacaaggcacccagggcctggccggccatgccccccaaaggctggagatctcagcttccttgcagtcctgaggtgcttccccgccctggggctgagggctgggtgggaaggcctgcctcaagtgcccatggcctctgcccattccaagctaacagagagactgcggccacctctcttgtaccctcccagcttgagacagaacacctgggaggatgtacctgggatataagggagccagagaagagggttcccctgaaatgggacaacacctgacctcttctgctgtcttcccctggggtccagcctggctgtggggataagaggagagggctcagcaccccagacccagatggacactgcccccaaaacgacccgttttaaaagatgggctgtttccttggcaacagaggaggtcaaaattccgcctagcagggatccttgctgccaaatgccttaatttactcatctatgaaacagatgcagcctctcattccccaggggctgaccacctcaagagacaagagtacagtgatgaacctggaggcttggatcgaggcaacctgggcttgaatctccgccctgctgcttcctataatagctgcagtaccgtttgtatttcagtttcctcatgtggaaaatgggtgtgataataacagtacctgcctcctgagagtgtggtacagatggtacaagatagtccatgcagagggcccaacacatgacaagtaggcaattaaacactggcaattactcatggtattcaagacccaagagagacacatggctgcttgagccacctccagaggaggctgccctcactcctccaagggaagaacactttttcactgttcaattcagggctcaggtccttactgcagatgaggaaactggggcaggaggttaagccactagcccagcctcacccctgaggggccatgccaggaagtggggaagagggaccaaagatggaaggcggtcaggccaaagaagagaatggagagaagcgaggccc

SEQ ID NO: 60 - DNA, 4001 bp, Homo sapiens
tgggaagatttgataaaatgaagacagcagtgttgtcaaattaatctataaactcctatccaaaatctcaaagggtttttcatagaatttatcagaatgatcctaaaacctaaatgaaaaaaataaagacaaaaacctgcaaaacaagttgaatatgtttatcaggatgtactatccctactactaggtatcaatacttactacaaatgtataattattaaatcagtatggcagtggcgtagaaaaaaatgaactaataaatagagtgtggaaacaggaccacatgtaaattaaagcttggtatataatcaaagtggcattaaaaatcacaaggaaagaatggccaactataaaaagtgttcagacaaatgacaatacacagggaatgatatattcagcctttctcttatatcatacacaaaatatatatctggttggattaattatctaaatagaatagtaatgatgttgaataaaacacagaatttctcaatacattgaagtagaaggaggttccttaaataaggcacaaaaaggacaagccagaaaaaaaaaatttgtcaaatgtgattgcatgcatattctcaatttctttgtaggaaacacacacatccgtgcacacacacacactaaacaaagtgattatacaaggcaaaaactgggcagatacctgcaatacacacacacacacacacacacacacacacacacacacacatatatatatggctatacctgctatatatatatatatagagagagagagagagagagagagctaatagaggttttgcttttggaatacatggagaaccatgtatcaataagaaaacaacagtctatttgaaaagtgtgcaaaagatgtgaatgagcaatttgctcaaatatccaataaacataaaaaagatgtttgacattattagcaattaatgacttccagagcagcaacatataaagtggaagaaataagccaaagaacaggaaaagatgtttatgagctgaaaataactgattgtgaattttagggaagcttgaatacccccatcagtagagtcaatgttaataaattctaaactatcactgttaatggccttataatgttttttcctatatgttggtaagcgctggagaaactctacttatacatgtagagttcatgagtgaaaattaaaactattatcaggaccattttcaaaataaggaatacattaaaaatatttgcaatgataaagccatccaaatgcccccatcctactgatgaaagcaaggaaggacactacctttgttgaatatctactgtgacaatcagcttggatgattcctacttttctacttgtccataagaagctaatcttcctataaccctcttatataataacaatcacattttaatcacattttatgtgattgactcagttttttctctgaagttatgttgccttataaatgaaaaacttgcattttacttcataatatctgttaacttaaaaaatgcttgtatttgctattggcataaaagtcagccttacaaataggctgatagacaaaccccaaaggaagccgaagcttaaggaacaccagctcagagacaccagaggacatggctaaagtgaataaaagagaaatgaacccatcctttcagagctgatgtccatgtttgcaggttcaggttctcagaggtgtgcacagcatggctggcctttcctcagttgtctttttcagcagagaaacggttaagtctctcgtctctaacccagctcctctatggtgcttacctcctgatccctggggcgatcagcaaaccgggtctgccaccttcttttcagagagcttaactagcagaggactcaggagagcatgcccaaataacctaggtgactttcaaagctacaaagactctgacacttctggacggcttcacatgtacccctaataaacacttcccttcacccccaggcccagtgtgggtaggagtgacaactggagctctaattggctgagctggtttgggttctcactagcagccacagaagaaaatgtctatagaaacttgtatctgagtcatgccacataggaactacactgattggaaacagaaagtggcctagaaactgtaaaaaatgaccgcagatgacttcttgatacactttgtgactaaggggcctggtgatgacatttttctggtataaacaagcacactgatctcagagggtatctaaaagtgttgccagtagggcagtgcaggttcttgtcttcaaagcataagagaatctgaaaatgagacccaagcgaaagtatagacattttattgtggagcaaaaccaacgacaccctcaagggaggagtgcaggcactcaaagatttgagtcacaggcaatgtggttcacgtactatatgaataagcacaatgaaggtatggagtactctgtaatcaaggggaggggttttctgggaaatgggcgggcaattcccggaatcggggtgccacccttttcttgactaaagatggttaatccggaactgtcatggcgtcaggtgcatgatgggagtgggaatttccccatggaagttttatgatattaagggcataatgaagctaagggtcagcagtcagccaagttttcgaccatcttggctttaaccagttgcggccagtttcttctgtgttacattctcatctgtgcctaagtaggaagtttgcaatctgtcttcattgtcacaggctgttgtaacagttcctatctactagtggggcaatccctctgctaacctttttgaccgcatttttattgcttgtagccacctgcaagtaatcatgcctcattccctcactgactgcttgcctcaaaagcatatatacagtctttcttcctaacccaggctcctaaccctaaattcagagcttgagggcttgattctagtcagcaatttacttgaggttttcctttcttattcattgaattaacaattatgcactgaacatctaatatgatgtattagattctgagaatataaaagttagtaagacaaagttccagatgttgagcggctctgccaagtcatgaaaacagacatgtgatttaataatcacaataggacatgatgataagtgttataattaaagcatgctcaagatgctcaaggagcagaggaagagcacctaaccatgcccaggtaatcagcccagagctgcaggacctccttcactttctactgcaaggcttgtttctacacttttgccagctttcagctcaaatagcaccttatctgtggggcttctctgaccagcatgttctctacctcttccccacattatcttttcccacacgtgttactgaccatcatctgacatacggtatatgtcatttgtttgtttattctctgcctcatgctcctaaaatgtaaggcacatgagggaagagatttctgcccactggctcactgcatccacttcacctgacacagtgccaggcacagagaaggtgttcagaaaatattcgttgaatgagtgaatgcatgaatgagtggatcacacaaggcgaaagaacaccaaagagaacaatatgtaagaattaaaaagatgtgaagtgtatgaatttggtaacctactgagtaaacgagagaaagctccctgttgaggaagaacccaacaagcaccaaccccagagaggcgtactgatttgaggcttcaggtcctgtaaaaggtgagttaagtgattaagctgggaagtggtctcaatgaggagcaggtacactgctgcacctggggcagagagacaagtactcatcgtccagctttgttttaccaagaaatttaatcagagagatacccaacttggtgacacaagacacagaagggaaaggaggcaactgtgctgaaaaaggaggtttgttaacagtctcacggagaaaagtgggatccccaagccctttcctccctgacttctagagtactgacagcaaggtttatgccataagcagaagactggaggctcctactg

SEQ ID NO: 61 - DNA, 4001 bp, Homo sapiens
agctgaagaccagccactggccagtgtggggacccgtctggtcattcacaaagccttggaaggtcttgctgagacctgggacagtccggggcagagcaggggatggcaggcctccagggcacctggatcagggtcattcctgcaaagctgtcctcgctccattttgccaacatcccacaacggtccaagcctaaaccttatctagcccaagcacacttatcgattcacgcccgaccaatatcccacacccaacacaatcggctccatgattaacctttgaagcccacagcaagatcggccactgagagaagggatgctaataataacatctgacaatgttcactagatgtgttacacagtattcacctctgggagcagaatcggctcataaatcaagggtcgctagaaaacacttggcgtcccagtccccttccgatttctcaaaatcaggacacgcactagatcctccctcccttcgcctcactccccccgcagcttcatccctgagtgggggcggctcaagcagcgggctaacaactactggccttttcgtccccaacgcgggagcgcagtgcatcccagtggacaaactcgagaaccgcacgctgctctccgcctccacctctgtcctccccgctcgcggttccaacccgggacccaaatgcacgagctcggtgaatgccccggcaggagggcgagggctcagaggcagcctgcccagcaaaaacgacagctgtgctctggtgggccctgggccaccccaggcagaagccagagaagcccgagaaccccggcgggctggcaaagtttgccgagaagggtctttctggacacccccaccacgggctctaggctcgaaccccctcttccatctggccctggagtcccagacacagacaagccccgggcgcgccggcgggcgtatgtgcgtgtgtgtttacagcggggtggccgccggagctccccaagaaccccagctctcccgccccagctgcccgccagctgtgagcgcccgtcgggcccggaggtcacccgcaaacagctgggtcggcagctgggagcctgggaggcccctgctcagccccggggccccgagaaaggagaagggggagcggagtggctgtttggctgtggtttcctccaactccgcctgcgaagctctcgctgggagcccggagctttagctttccccggcagccccggcccccgcgcccgccgcgcccagcggccggcgcctcgccccgggccccggggaggaggcgcgccggggcagccggccaggacactgcgctgctggctcctagagctgcgggcgcgcctggccggccccacttcccgggttgctggggcgggcgccgctgccccgaccccggacgcgcggaaccctggagacccggccgctccccgccagggccgcggtgctgctccaggctccgggcgggcgcccctttccggctaccggtgcaccccgttgcccgcttgcgggaagcgaagaggggtcccttgatttgcaacatagaggaaagcgccgcttccgcccagcctggcacccacgcgcccacacgcacccggcgccggccgggtcgctcacctgagtcctaaaagctgttgaatccacatggtcacgtttcggggagcggggcctcagacctggctcgcccaggccatctgcgcggcgcccgcgcccgctcgcttccgtcccgcggcgccggtctccggctctcggtccgccgcctcccgccgcccgccggccgcggggcgcacagcgagtcagagcgcggccgcgcggggctccatgccggccggcgcgccgccgccgttggggcgcatggctcaggctgggcggcccgcgggggcgcacatcctccggccggggcgcggggctcgcggccccctccgccggcggcacagcgaaggcggcagcgaggcggggcgtgttccggcgctgtcgcggcgcagcaaagggctggggagccgcggcttcgccctccggggcggcgaggagggaggccggcggcgctgccgctcacggtgcgtgtctcccggcgcgcggctcttgcctccagccggagctccgcgccgatggggcggcgctgcttagggtttggggtgacgcgacgcggacggacgcgagtcccctccgcgctgccgggtcggggggctctgccagaggctccgccgccgatcggcgccactcaagttgcccgggggctccgtctgagcgctcgctctgcagacggccgcggcccggagactggcaggaggcgggcacgagaggcgcgcggggcgagggcgccgtggagcgcggggcgtggggacgcgcggcggcggcgccgcgcggaggaggcgcgcggggatcccggggccccgccgcccgcgcccaccgcgcccgccgcagagccgcccgcgctgctcagccgcctccctcctcgcgtctgcctctccgcgcgctcgcccccgcctcccggagccggtcccaactccgcccgcccggcccggctcacgtcacccgccttccccgcccctcgaacgggagctcgagcccctggcctggccccggctcctgctcgccgccccaccttgcgggggccggggtcgccgcgggtggtggggggcgctgtgcccagcaggggcgacagcgcaggcggggcctcctgcagcccccttccccatccccggtcgcgtcccggtccccaccttgcgaaaggctcgagagaggccgcaggctaggattggaccgccgggcgccgccggatggtgttgccagggtaaccggatggcacgcgaagccgttcgaggttccgacccggttacgggggcgcccagtggacccggagagctactttggggagggggcggccccgaagaaggactgggtgggggcgcatggagcgggggctgcgcgaaaagtttcctggggcggagctgagccacgcgggccgcgcaggagcgtctgtccgagggtcgcctacgagggactcctctgctcggctgcgcgggcttctgcgttgatgaagtcaccgcgttccgggtcggagcttcggcgcttctgccccgaacccagcgaagcccggtcctatgcccccaattacccaacggtccctcatcgcccagcgcagctgctgcctggccaggcccttgctccggaggagtcactggaaagttccagggaatctgggcctcccggactctccaccggcgtttcactgctcccttcccatgccaggactcctctgtgcctacctggttagtctgtatttgcaaaaaacaaacaaaaacaacaacaaaaaacaaatggggggcacttaaaggaggacagacgctgggcggggacctttcactgagagaagtgacatggggcggaatcctctgcagacccgctgacgccttgagaaaccacggcaaaaccctgcttttaatcctccacaggctgagggcagtgcagaatccgggccttggaaaggacactggtgccacccttcactggggaaaggtgcaaggggcgggggatataccatgccgagccttcgctctgtgctctgtgcaggtgcttgacccaggccagctctggaatcgccccaggccatgtgagagccgtggggggtgagaggggcgggaagcacttcacaggtgaggcctccctgggaggggcagccagtgagggggtggaagggcagagccaggaggaccatggcttggggctcagtctcccaggcgaaccatagcttggggcttaagtcccccaagcagccctttcacccccaggcctccaggatctttgccaacggtcttgaggagccaggcacaggattggactctgcccgggcaggaggatgaagacagtgacttccccaccaagactcccggcagagggccagaggcagggaagtgtggtggcaggagggccagccttgccgtggctggaccaggggccagcgcttgctaactcggggtcctggccgagttgtgtggcctctccgaccctcggtctcctcatctgt

SEQ ID NO: 62 - DNA, 4001 bp, Homo sapiens
catggtagcatgtgcctgtactcccagctacctgggagggtgaggtgggaggattgcttgagctcacaccactgcgctccaacctgggcaacagagtgagaccctgtctcaaaaaaaagaaaaagaaaaagaaaaacaatgaagcatttgagctactgtttatacttgatcactcacagcaaaagtctgcagagtctaagattaaacttccctaagctgcagattacccaataaatgagtgtggcagcaacaggaaagagatgtcaacaacgctgaggataaaggataaagggatcaggtacaggtaagctccaaagaagaatcatctcagtctgtggagagaaaagaaagctgtattttctgacttagtgcccaggtcacaggaatgaatggagtgttccagaacttctttctttatcacccacattaatctgtgacattcatccacttccactaaccccatcaagggccaagtaatgtgctaggtgccacaaggggtaccaagaatgagtaagatggtctgtttgccaagatttttaaaacttggcaagtgctaggaagagaaaagcgggcacagggcagtcctcagattccctttcatttgggagctcagacttccctctttgaagcctaacaacaggcaagagccagaggcttagggccccaggtgcaatgccagaccccaagcaagaaggggacatcaataatccaacctgcgggcttccaaatccgaaatgagatcatcgatcccaaccctaatctatggccccattatgtcccagatctagaaggggcccagatcccaagtgaggcccctgttgcctgctagggcagatggtaacttcagactctaactccatggttcctgaggtctcaggctcatgaaactcatttcactaatttgggaaagccacctgacctttctgggcctgttttttaacctgttgattgataaagttaaaatttcaagttccctataaacaacaacaaaataaaaaaaggaaaaaataaataaaaaccaaagggaaggaagatacaaacaaacaaaaataataaaaacaaaataaaaaaaaattcaagttccttttcatctaaaatcatttgcgtcatcccaagctgcttagccttcagtagcctcaggtcctaactccaagccaggtcccatgagcactcccaacccttattgtggacactactcaaaggttgcgactcatgggtctccaggctataaaccagttctacacattcacccccaactttcaaacagggagagccttaggtttcctcccatctcaattcaactggctcacacagcacatgtcacctctcactctgccccacgtgttggagatgcttctcctcccctccccctaagtcataaatcattatcaaaatctcccgacctccagtgcctggaatgtaaccctgattctggacaattcacctccaactcgcaggtaacctgggccataaagctaattgcctccattcagcctgtaatctagatgcctcggcccagggctcactctacccctcaaacctttccagtctctagacccttagtggaattaatcagccctcacattccctaacccaacacttcaacactgaatccctcgggcactccaatcctaactcagactgccccgacctccaatttggaccctctccgaaatgccccaccagaaccgagaccccggccagcgttccccgcaggccttagtccccggcccgctccgggcaggtccagggcttctagatctccggccgccttgaccttggagttcagcaggctccgccgccaagcccagtcctgccgctcacctgggtccctttaccggccccgggaggccccagcagcacggcccggatgcctttaggatactcgggttctgccgctggcacgctgggagccatgtccgccgaagtctctcactgccaccagttcgcacgcctcacaggtccagtgcttcccaggtcaacgcacgcacgccacgcacgtcccactcgccgctcacactggcccatagccgcgtccgtcagcccgttccgcccgcccctgagcacgacggactcttcaccttaccaactgcacggcgatactgaggaactttgcttttgattggacagaattggtgcgggataaggaaggggcgggccagcatgtactaagggtggcgggtgtgcggagtgggcgggaaaacgcgaaggaggacaggaggtcaggccggaaggtatacttcggcatttgacagttgacgacaccagcaacaacattgaaatcctattaaattgcgcgtgggagtttaaatgggtaaaatcactcttagaagacaaattagtaatatgtttcaaataccctttggtccagcaattccacttccacgaattcaatggataaaatcaaggatatgagtaaagattcgtgtaacaaagttgttaattgcaacacttagcccaaaagcccgagaaaaaccataaaataaaggcaatactccaaatgtccaacaataagagattggttaaataaattgcaaccaatttgtatcctggaatacccctgttgtataagataatttaatcatgcgggaaaatgttagcaaagcgagatacaaaattgcagttacaacaaaatccgaattttggccggacgcggtggctcacgcctgtaatccccacactttgggagaccatggcgagcggattacctgaggtcagaagttcgagaccagcctgaccaacatgatgaaaccccatctctactgaaaatacaaaattagctgggagtggtggcatatgcctgtaatcccagctacttgggaggctgaggcaggagaactgcttgaacccaggaggcggaggttacagtgagccaagattgagccattacactccagcctgggcaacaagagtgaaactccgtcccactccccccccaaaaaatcccgattttgtttattacaagtgtagaccgctgtgtagtgtgattagaggagcacctctcctttgtatattttaatagattttttaaagttctatggtaaattcttaataagtttaaaaacttaagtttaaaacaagttttacctttatattaagaaaaacgttaaccttttaaagtcaggaaaagatagtttttctcaaaagagatgaccctcttggatagggaaataatttctacagctttttggtgtgtgaaagtttcatccagctccaagggcctctttggacctttagttaagagtgtgtaatgaaacgattatgtttccccacaggctcctaacaactcattttctacatcttgatgatgaatttgctatcccttcagctgtggtctcttctttttttttttttttttgagacgtggtctcgctctgttgcccaggctggagtgcagtggcgcgatctcggctcactgcaagctccacctcctgggttcacgccattctcctgcctcagcctcctgcgtagctgggactataggtgcccaccaccacgcctggctaattttttttatacttttagtagacacgggatttcaccgtgttagtcaggatggtcttgatctcctgacctcgtgatccgcgcgcctgggcctcccaaagtgctgggattacaggcgtgagccactgtgcccagcccagctgtggtctcttccttaccacacagaagtcaacattcatttctcatcgccacgctggacttttacagtgtacctgcttaatcttgttggatactcccaatgacattgaaggaagaaaggattgttatgtctattattcagaatggaagctgaggcctgaagatacgtagtgaccaaagtcacacagtagcagactcacaattaagactgaggatgagccaggtccagtgactcacgcctgtaatcccagcactttgagagcctgaggggggggcagatcacctgaggtcaggagttcgagaccagcctggccaacatggcgaaaccccgtctctactaaaattacaaaaaaattagc

SEQ ID NO: 63 - DNA, 4001 bp, Homo sapiens
ccacaacagaaaactcaagtgcaatctggtacacataattcttccttttgagacatgggggtgggggaagagtttcctgtaaaagtccgctttttcaatctgcttaagagataaggaatacaattctggagatacttcttaattccttgcttttaagctttccttttgttttctggtactgtcctccaccttccttttcaagccagtctgtgcttctgaaatgcagatctccggataattagtccatgatgggcaataaccagcccggacatccttgagaagtacatcgacagtaaaggacccctgctgggaagaacaacttttcataaaggagttgctaattaccagcatctccatcccagaagggttaagagcctcgcagcagcacaaccgctacctctcgccttttaacgccaattctttcggaactggtgtgaacgtggagtgggaggagagggggaaagggacgcactcaaccccgtcagactaagaaatcaggcgatctatatatccccaagttcaccacgccagccaaaggaggcatctcatgccaagggaggcagctcaagaagccatttccaggaaagctgcattacaaaatgtaatttatcagaacgagtctcctccgagtctcctgacggccaggcccggcggcttcgggaggggggggagttgctggggagagtttaccttagaaggcgacaacgaacagacaggcctttcaaagccacccagggctctgccccgaggcccgaggctgcgtggaggggctggagaggcgcgaggctgcgagccccccggcgccacaggttccccggcgcgcggccccgcccgactgccacaggtgggcggcgctccgcctctgggctcccgcgggagggggcgcgcggctctctagggactcgggggagggggccagggctaaggggtacggggacggctctgccttaaggagggcagcgtgagacggaagctccgggttttccctgcctagttctcgttccctcggccgggtggctcgggctattcctcgcgacaggaggagcggtggagaggagccgtgggcacctcccaccggccgcccctggagcctcggcctcctccccaggcgcggttaagccgcgcggccgccagctgcatgcgccccggcacgtacgagcctgcacgaccacacgcgggcgggggaagggcgccgtgatccgggagccccagtccctccagggcctcaccccagcccaacgcggctcgcccccggccctcgtccccgcagcccctcaccggtgctggccttgatgttctcccgcaagaagtggccgctggagagatgctggagaccaaagttctgggcgatcctctggcacacggtgcccttgcccgagccgggcggcccgaggatgaccgcgcgcaggagtttggaagccattgccttcgcgaggaggggggcggtcaaacgcgcagccccgaccgcggccccggaggaagccccgggaactttgtttctcggccccctacctctggcaccctccgctctcactgggactcgccggccgcccctacagggggaaggagagacttttaagacaacccctcccctcagcccagcgccgggaccgagtagcaggcggactgagcgccacgctacacctccccgcccttctccacctcctcgccctcctccacctcctcgcccccacgcaaagctgctgaagcgcgccgtgccccgccctgccgactcggcctccaggggtcagaggtcggcccggccagtcccaccttcatccttaactccagctcgctccccacgccgcgtccgagaagggggccgggcggccaggcatccccaagccagtctccgccgagccggggaagctggcacaagcgggggtgactcaaagccagcccccgccgccccacgcaccgggcggcctaggggctgagcccctgcccggtcctcgcacgtgggcaacgtgtggtctgcgtctcgtcccctccccggcggctgtcacatcccccggagtctcagctgccgccgctgcccgccgcccgcgcgcgctcggaggggcccacctccgcccggggttggcggatgcgctccccggccatggggcgcgcgacgagcccgagccccgcgcctcgccaccaaaagcaatcaaataaacacacaccttggctggaggcagcactccgagaggcttccagcccggatcctgcagggcggcgccgcctccgcccgcccagtcgcggagccccggccggccgcgcgggactcgcgccttacgtaagcccgggagaccggctccgcgcgagccgctggccgccgccccctcccctccactccactccactcccacccagcctgcctggcccacgtgctccctgcgacccagcgagggctgcgggggcgaagcgaggtgcagaccacgcgaggtagagaaacccctttttttctttcgcggtcgcctggggaccgcggtctactgcaagggaagggaaaaatacaacttgttgagcgcctactgtgcgccaagtttgcggctaggtgatttcattgtgtttacagccgaggaatggagcgtgaccattcattcattgattcattctgcaaatgtttattgagtgcctactgtgtgccagaaactattctaggcgcttaggatctagccgtgaacaacagatcgaatcctgctctcaagaaattgcgtcctagcgggaggctggaacccaagactgactgactccaaagtctaggcgccttagggaacagggaagaaggggatgtccctcacctgtgttcaggaccttcttggtaaatgattccaggacttccatgcgcattatgctggtgctgcacctataactcaccaagtccaaatggagtctgtcttcccccactccaccctcccctgcatatcccaatccacattctgttagatctgtgcccaccttacacacagcctttaatttcccaccccaactagtgggataagtgcccataagactccagtttctgtgccattccattttccgtgcagctgccaggaatactgataaagtgaaaatcaatatttattatttcccggcctcagatattgtcttcccttcaggataaagtgaaaaatcttcagcaggggcgcagagatgccttccgtacacctttgcattctgcaggccccctcctctgccttccttccacaggccacctgccttcaggaaatctgttgcagagttcccagcaccaatacccaggactcagagaaggtgagggacacaagtagtgggatggtgtggagaagaaccccctctcagctctttgattggggttggtggagggcagggcctggcatagtttcctgacacccagcgcctctccccactgcttactccacgcacaaaattggccagacagcacacccaggccaccagccccaggccagcatttgttccatagactgatctccctctaaaatgtctcagtgtggccgggcgctgtggctcacacccgtaatcccagcactttgggaggccaaggcagacggatcacttgaggccaggagtatgagaccagcctgtctaacatggtgaaactccgtctctactaaaaatagaatgattagccaggtgtggtggtgcacgcctgtaatcccaactactccagaggctgaggcaagagaatcacttgaacctgggaggtggaggttgcagtgagctgagatcacgccactgcactccagcctcggaaacagggcgagactctgtctcaaataaatgataaataaataaataaataaataaatctcagtgtgctgtagacctgatactgagccccttcaaaccttttctgggaacaaagaggaagaacttgcgggtctgggggtgggggtatatgtgtataatatgtagcagatacttctttggagtggctctcagaagtgagcatgcatcagaatcacctggaaggcatgttgaaacgtgttgctgagctccccctgcatagtgccacg

SEQ ID NO: 64 - DNA, 4001 bp, Homo sapiens
gtacatcgacagtaaaggacccctgctgggaagaacaacttttcataaaggagttgctaattaccagcatctccatcccagaagggttaagagcctcgcagcagcacaaccgctacctctcgccttttaacgccaattctttcggaactggtgtgaacgtggagtgggaggagagggggaaagggacgcactcaaccccgtcagactaagaaatcaggcgatctatatatccccaagttcaccacgccagccaaaggaggcatctcatgccaagggaggcagctcaagaagccatttccaggaaagctgcattacaaaatgtaatttatcagaacgagtctcctccgagtctcctgacggccaggcccggcggcttcgggaggggggggagttgctggggagagtttaccttagaaggcgacaacgaacagacaggcctttcaaagccacccagggctctgccccgaggcccgaggctgcgtggaggggctggagaggcgcgaggctgcgagccccccggcgccacaggttccccggcgcgcggccccgcccgactgccacaggtgggcggcgctccgcctctgggctcccgcgggagggggcgcgcggctctctagggactcgggggagggggccagggctaaggggtacggggacggctctgccttaaggagggcagcgtgagacggaagctccgggttttccctgcctagttctcgttccctcggccgggtggctcgggctattcctcgcgacaggaggagcggtggagaggagccgtgggcacctcccaccggccgcccctggagcctcggcctcctccccaggcgcggttaagccgcgcggccgccagctgcatgcgccccggcacgtacgagcctgcacgaccacacgcgggcgggggaagggcgccgtgatccgggagccccagtccctccagggcctcaccccagcccaacgcggctcgcccccggccctcgtccccgcagcccctcaccggtgctggccttgatgttctcccgcaagaagtggccgctggagagatgctggagaccaaagttctgggcgatcctctggcacacggtgcccttgcccgagccgggcggcccgaggatgaccgcgcgcaggagtttggaagccattgccttcgcgaggaggggggcggtcaaacgcgcagccccgaccgcggccccggaggaagccccgggaactttgtttctcggccccctacctctggcaccctccgctctcactgggactcgccggccgcccctacagggggaaggagagacttttaagacaacccctcccctcagcccagcgccgggaccgagtagcaggcggactgagcgccacgctacacctccccgcccttctccacctcctcgccctcctccacctcctcgcccccacgcaaagctgctgaagcgcgccgtgccccgccctgccgactcggcctccaggggtcagaggtcggcccggccagtcccaccttcatccttaactccagctcgctccccacgccgcgtccgagaagggggccgggcggccaggcatccccaagccagtctccgccgagccggggaagctggcacaagcgggggtgactcaaagccagcccccgccgccccacgcaccgggcggcctaggggctgagcccctgcccggtcctcgcacgtgggcaacgtgtggtctgcgtctcgtcccctccccggcggctgtcacatcccccggagtctcagctgccgccgctgcccgccgcccgcgcgcgctcggaggggcccacctccgcccggggttggcggatgcgctccccggccatggggcgcgcgacgagcccgagccccgcgcctcgccaccaaaagcaatcaaataaacacacaccttggctggaggcagcactccgagaggcttccagcccggatcctgcagggcggcgccgcctccgcccgcccagtcgcggagccccggccggccgcgcgggactcgcgccttacgtaagcccgggagaccggctccgcgcgagccgctggccgccgccccctcccctccactccactccactcccacccagcctgcctggcccacgtgctccctgcgacccagcgagggctgcgggggcgaagcgaggtgcagaccacgcgaggtagagaaacccctttttttctttcgcggtcgcctggggaccgcggtctactgcaagggaagggaaaaatacaacttgttgagcgcctactgtgcgccaagtttgcggctaggtgatttcattgtgtttacagccgaggaatggagcgtgaccattcattcattgattcattctgcaaatgtttattgagtgcctactgtgtgccagaaactattctaggcgcttaggatctagccgtgaacaacagatcgaatcctgctctcaagaaattgcgtcctagcgggaggctggaacccaagactgactgactccaaagtctaggcgccttagggaacagggaagaaggggatgtccctcacctgtgttcaggaccttcttggtaaatgattccaggacttccatgcgcattatgctggtgctgcacctataactcaccaagtccaaatggagtctgtcttcccccactccaccctcccctgcatatcccaatccacattctgttagatctgtgcccaccttacacacagcctttaatttcccaccccaactagtgggataagtgcccataagactccagtttctgtgccattccattttccgtgcagctgccaggaatactgataaagtgaaaatcaatatttattatttcccggcctcagatattgtcttcccttcaggataaagtgaaaaatcttcagcaggggcgcagagatgccttccgtacacctttgcattctgcaggccccctcctctgccttccttccacaggccacctgccttcaggaaatctgttgcagagttcccagcaccaatacccaggactcagagaaggtgagggacacaagtagtgggatggtgtggagaagaaccccctctcagctctttgattggggttggtggagggcagggcctggcatagtttcctgacacccagcgcctctccccactgcttactccacgcacaaaattggccagacagcacacccaggccaccagccccaggccagcatttgttccatagactgatctccctctaaaatgtctcagtgtggccgggcgctgtggctcacacccgtaatcccagcactttgggaggccaaggcagacggatcacttgaggccaggagtatgagaccagcctgtctaacatggtgaaactccgtctctactaaaaatagaatgattagccaggtgtggtggtgcacgcctgtaatcccaactactccagaggctgaggcaagagaatcacttgaacctgggaggtggaggttgcagtgagctgagatcacgccactgcactccagcctcggaaacagggcgagactctgtctcaaataaatgataaataaataaataaataaataaatctcagtgtgctgtagacctgatactgagccccttcaaaccttttctgggaacaaagaggaagaacttgcgggtctgggggtgggggtatatgtgtataatatgtagcagatacttctttggagtggctctcagaagtgagcatgcatcagaatcacctggaaggcatgttgaaacgtgttgctgagctccccctgcatagtgccacgcacgtccatgtgaagagaccaccaaacaggctttgtgtgagcaataaggctgtttattttacctgggtgccggcgggctgagtccgaaaagagagtcaggaaagggtggtgggattatcattagttcttatagattttcggataggcggtggagttaggagcagtgttttgcgggcagcgggtggatctcacaaagtacattctcaagggtaaggagaattacaaagtacattgatcagttagggtggggcagaaacaaatcacagtggtggaatgtcatc

SEQ ID NO: 65 - DNA, 4001 bp, Homo sapiens
tatgagtccagtcccaggatggacagtgtgaagcccttcattccagaaggaaacaagtcaccaagtaaggtacagagaattatggaatgggctcatagaaggaaacaagtctcctagtcaggtacagagaattatggaatgggctcatctcttctcactgtcttccttcactgactccatgcccctaccatgaagaagcccaacctaaacacaaaaccattaggatgagagccagccttccccctcaggccgctctcccctcaaaccgcagcatttcaagaataaaatgcatgtgaatgtattaaaatcaaaataggcgcacttgaggtaacaatacccacaacagaaaactcaagtgcaatctggtacacataattcttccttttgagacatgggggtgggggaagagtttcctgtaaaagtccgctttttcaatctgcttaagagataaggaatacaattctggagatacttcttaattccttgcttttaagctttccttttgttttctggtactgtcctccaccttccttttcaagccagtctgtgcttctgaaatgcagatctccggataattagtccatgatgggcaataaccagcccggacatccttgagaagtacatcgacagtaaaggacccctgctgggaagaacaacttttcataaaggagttgctaattaccagcatctccatcccagaagggttaagagcctcgcagcagcacaaccgctacctctcgccttttaacgccaattctttcggaactggtgtgaacgtggagtgggaggagagggggaaagggacgcactcaaccccgtcagactaagaaatcaggcgatctatatatccccaagttcaccacgccagccaaaggaggcatctcatgccaagggaggcagctcaagaagccatttccaggaaagctgcattacaaaatgtaatttatcagaacgagtctcctccgagtctcctgacggccaggcccggcggcttcgggaggggggggagttgctggggagagtttaccttagaaggcgacaacgaacagacaggcctttcaaagccacccagggctctgccccgaggcccgaggctgcgtggaggggctggagaggcgcgaggctgcgagccccccggcgccacaggttccccggcgcgcggccccgcccgactgccacaggtgggcggcgctccgcctctgggctcccgcgggagggggcgcgcggctctctagggactcgggggagggggccagggctaaggggtacggggacggctctgccttaaggagggcagcgtgagacggaagctccgggttttccctgcctagttctcgttccctcggccgggtggctcgggctattcctcgcgacaggaggagcggtggagaggagccgtgggcacctcccaccggccgcccctggagcctcggcctcctccccaggcgcggttaagccgcgcggccgccagctgcatgcgccccggcacgtacgagcctgcacgaccacacgcgggcgggggaagggcgccgtgatccgggagccccagtccctccagggcctcaccccagcccaacgcggctcgcccccggccctcgtccccgcagcccctcaccggtgctggccttgatgttctcccgcaagaagtggccgctggagagatgctggagaccaaagttctgggcgatcctctggcacacggtgcccttgcccgagccgggcggcccgaggatgaccgcgcgcaggagtttggaagccattgccttcgcgaggaggggggcggtcaaacgcgcagccccgaccgcggccccggaggaagccccgggaactttgtttctcggccccctacctctggcaccctccgctctcactgggactcgccggccgcccctacagggggaaggagagacttttaagacaacccctcccctcagcccagcgccgggaccgagtagcaggcggactgagcgccacgctacacctccccgcccttctccacctcctcgccctcctccacctcctcgcccccacgcaaagctgctgaagcgcgccgtgccccgccctgccgactcggcctccaggggtcagaggtcggcccggccagtcccaccttcatccttaactccagctcgctccccacgccgcgtccgagaagggggccgggcggccaggcatccccaagccagtctccgccgagccggggaagctggcacaagcgggggtgactcaaagccagcccccgccgccccacgcaccgggcggcctaggggctgagcccctgcccggtcctcgcacgtgggcaacgtgtggtctgcgtctcgtcccctccccggcggctgtcacatcccccggagtctcagctgccgccgctgcccgccgcccgcgcgcgctcggaggggcccacctccgcccggggttggcggatgcgctccccggccatggggcgcgcgacgagcccgagccccgcgcctcgccaccaaaagcaatcaaataaacacacaccttggctggaggcagcactccgagaggcttccagcccggatcctgcagggcggcgccgcctccgcccgcccagtcgcggagccccggccggccgcgcgggactcgcgccttacgtaagcccgggagaccggctccgcgcgagccgctggccgccgccccctcccctccactccactccactcccacccagcctgcctggcccacgtgctccctgcgacccagcgagggctgcgggggcgaagcgaggtgcagaccacgcgaggtagagaaacccctttttttctttcgcggtcgcctggggaccgcggtctactgcaagggaagggaaaaatacaacttgttgagcgcctactgtgcgccaagtttgcggctaggtgatttcattgtgtttacagccgaggaatggagcgtgaccattcattcattgattcattctgcaaatgtttattgagtgcctactgtgtgccagaaactattctaggcgcttaggatctagccgtgaacaacagatcgaatcctgctctcaagaaattgcgtcctagcgggaggctggaacccaagactgactgactccaaagtctaggcgccttagggaacagggaagaaggggatgtccctcacctgtgttcaggaccttcttggtaaatgattccaggacttccatgcgcattatgctggtgctgcacctataactcaccaagtccaaatggagtctgtcttcccccactccaccctcccctgcatatcccaatccacattctgttagatctgtgcccaccttacacacagcctttaatttcccaccccaactagtgggataagtgcccataagactccagtttctgtgccattccattttccgtgcagctgccaggaatactgataaagtgaaaatcaatatttattatttcccggcctcagatattgtcttcccttcaggataaagtgaaaaatcttcagcaggggcgcagagatgccttccgtacacctttgcattctgcaggccccctcctctgccttccttccacaggccacctgccttcaggaaatctgttgcagagttcccagcaccaatacccaggactcagagaaggtgagggacacaagtagtgggatggtgtggagaagaaccccctctcagctctttgattggggttggtggagggcagggcctggcatagtttcctgacacccagcgcctctccccactgcttactccacgcacaaaattggccagacagcacacccaggccaccagccccaggccagcatttgttccatagactgatctccctctaaaatgtctcagtgtggccgggcgctgtggctcacacccgtaatcccagcactttgggaggccaaggcagacggatcacttgaggccaggagtatgagaccagcctgtctaacatggtgaaactccgtctctactaaaaatagaatgattagccaggtgtggtggtgcacgcctgtaatcccaactactccagaggctgagg

SEQ ID NO: 66 - DNA, 4001 bp, Homo sapiens
aacttctctgtggttaccttccaccaaggaggaaaaacagtacccacatttacaaagaaaaaaagatgtactatgtaggaatttttgcaatcacgtggtcctcctacagatgtttttaatgattcttttagaagcgtagaaatgaaatatatctcagtagtaatctttgtgagaaaaaccttcgcctcttaatttccatatttactttttgaaaataaaaacaaacaaaaaaaacaactcttaagattcccacatattctcaagacctgtccttatgcaacaccacctaattattttcacgcaggagtaacacatttgctagatttgggcttcacataccacgcttgagttcagtgagtggtttacctggaaatcttgacttcagatgacctgaaaacggtggcttatagaggtgagagaaaagaagacctgtaattatggcaacccattttaaagatagtttagggaaactgaggcaaaattattttctcaagtggtgctttaaaattccttttaacagaacaaatcccccaaaccggggggaaaaaccctcatgacctttagtttacgatatcagtctatccgttttcagaaatggggaacgaggtttgcagtgaatggatttctcctttcagagctcgcttaggaagcctggcttgcttctattcttttctcctcctcccccctacttcaagcaaaagcacttgagattcaggaatgtttttaaattcaaatacaaagagaaggaaaggaagccaaacgacctgagacaggggttgtggcttagaacagaccaaggttcattcctcgagcctcctctctctcagtctccaagtgtccccccattcccgggtcccggtgcagatgatgctgtgctgcggtctgaagactgagcaacaggagtccgcccccctcgcagctccctccccgacccgctatctccaggtgggttgtcgagcactggcgaaacctgcggcccaacccttcctaggcaacgggaaaaacgtgctcaggagttcattcagcgaaagcgcagagcaaggctgggggcctgtcaccggggaggtggcacttgataggttgggttttgctttttgcatcttcatccctctcttccaagctgtctccaggaagggctgccttcgtccacatttcctctttcccccaggggttccgaccctcgaccagcagagtgactagggctctggctccctcagtttcgagtctttactcgctgctgggcgacagtgcagccacctgacctggccctcgcccccagagagtgcggcccggccgcggtctgcagcccaccctgggtgtccacatccgaggggcgcgatgggagcaggctgctttcagaaccctgctggaagactgaaacttgatctgtgagatgcaggcttctaagcccagccttctgacaaggaccctggcaacccgcgggaaaggcgactaccctcgggggagcgggcgagtgcgcttctacaagccccttcattacatgccccgtgtggggaaggtgggacggggcgcggctgcctcaacccgaacccctgagatgcagtccccggatgctaccgcccgtcggccagctctagccctacctcaaaaagctgagggatttccctccgggccagatactccttggcatcgttggtgttcatggctgtgccgcgcgtgccttggggcgcaagcggggaggctcccgggctgcggcgacctgagccggggctgaagctggggctggcagagtccgcgccgagcagcggtgcagccctctttctcacgcgcactcagctcagcctctccgcccaggccagggaccccctccgcctctccccgggggctgtggtctccgcgctcccgccgcccccgcttcggttccagcccccgagccggagctgcaggcgccgagcagctgtgccgcggcttcccgggctgccaggcagcgcggccgccaggggtggggcgcagggagcggaggagggaggacagcgtggcgaacgcaaggcagcagccggcccgcctctccggttcagcgcgccgcgctccgcgcctccccgagccgggtctgcggcggctgccggtcacgctgcgcgggctggcgcgaggtgcggaggtgggggcgggcacgcgcaaggggtcgtagtcatacccctcggtgcggcaccggcgccagagcgcgacgcttcactgcgtgcgccgcccagggatgcagctaccggggaccaggtggccaagggaacagggtcggggtctgtaggaacctgcgaccgtttcgcttctccggaccttgtacgcacacagacacactcgcacgcacatacacggttacctccgggtctccgaggaactcccaggaaaaacctaatagtcacaggatttatcatttattcctaaggttacggatctttcactatagggagctgtggggaagggggaaaaggggattcatggtgtggaatccaacccttcagataatttttagatcttgagtatctctatccttcaggaaagttttgctagctggtttcgaatttttaccctgtcggtgtcacaaatctttatagactttaggataaggccttagtgtgagcctgaaatcctaatcaactgaaggactaataagtagtcaactagttaattatctccatggagaagaagggacagtggaggagaaaggtgggtggtagtggagagctagagatgcttaaattgcaaatgtgtttagtaggtggggagggtgggcatcattaattagacctgaagagtgtgcagtccgtggacagtgtcgtatcagagcacccctgggggaatatgagtgagtatgagtgggtgcgctaaggcataatggttaatggatcttcctgctgcagaccattgttaaggtgtaacccatcttcctcctagctcccaagatgactcaattccctgctaagatgtcttcacattgcctatttgggagatagtccttgcccccggagaatatgatctctaacttcccacaaagcctaacactgtaggagggtgtgtgagagaggacactttggtaggcactggtatctggggtctggctggagaaagaagcaacgctgccactgctttaaaaaactatagagtctgaatgtccatttcaagtgcttctttgcagatcttttcttggttctatttcttgttccggaaacaactgcagctcaagccttaactacagctgcagctttgttttacctgagggagtaaatgaacttttagcacttgtgaacccgtgtgtcatatggttgccttaaacgaggcaggtatttcagttccatggaaattggtttttgcccttagaatatgccatttcacttacagtcccaacttctagtatttctttagcttatttaagattggctatggcagtagtgaaggcagtgtctcttccctatgcaatgatgcttgaaaagtacaatggtccgtggcattaaggcttcctttgtgagcaggcacagtggaggtgaacacgcaggaatgaaaaggccagtttctccaggacttttcaaggtcatcctttgcagacaagaatctggcagagcatggctcacctgtcttcccttgaagaaatgcataattctaagtgtactttagtgttaccggacaagtgttggcaacttgcttgtaaaaagagaatggataagaaagactgcactgcactaaaaattgtagatagcctgaaaaatgtagtaaatggtgatacggcaagttttcaagtagccttatgcagagacaattagtgtattttggtgtgtgccagggtggagagagatgcgtgaaagaggaagatgttcataattacttttgcaaaggaagttgtggctttgtagggaggggctacatgagagagatataatgcttaaaagccaagctaatggttcaaaagagaggaaagagaaaggacaaggaacactaaatacatccttgctgtgggaaagctggcctctcattccctgtgatgaaattct

SEQ ID NO: 67 - DNA, 4001 bp, Homo sapiens
ataataagaaagtgggtttaaaaaagtctaaaactggaaacacatttcaaacatgaacgtaccagagatatcccatattccatttagcttacatgatgtctcaaattaggaaaaaatctgaaaaggtcagttagatatatttacttgtctgacaatacgtcaatacaataatcagtcagtttgtctgtaatagcgtctaaaatccacagctggggccaatgtcttggtgtttagtagacagctaattgttaaactttgtacacctaaaatattgtggtgggcaaaatccattttaaaaacctaaagtttttagttttacagtctacactaatcacatggagaactgccagattttccttccctcttgagctgcgcatagcacagattcgtcttactgaaggatgtagcctttgaggtcaccagcagtctacttccatcttctcattgtccacaagtgaatctaagtccattactgtatttcacccaagcaagttgacttccttttctgggtgtgcattatttatcccattcatatgcagaaaagtaaataagaaacataaaaccttaacaaaaaggcctgccataacttatttgcatgcacagtgtagattttaataaactatcaaacttctctgtggttaccttccaccaaggaggaaaaacagtacccacatttacaaagaaaaaaagatgtactatgtaggaatttttgcaatcacgtggtcctcctacagatgtttttaatgattcttttagaagcgtagaaatgaaatatatctcagtagtaatctttgtgagaaaaaccttcgcctcttaatttccatatttactttttgaaaataaaaacaaacaaaaaaaacaactcttaagattcccacatattctcaagacctgtccttatgcaacaccacctaattattttcacgcaggagtaacacatttgctagatttgggcttcacataccacgcttgagttcagtgagtggtttacctggaaatcttgacttcagatgacctgaaaacggtggcttatagaggtgagagaaaagaagacctgtaattatggcaacccattttaaagatagtttagggaaactgaggcaaaattattttctcaagtggtgctttaaaattccttttaacagaacaaatcccccaaaccggggggaaaaaccctcatgacctttagtttacgatatcagtctatccgttttcagaaatggggaacgaggtttgcagtgaatggatttctcctttcagagctcgcttaggaagcctggcttgcttctattcttttctcctcctcccccctacttcaagcaaaagcacttgagattcaggaatgtttttaaattcaaatacaaagagaaggaaaggaagccaaacgacctgagacaggggttgtggcttagaacagaccaaggttcattcctcgagcctcctctctctcagtctccaagtgtccccccattcccgggtcccggtgcagatgatgctgtgctgcggtctgaagactgagcaacaggagtccgcccccctcgcagctccctccccgacccgctatctccaggtgggttgtcgagcactggcgaaacctgcggcccaacccttcctaggcaacgggaaaaacgtgctcaggagttcattcagcgaaagcgcagagcaaggctgggggcctgtcaccggggaggtggcacttgataggttgggttttgctttttgcatcttcatccctctcttccaagctgtctccaggaagggctgccttcgtccacatttcctctttcccccaggggttccgaccctcgaccagcagagtgactagggctctggctccctcagtttcgagtctttactcgctgctgggcgacagtgcagccacctgacctggccctcgcccccagagagtgcggcccggccgcggtctgcagcccaccctgggtgtccacatccgaggggcgcgatgggagcaggctgctttcagaaccctgctggaagactgaaacttgatctgtgagatgcaggcttctaagcccagccttctgacaaggaccctggcaacccgcgggaaaggcgactaccctcgggggagcgggcgagtgcgcttctacaagccccttcattacatgccccgtgtggggaaggtgggacggggcgcggctgcctcaacccgaacccctgagatgcagtccccggatgctaccgcccgtcggccagctctagccctacctcaaaaagctgagggatttccctccgggccagatactccttggcatcgttggtgttcatggctgtgccgcgcgtgccttggggcgcaagcggggaggctcccgggctgcggcgacctgagccggggctgaagctggggctggcagagtccgcgccgagcagcggtgcagccctctttctcacgcgcactcagctcagcctctccgcccaggccagggaccccctccgcctctccccgggggctgtggtctccgcgctcccgccgcccccgcttcggttccagcccccgagccggagctgcaggcgccgagcagctgtgccgcggcttcccgggctgccaggcagcgcggccgccaggggtggggcgcagggagcggaggagggaggacagcgtggcgaacgcaaggcagcagccggcccgcctctccggttcagcgcgccgcgctccgcgcctccccgagccgggtctgcggcggctgccggtcacgctgcgcgggctggcgcgaggtgcggaggtgggggcgggcacgcgcaaggggtcgtagtcatacccctcggtgcggcaccggcgccagagcgcgacgcttcactgcgtgcgccgcccagggatgcagctaccggggaccaggtggccaagggaacagggtcggggtctgtaggaacctgcgaccgtttcgcttctccggaccttgtacgcacacagacacactcgcacgcacatacacggttacctccgggtctccgaggaactcccaggaaaaacctaatagtcacaggatttatcatttattcctaaggttacggatctttcactatagggagctgtggggaagggggaaaaggggattcatggtgtggaatccaacccttcagataatttttagatcttgagtatctctatccttcaggaaagttttgctagctggtttcgaatttttaccctgtcggtgtcacaaatctttatagactttaggataaggccttagtgtgagcctgaaatcctaatcaactgaaggactaataagtagtcaactagttaattatctccatggagaagaagggacagtggaggagaaaggtgggtggtagtggagagctagagatgcttaaattgcaaatgtgtttagtaggtggggagggtgggcatcattaattagacctgaagagtgtgcagtccgtggacagtgtcgtatcagagcacccctgggggaatatgagtgagtatgagtgggtgcgctaaggcataatggttaatggatcttcctgctgcagaccattgttaaggtgtaacccatcttcctcctagctcccaagatgactcaattccctgctaagatgtcttcacattgcctatttgggagatagtccttgcccccggagaatatgatctctaacttcccacaaagcctaacactgtaggagggtgtgtgagagaggacactttggtaggcactggtatctggggtctggctggagaaagaagcaacgctgccactgctttaaaaaactatagagtctgaatgtccatttcaagtgcttctttgcagatcttttcttggttctatttcttgttccggaaacaactgcagctcaagccttaactacagctgcagctttgttttacctgagggagtaaatgaacttttagcacttgtgaacccgtgtgtcatatggttgccttaaacgaggcaggtatttcagttccatggaaattggtttttgcccttagaatatgccatttcacttacagtcccaacttctagtatttcttt

SEQ ID NO: 68 - DNA, 4001 bp, Homo sapiens
tactgtaatgtgaactacaaccaaattagtctagaggatagtagtattgaataaaacatttacattaaacccatcactttatacttttcaaaatactttttgcaactatcttgagggttcttcaacaaaagatagcgcaagtatgaactccaatttgcagaagtgagacccaaaaagattatggactatctttaggtatctgcaggagctagggaagaactaaacatcactgcaagtggccatctatggcgcctgtctttgagggttctttaaaatggacttttgcaaacattatctcatcctgtacataaggttatacaacattgaatggccggggaatttaagtagaacagcgttttttatgggcaggttagtcagctaatggataagagacttgaaattactcttttgggattagcaaatagaagggaaaaacatgataagggcacagagcggtgggtctgggggaaaaagcagaggcacagtttgaaaaaaatgtgtaagagactgactaggtaagatatggtcacagttcataagtcctttgaattctaggattaaaaaggtgaactcgagttaaggatatgaagtctgggacagctttagctgggtgtaggaatcttggtgtgaggatgagggcctgcaatttgcattgtggatcgatatgcagaggaaggaggaaatgaaacctgaaggcactgctactgaaaaggggtggaaaggatgattttacggtgagcctaaggttttgcttaagcttgaggaatagaaaaacacacaaagaaacgacttgcccaaatccattattgagacgcccccctcatttccggaagtcctttaaaatcgcagaatattaatgctgaagcaccctcccctctactcctgcgctatgaggtgtctactgtaacgccagtccttttccttggacaaagtggaacgccttactgaaggagagtccctgttaaggacagttacattcttagttctgtagaacctccgtatgtcgtaggattctcaaattctagctaatgatctaccgatttcaagccatatatggtacgaggcaatagccatataataaaagaacgtggccagtcccttagaaattatcaggttgaaatcggattccgtgactcttgcggcggcctctgggttcctaaagacttctggaaatcatgtctccctacagggctaaacagcacgcactcgcgccccttcccggtaacccgcccccatcccacccccgccctccaggccaggttcgtgagtagaatccaattttccatggcccactggatctgcagggttgctcggtgcagacccggccagcggaggaaggaggggcttcagcgacagggagggcccggagcggccagaggtattcccatcttcctcttggtgtccacccctccaggctctcctcccccaggaaaacctaaaaccgaccctgtggccccattacccctcccggatgcctcccatcaccggaagcaaccaggcccagcggcatcccagttcccttttctcaaggcaaagaaggggtccctgggtaaactggcctggtattcccaaccctcccccaccaccccccccaaaaaatgcctgggcctggcttcctgccaaacccagagcagggcaggttacccggagttggaaggcgccgctcgctgccgggcggggcgggctgctgcagactctgcggtggggtctgcgtctgaaacggcggcggcggctcggcgtccgggggcctgaggcccggagtggggccgggcagaggggcgcagcgccgccgcttcggggagccggggctcagcagcgccgcctcgaactccatgggccgcttcagcgtcgccccgcacgccatgccgctgaggggccagggaccgggagcggacgcggcggtaagtgcggcccaagaggctcctcagccgggctcgccagccaagccggctccaatggcgcctccagcacccggcagcggcgctggccccgccttctgtgacgtcacgggcgcacaccatcgcccggcagaggggggcaggccggaagagggtggctctgcgaggctggtcagtgccggcccggcccggggcgccccctgctgaagaaatggaacggtctgggcggagagcgtggtcaccaagcaacaccgggaaggcccccacccccacccccgcccctcccagggtcccatcccccccgctttggggctgtcgcgcccgggtggcccctaaggttttcgcacctgcgctgcgcgggcgtgggggaggggagagcttgaaggggcctggtgaggggccatgggggtctggtgactccaaaaacctccttctaggccgctcttgtccccatgataaaagggtgattgttaaaggtcatcaagggcattccgctgagccctgggaagtctgcacttaaacagaagcgagtattggaggatgggctttagcaagtccatgaaccccatgaaattatttgcagatttgtggggtgggagcgagggtgggggtgtttgtgggagtatttttgagatagctgacccataccttaagcagctcatcaaagggatatgttactttaaaacgttgagaacctacaaaaagcacccactggcttaaaccgtctaagaatggcttcagagtgttaagaacttcagctggtagctgatttgccattcttcccatctgacttggcagctcaggttcttcctcatctttctgaactctttacagcaataccagctgtaaagtgcttttgatattgtggaaaaataaatagataacaggggggttctgctttctgaaactctgcgcgtctgtatttttctggggagcagttccggtgttttcaacagatcatcaaaggaatctgatccaaagaaaggataaagcctttctgtaccttctcatatatactgaataatgaccatgactcctgggatctgtcttcaacatatctccaggatttttcaggacagtccgaattacagatattcacttctattagcccatatgctacatcaatgtgccacaatatttgagttggagaatatgggcatactaccccagtgcccattcattgttctttttctattgcttttctctggatcctcttcagttactacaaatttttttttttttttctgctccttgtggaacagagctaccccataggcatgcagtatgcccggagtaacctctacaaattctttaaatatcataacataggacatatatctttgcatttatctttgtaaaaattgcagaaataattctaaaatcagcataccaaatgttaattttatctcctctcttgtccataagagcataaagggtctttacaataggctagaaaactagaaatagaaaattagggccagagaaaaaggagatcacaattatcatggggttaaacaagactgtaactgaatttgaaatgtagttatcggctgggtgcggtggctcacgcctgtaatcccagcactttggaggccgaggcgggtggatcacttgaagctaggagttcaagaccagcttggccaacatggtaaaaccctgcctctactaaaaatacaaaaactagccaggcgtggtgatgcacacttgtaatcccagccactggagagtttgaggtgggagaattgcttggactcgccaccttgagattgtgccactgtactccagcctgggagacagagtgagaccctgtctcaaaaaaaaaaaaagaaagaaatgtagttctgagcttcctggatgctagggtaaaaatgaaaacacagtacatattgaatagattttgtcatctgaaaggaatgaattaatcataggagacatcatagattttttttccctatataaccaaattctaaaggtagtttctcatgtgattttattaggaaacagtgaatgatttaataaagtaatcaggaagattttaacaacaaatgctaaagcaaaattcacatggatactttttgttatgtctaatgaaagccaaggaca

SEQ ID NO: 69 - DNA, 4001 bp, Homo sapiens
ggaattgcatatgtaaaacataatctcgtccaagcaaggtggctcatgcctgtaatcccagcactttgggcggccgaggcaggtggatcacgaggtcaagagatggaggccatcctggccaacatggtgaaaccccgtctctactaaaaatacaaaaaattagctgggcgtggtggcgcacacctgtagtcccagctagtcaggaggctgaggcaggagaatcacttgaacccgggaggcagaggttgcagtgagccaagatcgcgccactgcactccagcctggcgatagagtgaaactccgtctcaaaacaaaaaagacataatctctacaagaactttaagacaattttaaaactcaatctgtaaataaatatatttgaaggtaaaaaaaaaaatcaggctggatgaggtggctcatgcctgtaatcccagcactttgggaggctgaggcaggtggatcacttgagctcagtagttcaagaccagcctggccaatgtggcaaaacccatttctactaaaaatacaaaaattagttgggcatggtggtgcatccctatagtcccagctacttgggaggctgaggcaggagaatcacttgaacccgggaggcagaggttgcagtgagccgagatcatgccgctgtactccagcctgagcaacagcaagactctgtctcaaaaaaataaaaaataataaataaataaataaatcactaagcaagtttaaacaaaatattgtctaattttttagaacaaaaaaaaacagagtatctttttttttttttttttagacaaggtctcactctatcacccaggctggagtgtagtgacaacaccatggctcaactgatcttcctcccttagcctcctgagtagctgggactacaggcgcacaccaccacacctgactaatttttaattttttttttagagatggagtttcaccatgttattcaggacggtctcgaactcctgagcacaagtaatccacctgcctcagcctcccaaagtgctgggattacagacatgagccactgtgcctggcctgagagtatgtttaaatgcctacagagagaatggaagaagaagaaaacaaattctagttttgcaagacttttaatgacccaagtatcagtcccaaagttatcctcatgctttctttacattttcaggagctcattgccaaacgccatacccttcttgtatagaaaggaaagatactttgttggccaaattcccacttttaaaatataattaattaaaactgataaaatttgaattttgctctggctctcaagaaaaagaaaaaaagtccaggcacagtggctcatgcctgtaatctcagcactttgggatgccaaaacagaaggattccttgaggacaggagtttgagaacagcttgggcaacaaagcaagaccctgtctctacaaagaaaaaaaaaattaaaaattagccagcagtggtggtatatgcctgtagtcccagcaacttgggaggctgagatggaggatcagttgagcccaggaggtcaaggctgcagtgagcagagatcatgccactgcactccagcctgggtgacagagcaagaccctgtctctctctctctctctcacacacacataaacacacacacacaaacacacacacagacaaagaaagaaagaaaggaaaagaaaaggagtgagataccattaagataaaccagaaacctgaggaacactctcattacatacaggaaaacagcttctgttgttattattttttgcatgtgtgcatgcaaaatatcaagaggattttttctggaaaaggacaatccatacccttagcaaggtaatgagcttctttgagataactggaggaactggagcatcttcccatgtcaacacttggctcaatcttgaaatccaaaggcatatccaaagaggttccactcagaatccaacagaacctttctgtagaatccaaattgattttctgaagtcaggtgactacatttggggccacgcctgcttatgcagctatcttgaccattatgtgctcagcaatacctcacaagtcactctgagatgaacactttgagcaaacagggccaggacatcacagtgacccaggctgtgaaaacacttcaggccagtccctgagtaggaatggacaacaaggtggtcaccatgctgacagctattccctgtgtgatttactttattatgaagtctaaatttgatgctgaagtgctagcctaagctcactaacctgccaacttagagaagaaggtaaccatggctaggatgactgggaatctgatggactcaattaagaatttctacagatgggaaaaccaaaactccttagtggcaagaggccaaagatggtcagcgaattgttgtttccggctggtaggtgacatttcttctattcgctaagcccattttgtgataacacagttttccatattgacaggattgttttcatcaccaaaggaaaaccgtgggtccatgttcctgtgacaatctctttgtctcattcccaacaccctctgttctgtgtttaaacctctacaaaccaggcaaactggggactatgtgtaggacccagacatggaggagaaagcaggcattgtttctacttaccttatctgcccctccactaaggtaccagttagtacaaccacgtaacactcacaagtcctacacttctaagatcagccctactgactttgtcacggtaagagttggctgttggaggcaatgattcaacaatctaaattctgattattcctttttgtatctgtcatttagaatgtgaatagtgtacatctaaaagctttaagtacattatccatcaatttttactacacaaagcagtatgctgctctgtcttcaaacagcacaatgctacagtcaacacaaagggcaaaaccatggcaatatggcaattgcaatagaaactcaccaacatcttggagtctctggatatcacaggtgaacaagttgaagggccttgcgacacagacaagcaaccctttaattctaaatcatctttttttcaacagttggaagttgactgcagttgaataacagaacaaaaacggagcttcaaaatcatggcgtgcctgcttcttctgggttcttttaactgcaagcaatcagctttgaagagcacgtagggaacttctgatgtgatacaaacttttgtctttttttttttttttgtcttttaagagcattcaaaaacacttggtctggctgtttcaattttctctttctctcctattcctagctcaagaataacatttacatatgaaagaaaataggagatggctcagaataatatgtccaaggccacgcccaggcgtcagggattcatgaattttgtatacagtgtatgatgtttctagattaaaatattttcaaaggtaacatgatataggctccctctgtaatgactgcatttgattatgctctggtaattctatcagctaactttatctcagaaatgtggggtacccacaatgcagtgcctcaactgtaaccatataccattcagtgaggctgtctagcttcaccctgtcattgtggggtggcagaagggagacactgtgatgggcaacaagtcaatccaatactcctacaagagccagatggatgtattatttatagtcagtcttagggctgtcgtccttttgggagtgcgcatgaatttgatgaccagctgttacaaatttgttatcctgaaactattttagaagttggggggaagggaggaaagccttttaaaagtgcgagtaaagcagtatttggagaaacttcctgcctgtgttttaccagaaaactttgctggttttccttgctctttggtgaggttagccctgtctttttatccaattttcccattgatgtagcctagtgtgtgctgtaaaccacggacctttgctgtgctttgggaacatttagaaaactcttaccaattaattttctgaaagtaattccagtgataaact

SEQ ID NO: 70 - DNA, 4001 bp, Homo sapiens
agtccatcaccagatccaaccatgtgactcccagtctcaaacccttccagcaattctcccctatattcaggataaagtccaggcttctcaaaacctggcttctatctttctcatttcaccacctcctcatgtcagactgtattccagactttgaacactcaacagggtcacatcacttacctgactctaggtgtgtgcactttccttccccaaaccctacctttgcctggctagctgctgctcatccttcagctagcacttcacatttctggctcctttccaggtgcagtggctcatacatgtaatctcagcacctgggcaggctgaggcgggaggatcacttgaaacctgggcaacaaaaggaaacactgtctctacaaaaatttgtttttttctttctgagtctgcttgctagggggaatttttttttttttattttaaagattaactgggcacagtggcatgtagtttatagtccaaaggctgaggtggcaggattatttgagcccagaagtttgaggctgcactgagcaaggattccaccactacactccagcatgggcaaaagaccgagagacccccatccatctctaaaaagaaaataaataaataaataaatggatggctacttccatgtactgatagcatgtgcacatcactacatttttctgtttatatataaatttcccccacaaacctggctactccttgaggtctgagcctgtcatctgcctgaacccctcactcctagagtacctgtcccatacatacatacatacatacatacatacatacatacatacaatgtacacaatacacacaccacacacacacagcttatgggggagagatcttgacaggttgagtttggccagctggaaggacatttgaggaagtcgctgcctctgtcaccttcttcctttacctgttggaaaacctgaaaagaatcctcttggagaatatcaaagcactttactatactcggcaaaaaatcccagtggaccagatagaatcatactgagattgctcctgtattaaagataaggaaacagatcttggaaaagtaacaggcctgcagccctgagtatgaacgatctgaaggggaagagttaattaacagtagcctcatccagtgaaggttcagatctgtgtcttactttaacagagttctggggcaacagaataacatgtcagactttctcagacccaaagcaggtgtctaagtaagagaattatccccacttctccccacttctgagaactatccctgcacctgcataagaaagccggagcagctggaaaaagcacataggtgagcaaacaaaaagatggcaattaaaacttgcagatcacctagtatgcgctgtgcgccttcaaagctttatctcaattcttgctacagttctaatgtaggacctcattttattgctgaggaaacaggttcagagaaactgggaagttagcaagagatcatacagagaaaaagaagagctcaaatccgaaaccaagtctcgtcccctccagtgctctgcgctctccactcaaccccaggggcttacatttcagtagtaaagaatcgaggccatctcctccgggagaaagataggccagcagcaagagaaactcaccttggcacaagcacagagcgtgaatagggtactgtggcctgggctcagttctgcaccccgccagagatccaacgatcctcagcttaagtctggcggtgagggggaagttccacccggagggaggggcaggggccgggcataaaggatcacgcgcagggtggaccgccttcgccgcctcccgaggaaggacctgaaggggatggaaaacagagctgggaggtagtaccgtctccacctctggatcctcgaggtcgaactggccggaacttggtcactcactccgcagcgcgggtttggagaactcctgggcacaatgaggcaggtggcgctggccacgtgggcggtgcaaggggcggggccagcctcgccttttgctggcccacattgcaccgcgcgcctaggcgccgccgcaggcgcttttccgggggaagtaaggtagcagatgccacgttgcaggttcttctggtgtcggccctccggattcacaatgccatccgtggctccatactctccctaaagtcaggttggctggattcccaaagttcacctaagttggccccgttacatttagttcaagcaaactgaggcccagagagcagctgcaacaccaagattggccagaatacagaagacctcgcgtctgcagatccaggcgctggaaagtgcctggtccccctgtctggaccatagaccccgcccagcacgttatgtgccaggcactgtgcttaacacttaataaacatggttttattgaatcttcataataatcctggaaaaggaatattccttttttttttttttttttgagacggaatctcgctctcgcccaggctggagtgcagtggcgcgatcttggctcactgcaacctccgcctccctggttcaagcaattctctgcctcagcctcccgagtagctgggattacaggcgcccgataccacgcctggctaatttttttgtattttttagtagagacggggtttcgccatcttggccaggctggtcttgaactcctgacctcgtgatccacccgccctggactcccaaagtgctgggattacaggagtgagccactgcgcctggccgaaaaggaatattcttttatttcgtacaagcctttttaaaaatcgtagtatagcatatatacagaaaatacaccagtctttttttttttctttttctttttttcctattctacatccaggaagaaagaaaatgtataaatcttaaatgtatacagttcttttttttaaattattttttgcaatgtaactgccatccagaggaagatattaccagcacaccataagcctgtgaggaaagtattcataatccattttacagattggacagactcagcaaggttaaggctatttataattttcccaaagtcacacaggtattaattaaatgacacatctgcgatttgaaatagtctgtgctgtttgagtggagaggtgtcttgcatgtatgtgttttccttggcagggatgggcaagacacagggttatctcggtttggctctgcttttccccacacctttactccctgagagcaactcttcccatttccccacccccgttatcccccactgtctccccaacataagtgatgtcctggtggaccaaatgtctaatgtatcaggccatcctcataaaaacaatcagacttggccgggtgcggtggctcacgcctgtaattccagcactctgggaggccgaggcaggcggatcacctgaggtcaggagttagagaccagcctgaccaacatggagaatccccgtctctattaaaaatacaaaattagccgggcgtggtggcacatgcctgtaatcccagctactcgggaggctgaggcaggagaattgcttgaacctgggaggcggaggttgtggtgagctgagattgcgccattgcgctccagcctgggcaacaagagtgaaactccatctcaaaaaaaaaaaaaaaaaaaattcagctaggcgtcgtggcgcgcacctgtagtcccagatactcaggacgctgaggcaggagaatcgcttgaacccgggaggcggaggtttcagtgagccgagatcgagccactgcactctagcctcttgacaaagcgagactgcccctcaaaaaaaaaaaaaaaaaaaaaaaaaaaaaaaaattagctggatgtattgatgcgagcctgtaatcccagctacttgggagcctgaggcaacagaatcacttgaaccagggaggcggaggttgcagtgagctgagatcgcgccactgcactccagcctgtattcaaaaaaaaataaaataggccaggcatggtggctcacgcctgtaatcccagcactttgggaggccgaggtaggcagatcacctgaggtg

SEQ ID NO: 71 - DNA, 4001 bp, Homo sapiens
tttcatacttagcaaagtcagctcagtagctcagaagggtgtcacgagatcagttgggatatgggacagaacaagttccacagtttctcatccagattttctccatttccccacaacgccccaggcattcttggcatgaactgtgcctcaggcctggcctgaggactttggttcagtgagctcctggccccaaagacggaagcggggaagggttagagaagaaaaaccaactcaggaacaaaatcttcattattaatagtatgtaacgtggccgggcgtggtggcttacacctataatcccagcactttgggaggctgaggtgggcagatcacttgaggtcaggagttgaagaccagcctggccaatatggtgaaaccccatctctactaaaaatacaaaaattagctgggcgtggccgtgtgcacctgtaatcccagttacttgggaggctgaggcagaggttgcagtgagctgagatcgtgccattgcactccaccctgggtgacagagcaagattccgtctcaaataataataataacaaaaacaacaacatgcagccaggtgaactagaaacagcgtgggcctgagattcacatttgccctcttttccccccgaccccccaagcgctatgactcaggaggacccagagagaacctctcctcaggggtggggagcaacagcctcaggatagtccagtgggtgaagcatggtaagggtaacagcccacgttccctgggccctcactgagtgccaggcaccctcccaagggctatcaagggcaccaggctcacgagggacagtcccctccatcctccactcaagccccacctgcccagtggccttcctttcacacatcacgcacattgcatttccaaaccaagtctttgcacagactctaatgttcctttctcttgttctcctccaacctaccattgagcctttaaggctgagctccatccagcatttgctgagccttccctagtgcctctccccggcctgcagctccctaaagtactctctcttctgggctctccagcaatcattacttcaatcttcctcattagactctgaactccctgtggagggctggaatcactttccctcctatggccccaagtcaaagcctggcatagagtggatagaaagtccctacaccctgacccgtccgcactccctaacactcctactctcccagccagccttacggcatcgccacagttctccctgagagaggcagaggtactgccagctgcacaggtcaaattctagtggttaagaaaaggccaggatgagaaaagggtgcccagggtgtgcatgcgtgatgatggtaacgaaggggtagagaaaagggggagagcctgggtggggaccggttgtgggcacctggcaggtttggaggcgggggcatcaatggaggtgggaagcgatgggtcagaccaggctggggggagactctcgcgctgcaactcccaagggaaggagagtgggggaaaggagtcagggcaaagcactgtctagttgtcccggggttcccagagctgcggggtggacctggggtggggagcgagggacgaatccgtcggtgctgcccgcggccgggcccgagcggggtggtgcacggctggggacaggctcagctctacacgatgcatggggaggatctgcagctactgttacctctgcagtcgccaccgcccagcccgagccccaggccgcccaggatggtctcggactggccgtcgctgtacatgaaggccgtgtccagttcggtgtggccgcgctccagaaaggcgcgcacggccgcggcgctggcgggcgcgtccatgcggcgccccatctccatggtgcccagcaccgaggcgacccgcggtggcggtggccgggacatggcgagcgcgcgggcctcgggcggcggagagcgaagcgcgcagtggacggcggcgcgggagactacgcgagacgcggcactcagcatagcagcggcgcctgcgcgttgggagccgggggccccgcccatgccggggaggagcgcggaggcagttgggggcggggacaacaggcgcggccccagcggcgcctccaggcccggtcagcccagcgcgcggcgtgggggcggggcctgcggttcccgcgggggcggtggcgcgcggtcagctgacccggcgggccttgacccagaagctgggccctggcggcggatctggacgtggtgagccggaccgggggcaggtggcaaacttcacggctgggggtcggggctcctgggcttccctgccacatccttccagccctctcctccggccgctggactgtcccggctcctgcgccctccttgtggcgcgatatcgtgggacgaggctccgggccgggactgggtggccctcgggaatccgcagccagtggccccccacctcaaaggcgaccagcgcggcctctcgagctggcctggccaggagttgccctgccccggccgaccggccccttggcatctgatggcttcgtttttcccgggccggccgggcgaggggccctcgcggcgctggccccagcagctgtcctatcattatccctccaaacaggcggcccgcgccgggctgagtcaccaggagggagctgtggccgaggacgccgaggcctggagtgggtggtagccccgagctgggacgctcctccctccacaatctccccaggtctgcagggaccgagggcctacactgcctcctcccacgccgtgcttagggtaggtttccaaacgtgtaaatggagagtctgagtctggaagtgtgaggggtcccgggcctgggtcacaggtcatgtctaatcaacgcttactgaaggcgcctgtgtgcccggacgctggaggggctacaatgagaacaaataatagtcattttgggctgttggtgttgagtgccagtgccaggcacccttgtaatcgcttggcctggattgtctcatttaactctgcagtcagcctaggtggtgggtattgcattattcccctacttttcagatgagaactacgaagctcaatcacttgagttccagactggtaggcatcgggcaggtctgttccagagtgcttttctcctcaaccctgggctgttcgagctcacagctttctccccttcctttctcctttccttcctcttctctctcttccaccctttctcctttctcacccgtttcctctcttcttcactctgtccttctctctacctctctctttctctcactgtctctcaacatttgctgaacctctaggtgtgtttacacctggagaataagaaatgcacaacccagggtggggagagtacgtttcaaagacagtggtcgcagaggacggtggtagcgttcttcaggtgtgtggacaaggggagaggaggaggtggaaggtcctgtccagccagctctcatggggcatctttgaaagggcaatttagaagtgagtcttcttatctcatgaccaggcccttgaaggggagcaggacacttctaggggaagagatggcacgtgcagaagcctggagacctgaaatgactgaagacgtgggtcaggaggcaggagataaggttgggagggcagttcttggagtaacttgaggcctagcctcaggtaatttggacttcatcctgtagacaaaggtggacacatgattggctgtgatcatgtgcccgaagcaccctgactcagcttgggatcagggagaggagtttgggtgtggcaggagatgtcatctccagcccaacctttctcaaagtgcactagatggagcagaatcgctggagggcttcttaaacccagaatctctaagccccagcccaggtgcactgactccaaattttgaacatgcaccctccaagggtgattccagggtaccgcttctggggtccttcccatccctgcaggtgaggtcaagctccattgcaaccttggacatccatttgctcagagctgtttgaacaggatgtgggcccatgcctggcttctaggtgac

SEQ ID NO: 72 - DNA, 4001 bp, Homo sapiens
cacctaggctggcaggagggcagtcactggagcccttgaggcctagcaaagagcaggtttgaggaactattcatatggaatttttccattccaccaccacccctctgcttctcaattgaatttaacttcagatcagatctgaggactttcgccagccaaccttggactcagacagaagacaaagaaggattaaaaaaggaaagaaaaaaaaatcagaaataagggccaggcagagggtacagatctgtggtggctcacacctgtaatctcagcactttgggaggccagagcaggaggatcacttgagctcaggggtttaagaccagcctgggcaacaaagtgagactccagtttcaatgaataatacaaaaaattagccgggtgtggtgctactgtagtagtcccagctactcaggagactgaggtgggaggatggcttgagccctgagaggtcaaagctgcaatgagccctatcgcaccactccactccagcctgggcaaaaaagcaagaccctgtctcaaaaaaaaaaaaaaaatcagaaatatggttagagctctcactgagtggcagccgggtgatctagaaagagcgtggcactgggatgcacgcacaggccaggttcgttctggatctaccatgtggtgaatcagaggagaaataagactccactcagacactcagtggaaggaggcaaatggtgctaatactaagaacaaacaaacagctaacatttcccagccctcactatgtgcctgccaggcatcggcctaagcactgcaaatggcatcagactgagggcggctcctcctgcccctatacacacatcctcccctccggccacacctgcctcctccagcacccgcggcattgccaaaacacatttgcctttccacacccatgcccactgccctgacgcccttgccccttgtactcttcctggcaaactcctatccattctttcttcacggggtccctcccaggaaggggtcactctgggctccccagccatctctagaactggagcttcctggagtgggttagtgtccatttctctccaatagcctccgacagagcctcccacagagagggcagtgagactctgtaccaccccaatccctcatccccctgagggagctgccaaggcttccgggcactgccacccttgtgaggtgcccttgtgagtaccacaaggtactcagagcaaagtccggggccccgagcaggctggcatgtgcaaaggaggaagcagatagtgtgctgggtccaaactctgattttggactgtgccagggagtgccaggcggtaagaacagaatttctgcagatcaggcccgtcaagggcacctggagggcacaggtggggacaggagctgcacaatgccagatcccagtgttttttgtgctccagagaggggctagccaagtcattccaggcaagaccaagtcatccaggcgtcagtgagggtgctggctacctcccggaagagaagagagacgaacagaagagaagacgagagaaaagttgtccggagctagacgtgcctaaggagcctggtgttcccaaggctgcgaggtgaacaggggtgggggcggtgggggggacaaaactttgggtgctgccccggggccagggagagcggggcggtacacggctgtggacaggctcagctctgcaccgtgcagggggaggatcaggggccactgttacctctgcagtcgctgccgcccagccggagccccaggccgccaaggatggtctcggactggccctcgctgtacacgaaggccgtgtctatctcggtgtggccgcgctccaggaaggcgcgcgtgactgcggcgctggtgggcgcgtccatgcggcgccccatctccatggcgcccagcaccgtggctggccgggcccgcgacagctgccgggacatgacggcggcaacgggagactgtgacagcccaggagccgcgcgcagcggtcggaagcaccaggctcggagcgggcggcctcgtggctttagagacgggctcgggccccgcccaccggcgggtgcagctgagggcgcggccgaaggtgcccgacgccgcccacgagctcgactccacgctcggctactaggaccttctgcacttgcaccgagcaagcagcgaaatggctgtggcttcgtaccggtgactcgcgtcttggagattttaacactcctcaacgtccccaagggtgagggggtccaagggtggcgactatcccaaaaggcggggactcttcgggcctccctgccccgtcgtccctccttcctcggccttgccccggagctgtcctgggtttctgtctcctcccggagggagcgcttacggggtggggtggacctagggctgtcgcgcctgccgtgtggtcctggagaatgaggcttaccaaaggctcaagacagcgtccccatggagtgacatggttaaagtgttgaaagaaaagaactgttggcattgaattctgtacctaagtgaaaaaaaactgactggctctggtgacttaacgcctgtaatgccaacactttgagagatcaaggcaggaggatcacttgagcccaggagtttgaacccagcctgggcaacatagggaggccctgtctcaaaagaaaaaaaaaaagatagaaaaatggaccagtgcccagcggcagtgagctgtgatagctctactgcactccaccctgggtgacagagggcaaatctgtctccaaatacaaaagaaaaaaaaagaccaatagacagatggaacaaatgaaaaaccaatagcaaaattgatttaaacccaatcatatcaataattacataaatataaatgatgtaaatgctcacaagtaaaaggcagtgattgttagaatggataaaaaagcaaaaccaaactatatggtaaataccagaaagctattcaaatataaaagcagagatagtttaagagcaaaaagatgggaaaagacatacactgacaaaactaaattttaagaagttggaatggctaagtgaatatcagacaaagtagattgcaaaacaaagaatactggcccacacagtgggtgacatactagcccacacctgtaatgttagcactttgggagcctgagaagggaggattgcttaagtccaggagtttgagactagcctgggcaacacagggagatcttatcgctacaacaaaattttaaaaattatcaaattgtggtagcatgcacctgtggtcccagttacttgggaggcagaggtgggagaatcatctacgcctgggaggtcgaagctgcagattgagaccctgtctcaaaacagcaacaacaacaacaactaccaaagacaaagagggacataccataatgacaaagaggtcaattaataaagaagatataattctaaatatatatgcacctaagcatagatcatcaaaatacatgaaaaacaataatggaactaaagaacaagtagataaatacaaaattataattggagatttcaacacaccattctcaatagttgtagaacagttatcagtcataatttacggaaactccgtaaaggtatacaagactcaatgctatgaaccaattccacataaacaacatgaatagaatatccaacaacagcaggatatgcattcttttcaagtgcccatccaccaagatataccatatttggaggcataaaacaagtcttaataaatgtaaaagaggctgggagcggtggttcacgcctgtaatcccagcactttgggaggccaaggcatgtggattaactgaggtcaggagtttgagaccagcctggccaacacagtgaaaccccgtctccactaaaaatacaaaaattagctaggcgtggtggcgtgcccctgtaatctcagctactcaggaggctgaggcaggagaatcacttaaacctggttggtggagagtgcagtaagccgagatcaggccattgcactctagcttgggcaacagagtgagactccatattaaaaataaataaa

SEQ ID NO: 73 - DNA, 4001 bp, Homo sapiens
atcggaaaacagctgggcagtttgttaaacatatacttcttataaagttaaacacacacttaccatatgacccagcaatatcattcctaagttattacccaagacaaatgaaaacacattacacaaagacatgcactctaatgtccagactctttattcgtactaaccaaaagctagaagcagcccaaatgtccaacaagtgattaacagataaactgtgatatatccagaccatgaactactactcaaccataaaaaaaaagctaatgatatacaagacatggatgaatattaacagtattatgctatgtaaaagaaatcagccataaaaaaactatgtactgcatgattccatttatatgaaattctagaaaagcaaaattatagtaacagcagataaagtggttgccagggttaagggatgaggactgggctgcaagggagaacaaaggaacctctcgggttaatgaaaataaccactatatcgttttcagagtgtttgttacactactgtgtatctctggcaaaactcatcaaattatgactttacattgcttaattttattatgtaagttacgacttaataaggctcatttaaaaaataatccataatcacatttaactatgacaacagcttttcaggataggtatttactacagaccttcaaaaaatattaaaatcaatattaggagggaacttgtaaccataaagtagatatacaggaactaaaaggttctgagaatggaacagtcctcatcctactcgacgtggccatgtgggtaaacagtagttgcctagcaactaatctaaactctaaatttctaataaatatattgaccacataagcaggtgatctcacagatgataaaccgctttacatcgaagggttcttcctttaataataaaaaataataatgtgcttaagttatttatctaaagtaggagtgaacaaggtgtattaaacctagatgatgaaaaataaaaatacgaaattaaacataaacatacacacacaaaaaatccttgtcctcatttggccttttacgtcaggactttacttaccaaatttatgggattaatccatgagtttgcgggtgaaccctttccccttttctactttaagccattcccctacaaccattcaaactggcttaattctcttatttatatatttacatgtgattaaatgcatataggatcgtacttttacatatattaaatgattctaaagatatctctccagattacagaacctgtagacaccacagaaaaatacaacactttctgtaacacgctacacacaacataccagaaagtcaaacctaacttaactagattataaatgctcaaaatcaagaattacaaaaaaatcccttaataacaagcaaattcctaacacacgttaaatatatcatttctctcttactagacatagcatgacacagtttaacagtatcagaaaaaagatcaacttctaagacaccactcactgctagcactcttaccaaccgtattatttttggtttgcggagcacttacccctcttctgaacccaaccttctttcacaatggtaacatcgctcatgatgactcccctctgagcccccaacttggagaaatggtactttgtgatatcagctttagggtttggattctctgctgctgctgcccttcccactctctagtgatgactcagcctggaaggaagtattgaagaaagaattttttttccattcttgcaactcacagagcaataacaaacaactaattctttgtaaatgtcttcaactggcctgacctcacataaaagtctggctcttcaaactggggaacttatttattaaatagttctataatgaaagcacttccctagtcttgtgaccaatttcaaatgatagtgaaacttttaacctaagaggttgcaacaaaaaagtcttaagaaaaccagtcacgcctacccaaataatagagaaaatttgtttggtgatgtgtatttgaggtgaagagggaagagaatgaaagttaattgccctaaatccctgtaatttcagaagcaattgtaaattttttgttttttttttttttgaaacggaatctcactctgtcgccaggctggagtacagtggcgcgatctctgctcactgcaacctccacctcccaggttcaagcgattcttctgcctcagcctcccaagcagctgggactacaggtgtgcgccaccacgccctgctaatttttgtatttttagtagaaacggggtttcaccatattggccaggctggtctcaaactcctgacctcatgatccacccgcctcagcctcccaaagtgctgggattacagaagtgagccaccacaaccagtcgtgaatactttaagtgatataaaatacaacgtaccaagaactcatcatttacgtattcttactctgcctgttccaagaaatattttaaggagattaaaaaataattgatttcatattatgtacttattataaagtaaagtgaaacaaagggaatatgaaagtagaaaaaaatatttagtactcaagatgtgccaagaactgttacgggtacttacatctattattcttatgtgatctttataaccttatgaggatactattaattccatttcacagacaaggaaactgaggctcacacagataaaccaacttgctcaatttcaacacacctagtaaatgtggagccaagatctgaacccaggctgtctgactccagagcctgcattccaaaactatactgccttaagataaaaagaagtcagagtaaaggcatacatacttgggaaagatacgtcacaaatttggcatggagctcttgggaagacaatgcaaataacaaaacacaacaggctttcctatttacagtatccaaaaaaaatttttttttgagatggggtttccccccatcatccaggctagagtagagtggcacaatcatagctcactgcagcctccaatgggggtcaagcaatcctcccacctcagcctcctgaggagctggactacaggcaggcatcaccatgcctagctaatttttaaaaaaaatttttgtggagatggggtcccgctatattgtccacgctgcacaaatttttttaaaaagcaaaaaaagttcctcagaagaaatacaacttttcctgggacaaacatcgaatttatcccatgggtcttcttcataagatgtatgcgggaaagtcctcaaaaacaccctcccatatacagcaatgagttttacagggtcattgcttattgtcactctcaaactaaaaaggaaaatgccaacataaaattagtaaatccatttgcacagaaggggaccaaaaaatgtggtccaggtacaccagtgttatgtggtcaagaatcatatcataaattttagataactagaaaaatggatagatggactacacaaacatactctctcaacttggtttgtgataaatgatacatagcagttaagttcagtgttagactcccaacctagcgctaaattagactacaggtcattcttcaatgcaaattaagtgtggagcttaaccatttaacagtcaggaatcaagactaaacattctctagacagcctgactaaatagcctgacaaaagctatgtagctgaatgcaagaccaccagcctcatgtattatgaggtcacaggcagaacctataggtaaggctgagactcctcaaaatcaccatgagtctgttgctgtagagtgtcaaaaagggatattagtttgtaatcccagcactttgggaggccagggcaggaggatcacttatgtccaggagttcaaggccagcctgggcaacatggcaaaacccatctccacaaaaaatacaaaaattagctgggagtggtggcaggcacctgtagtcccagctactcaggaggctgaggtgggaggatcacctgagcccaggaagtctaggctatgctgagtggtgaccgtgcctgggtgctacagtgagaacctgt

SEQ ID NO: 74 - DNA, 4001 bp, Homo sapiens
atgtggagatagcaacagcttacattgtgttagaactgtcaaaataaatccacaaccatcatctcatttaaccctcaaaaccatcttgtgaaagcagattttagagattagtaaagtaaaactcaaaaaggttcaagtgatttgccatccccctccaaaaaaagtagaataatataaatacgtttaaaaagtaaatcaaaaaagcctttataaagcactgaaatctgaaaatgctttcgtaatttataacaggagaatgacattgaaagaaattacacttgacaatacaaatggtcaggcacatcggaaaacagctgggcagtttgttaaacatatacttcttataaagttaaacacacacttaccatatgacccagcaatatcattcctaagttattacccaagacaaatgaaaacacattacacaaagacatgcactctaatgtccagactctttattcgtactaaccaaaagctagaagcagcccaaatgtccaacaagtgattaacagataaactgtgatatatccagaccatgaactactactcaaccataaaaaaaaagctaatgatatacaagacatggatgaatattaacagtattatgctatgtaaaagaaatcagccataaaaaaactatgtactgcatgattccatttatatgaaattctagaaaagcaaaattatagtaacagcagataaagtggttgccagggttaagggatgaggactgggctgcaagggagaacaaaggaacctctcgggttaatgaaaataaccactatatcgttttcagagtgtttgttacactactgtgtatctctggcaaaactcatcaaattatgactttacattgcttaattttattatgtaagttacgacttaataaggctcatttaaaaaataatccataatcacatttaactatgacaacagcttttcaggataggtatttactacagaccttcaaaaaatattaaaatcaatattaggagggaacttgtaaccataaagtagatatacaggaactaaaaggttctgagaatggaacagtcctcatcctactcgacgtggccatgtgggtaaacagtagttgcctagcaactaatctaaactctaaatttctaataaatatattgaccacataagcaggtgatctcacagatgataaaccgctttacatcgaagggttcttcctttaataataaaaaataataatgtgcttaagttatttatctaaagtaggagtgaacaaggtgtattaaacctagatgatgaaaaataaaaatacgaaattaaacataaacatacacacacaaaaaatccttgtcctcatttggccttttacgtcaggactttacttaccaaatttatgggattaatccatgagtttgcgggtgaaccctttccccttttctactttaagccattcccctacaaccattcaaactggcttaattctcttatttatatatttacatgtgattaaatgcatataggatcgtacttttacatatattaaatgattctaaagatatctctccagattacagaacctgtagacaccacagaaaaatacaacactttctgtaacacgctacacacaacataccagaaagtcaaacctaacttaactagattataaatgctcaaaatcaagaattacaaaaaaatcccttaataacaagcaaattcctaacacacgttaaatatatcatttctctcttactagacatagcatgacacagtttaacagtatcagaaaaaagatcaacttctaagacaccactcactgctagcactcttaccaaccgtattatttttggtttgcggagcacttacccctcttctgaacccaaccttctttcacaatggtaacatcgctcatgatgactcccctctgagcccccaacttggagaaatggtactttgtgatatcagctttagggtttggattctctgctgctgctgcccttcccactctctagtgatgactcagcctggaaggaagtattgaagaaagaattttttttccattcttgcaactcacagagcaataacaaacaactaattctttgtaaatgtcttcaactggcctgacctcacataaaagtctggctcttcaaactggggaacttatttattaaatagttctataatgaaagcacttccctagtcttgtgaccaatttcaaatgatagtgaaacttttaacctaagaggttgcaacaaaaaagtcttaagaaaaccagtcacgcctacccaaataatagagaaaatttgtttggtgatgtgtatttgaggtgaagagggaagagaatgaaagttaattgccctaaatccctgtaatttcagaagcaattgtaaattttttgttttttttttttttgaaacggaatctcactctgtcgccaggctggagtacagtggcgcgatctctgctcactgcaacctccacctcccaggttcaagcgattcttctgcctcagcctcccaagcagctgggactacaggtgtgcgccaccacgccctgctaatttttgtatttttagtagaaacggggtttcaccatattggccaggctggtctcaaactcctgacctcatgatccacccgcctcagcctcccaaagtgctgggattacagaagtgagccaccacaaccagtcgtgaatactttaagtgatataaaatacaacgtaccaagaactcatcatttacgtattcttactctgcctgttccaagaaatattttaaggagattaaaaaataattgatttcatattatgtacttattataaagtaaagtgaaacaaagggaatatgaaagtagaaaaaaatatttagtactcaagatgtgccaagaactgttacgggtacttacatctattattcttatgtgatctttataaccttatgaggatactattaattccatttcacagacaaggaaactgaggctcacacagataaaccaacttgctcaatttcaacacacctagtaaatgtggagccaagatctgaacccaggctgtctgactccagagcctgcattccaaaactatactgccttaagataaaaagaagtcagagtaaaggcatacatacttgggaaagatacgtcacaaatttggcatggagctcttgggaagacaatgcaaataacaaaacacaacaggctttcctatttacagtatccaaaaaaaatttttttttgagatggggtttccccccatcatccaggctagagtagagtggcacaatcatagctcactgcagcctccaatgggggtcaagcaatcctcccacctcagcctcctgaggagctggactacaggcaggcatcaccatgcctagctaatttttaaaaaaaatttttgtggagatggggtcccgctatattgtccacgctgcacaaatttttttaaaaagcaaaaaaagttcctcagaagaaatacaacttttcctgggacaaacatcgaatttatcccatgggtcttcttcataagatgtatgcgggaaagtcctcaaaaacaccctcccatatacagcaatgagttttacagggtcattgcttattgtcactctcaaactaaaaaggaaaatgccaacataaaattagtaaatccatttgcacagaaggggaccaaaaaatgtggtccaggtacaccagtgttatgtggtcaagaatcatatcataaattttagataactagaaaaatggatagatggactacacaaacatactctctcaacttggtttgtgataaatgatacatagcagttaagttcagtgttagactcccaacctagcgctaaattagactacaggtcattcttcaatgcaaattaagtgtggagcttaaccatttaacagtcaggaatcaagactaaacattctctagacagcctgactaaatagcctgacaaaagctatgtagctgaatgcaagaccaccagcctcatgtattatgaggtcacaggcagaacctataggtaaggc

SEQ ID NO: 75 - DNA, 4001 bp, Homo sapiens
caaatgtaatttcagtcatatatctctgatggcagatcgtttcccatgataatacaggaatgagacagtacttaccggctcggtgttaggcccatggtgcttgattgcttgataatcattattgttatcatgggcttatcttttagaatatggattgctttctactagatattggagggttttcctatgcatttctcccctattaagccgaaaactcctcaaaggccccaccccatgtaaattccctgggtacccctcatctctagggtgtttggcagagcaccagctcacagtaggcactcagtaaacacaggactctataagctccatcttcctgagtctcagagtgcagggaaggcctgcaaacgggatcacacagggagtatggcaagtgtggccccagtctcagcctagaagaggaacccctctgtcccatgtcctcttcctgcgccctttcctatcccctcttcacccacagaggacacacagcagtgttgcaactcacttgtgctcagagcaccaccatgccatcccttgggggaagggagagggccactgattaactcagaaagggcacagctcatcaggaaagacactgccactaacagccccaggggtcaagcaaacaaacctcaaatgggagggggggctgatccacaggtgggcagccccaccagactaggaacccctctggggcagggtctgtgtcccacctacctctccaaacctagctccgagctggaggggctctgagaatatttgtcattgagtgggcaagggtccaggcacctggctccacaatgtcaggtttgcaaatcgggatttgaagggcaggtccacccctgaactgctcctgggtttcttcattatttggaataatgacctgcctcacaggagtgagaagtttaaatagaggtgataatgatgatgatcgtggcaataataataaccgggcgctgcctttgtgctgggcactgttcagtgcactccccatgtattaactcatttaatcctcataagacacctgccaattgcccggccagcatttggttcattataagcactctataaatatgattattccacctacaagaagaaaggaatccttttttctgtccaacatttaacttgaaaaaaaaaaaaaaaaacgggcggcggggtgtgtggggagcggaaaagagagaggtagaaatcctggtagaaggagaggactcggggaatccggggcgggatggggacactgaacgtgagacgagggtggggaagtgagatgtgtggtgtgctaaaaatagaagggcccctcaggggaagccagcaaattgcgaagatccagtattaggagtgaggtgagtgactacagaggctactttccgagcgtgggaaccggcagggccaccgaggcaccctactcggtcgcaggattcgggaagaggggtcccctcgctaaaggaaggtgactacctgagggaggaggctaagggatctcagtgggagaaaggcctgggtgggggtcggaggggagcccctgaggaacccggcgttgaccgaggcagcttgggggtccggcagggagggagtgcggcgcgggggacgcccagtgactctcaggctcccgggccccaggcgcgcgctcgggccgccccgggccccgtgctcactcacccggccccggtccaggggcgggacagcagggcgcggcggagcgcgggcgccggcagcagcatctcgggttagaagcggggctgttcgctggatcgtccgcccgggcgcggcgagaatgcacaaccccgtccagagcgcaccacctcgatcctcggggggaaacggatcaccccggctgtcctccgagctcgggatcagccaaagtcccactatatttagcttcggctaataaaaaatatttctagtgccataacgggggcattacacaacacaggacaagggaacccgaaagcgaagtcctgaaatgcatgcgttttcccctcctctctttatggtatgacccgggagagagggcgtgaactctgtcgaccagtcagagtgacacaccaaagcttctgaaccaatcagcggggcggtcctgcggcagccttccaaagcggagcagagaggggctgaatagagccaatgagataaccgaaatgggacacgtgctgaagcggggcagaaggactcgctgcgtccggccctctggcgtgcgccccgggttcgatgggagtccgactgacttctctcgggctgccggtggcttgtacaaggctggaaacctgtccgctaccagactcctcgaccccgcagggccacagcgcggccagccccctgcttcttcccgggggctgcggcccctggaatgagcctgccttccagcttcttggccaggacccagccgctctccacctaccctccaggcgcggggccggccagcttcttagcttccttgcagattacgatcaatgcaagataaaacctgagctggccaacgcttagcttttcatttaaagcctttggccgcaaaaccagttgttcctgagccttttacccccaagtaaaaatttcagctttctttgcaaaatgttgtgtgcttggtaaacactagaatgctatttaaaacttggattctgaagtcttctctgatgacgaggtctcagggacccaatctattcctaaagtaatgttacgtttccttactctctgttctaatttgtttatatttcttccagcagcatgaaccgcgcacctgcttaggagtcagttcccatgctgattttggttcctcaagcagggcactaggcagactacatatcctttccgggcctcagtttcctcatctgtaaaacggaagtaatagtacccaactcacaaagcccccgtgatcttaagccacttatttttctccagattacaccatttgaggtactttgggagaatgtaaacatttaaatgaagagtaggagagggagattacctaaatgccaagtattaggaatggcaaaaagcaaattggaattggtggcggctatttgtcttcacctttggagaaaaccctagacaggtgggctcagttcacatttgggcaatgttgccctgaacatgcccattgacaagaaaaactagaacattggttactgtcaaatccagagcctgggaaggtgacctcctgtgggcacgttggagagcctggaaaaatgggggctttgtggttaaaaggacatcagttccaaaccaggccaagccagttactgagcctgtgatgtctcatgtcctctcttccccttcagtaaaatgtgtgtaatgattcctgctttgtcatcttccaaagcttttattgtgagctacaaatgtaacaggtgatatgaaatcccctattttatggctaattaactaatgagtttgagggtttctgtggccttccgtcctcctacccctcccccaacaccagattcatcttctgtttaaaaacaaaaacaaaaaaaagcaccatcagttctaagacatttcactttatttaaaagaagccaatatacaggatataaagggcatgatatttacaacagtacagtaaacaggttggtttccggtaggatcagtagtctttccatgagtataaatcccccccttccctgtgatgctagacccagctggcagacaacagcaacggtggggcaggatcatggggtataaagtctccctgggtggggctaaaaatcaggtagatgcaaaaacatccacaaggggtcttgcagggaagggctttgcctcatttctttgagggcttgggagggaagggtcttggtgagggatttgctcagaactaacacacagcccaccctgagcctggaaatcatccattcatagaaaattcccttccagagagaatctggctttacctgcacccacccagtcccctccagactccccactccaggagagagctcttctagagccagagcttggtgtctcaagggggaagacccctgtcctaggaaacccccagcaccctg

SEQ ID NO: 76 - DNA, 4001 bp, Homo sapiens
cttgccctgtttgcaaaagggctgaccttttattctccctcaaatcacagacctatgagtttcctggcccacgtaaagtgcatgccagtttctggatggataaactccaagcatgggggcttcttaggccaatgccatctgaggtgctcggggcccggggcccagctttttgtcattagctcccaaacccccttggcaagaaatctatgaggaataacagaagatgctgtgtggccccctcatggcctttcttgcccagacacaggatgccgctatgggctggatgcagtgtgggtgccgtcctttgctttgggagttttactggtccacagaattcaaaatctggggtggggaggggcactataaaggccttgaagtcagagcccacacattataagcttacgagctgtcagagaaagaggtcacatattcaggggaggggctgagctctgcccacccgctggacataccgacacttggtactgcacgtccgacgtccacacctcctcatcccccaccacgcatgggatggcttccatccggcccttcaggtccttcaaggcctggggagagggacaagagtgggtatggtcaccgccttcctcgcttcctcccatctaaaaccctaacgcagagtccacagacggaggtgcccaggcaatacagaaatgagaagggggccaggccaggtcggtggccatcagagaacatgtgctgccctcggggacagccggactctgctccagccattgtcaccctgcaggaaggtgaggtctacccatgacacagagataaaaaaactgcacctgaaacttatatgaaatctcatgatttttaaaatgctggcaattaactggaaaacatgtttaactataaaacaactaggtttatgacatctgacctggcctgagaagccccagagtagctccaggctgccaccttggtcctcccagctgttcccacactccagacccacagccctcccaggcttccacccaaggctgggagcaagggtagaagcgggtgatggctgcaggcacggggcgctatctcagggctgctggggatggcctctgctccatgccctgcacctctcgggtgcctcccaccctcccattaccttttgcagggcatctcgctcagggctgccctgcgtgaaggctaagacgggctcgttggccaccttcagggaggaggtgtgcttccaccgcaggctggaacacaagggcaggggacagaggcagagaggtcagcagcggccccaccaccagaccccagcccctctacctccgacagggggtcctaggtgggcacccagagcctgaaatccaatgcaactagaaagtggggggtcaaaaccccaccttgggctgggcatggtggctcacacctgtaatcccagcactttgggagaccaaggcgggcaaatcacttgaggtcaggagttcgagaccagcctggccaacacggtgaaatcccgtctctactaaaaatattttaaacgttagccaggtgtggtggcatgtgtgcctgtagtctgagctactcaggaggctgaggcaagagaattgcttgaacccaggaggcagaggttgcagtgagccgagatcgtgccactgcactccagcctgggtgagagagcgaaaaactccatctcaaaacaacaacaaaaacccaccttgggggtccacaacccaaggttcaagtcccagtcccacggttgtgtgtccttgagcctgtgagttgcctcctgtgaacgtggttctacgtctatcaagtaagaataatcgcaccgaactcacgcggttgtttgaagtttaaacacacagatgcaaaaccacgttgaagtattttccacatgcaaagcgttactctccctttcttctcccacaaggcaggctttatcccaaaaagacccaaactcctctctctaagctgaaagggcagcacattccagaacacagtctcagaatgtgaaccagctgagatccccttggcacaaagggctgagagctctggctgggcaggaatgtccaagatgtggaccatgaacttggagagctgccctgagctcagctcacagccccgggagggctggccctgggggtgaggtgcctgattccaggacactgagtctcaagaactccttgctcaaatcctctgacctctttccaccaccccctaccacatctgagggtcacaaggtgggaggtcaggtggctcaaagctaggacgctggggtcagtcattccagagctggagcctcagccctgccacctcccagctgtggggcttccccttcaggcctgtttccccctctgtaaatgagaagaatgatgatgacaaagtcaactaatgcccaaagggcacttgaaattgacaaacttcccatctaccgtggcataggacgggcctcaccagccacctctctacagaaataaggtcattttggtcctaaaaggaaaatgactagttcaagatcaagagtaggggaaacctgcacttgagtccagaaggcccagataccatctctctctggtgtcaatggccccagacaacccgaacagctggaagtgcacaggtggggttcactggtcggcgcaatgagggaaaacacacagcgtagggaaccacagggcatctcagtaagatgctgttaggaaacccatggggtttggcagggtgacttggggagggtttaaggaagccacggttagctctggattggctgccatcagaaagtgggggtgaggctgactgggaaaaaaggaacatttaccaagatgtgcagagctttgtgggtggcacagagaccttgtttttgtccgtgcttagacaaaaatcatgaagagaaggcccggcatggtggctcacacctgtaatcacaggactttgggaggccaaggtgggcggatcacttgaggtcaggagtgtgagaccagcctggccaatatggtaaaaccccgtctctactaaaaatacaaaaattagctgggcgtagtggcccactcctgtactcccagctacttgggaggctgaggcagaagaatcacatgaacccgggaggcagaggttgcagtgagctgagatcacgccactgcactccagcctggatgacagagcaagattccatctcaaggaaaaaaaaaaaaatcaggaagagggcttattgtgtctcatctgatcatggtctcagagggacgtggcctgaggctagtgttctgcgggattgtttttgccctatgggagacagactggcccggctatgagtgtcgggggccagaaggagtctggggctcaaagacccagcctgggaagcctgaaggaaggacacaaaaccaaaggagtgtggccaggccctgtgttcattccacttgacttgaggttgactgaggacctgctgggtctctggtgccgtctcagaccctggagataaagcagtgacagagacagcgaggcccctggctgcacacaggtgaccttcagtgtgaggcctggtcaggaaataagcaaggtaaccgcagatggtgagcatggcaaacaagggggagaatagggctgcttcagccagggtggtcagggaaggcctctctgaggaggtgaccctgagagggacttaaaggaggcttgagaggagctgggaagagcatcccaggtagaaggaggcgggggggggctgagaggggcctgcgtggtagagggagagggagaggcaggggcagggcacccaagatcctgacaggtaaagtgagcacataggaccttctctccactcccctcccctccccaccaacctccaccctgagccggtagctctgcactccccacccccactctgcctcccactagctgtgtgaccttgggcaagtcacatgtcttgaagccagtttccctccctccctaaaacactgacaccccctcatggggttaatatggagatttgataacgataaatacattaaaatctgcacggccctcttccatctaccatcatgagaaga

SEQ ID NO: 77 - DNA, 4001 bp, Homo sapiens
tagcccaaggactgtactgcctctaccaacaagaattctttaagtttgccaactcagcaaatcctcttcacaagaactcctgggactctttccagggagatttcacaaatctgcaatttctgttacaaacttgaatagccagctggtaaaggcggtggctgaggatcacacacactgtaggcaattaaagcaaagagcaatttttctttcttttgtatcaggattaagtcggggtagagaagctgtttcctcctatataaagaagagatgtgataatgccttctggctctgccaagtcactgctctgtggtttagtgtggatggtcaaatactaaattctccagtcccctgcaaatcagttttattgctctggctacattttacacaaaatatttacatttttctccccacatatattccataaaacccagcaaaataaacacaacacaaaaccaaaacaaaaagccccttcttccttatctctgtgaccttcagagttcccagagtaaatccagtgcctagcacagtgcttagcacacattaagcactggattaaaaagttttatttcagcaagatgaataaattgtggagagctcacgtagaccatggtgactatggttaccaatactgcatcatatacttgaaatttgctaaaagaatagatcttaaatatttcactatccaaaaaaagccattaactatgcagaagcaatggataattagattgaccgtggtaaccattttgcaaggtatacatacattacaacacgttttacaccttaagtatatacaatttttatttgttaattatacttcaataaagctggggaagaaagtactgaataaaggtggggttttttcctttcccaattctgattaatgtgcagaaatattttaatattagaatgtggagacaaagtcctcattcgtagtcattagaaactatctgtgagcgttccttcattcccagcacaaatgattatcttccccacaaccccgccccgttcttttagaattcctctcctatgcacacatttgaagacaataatacatcagtcctggttttaaaagggggaacagttggctgggcttggtggctcacggctgtaatcccagcactttgggaggctgaggcgggaggatcacctaagctcaggagttcgagaccagcctgagtaacatgctgaaaacccgtctctactaaaaatacaaaaattagccggacatggtggtgggagcctgtaatcccagctaccagggaggctgaggcgggagaagcacttgagcccgtaaggtagagggcgcagtgagctctgagatggtgcccctgcactccagcctgggcgacagagtgagaccctgtctcaaaacaaacaaaaaacaaacaaacaaacaaaacaaacaaaaaaggaagttaacagaggcacgacttcccccaccagtactttgcgaactctgttctggcccgggtaaaacaactcacgatcctaccacgcaactcatcagctttgcttttcctccctacccatccctgcccggaggcactcgcgttgccccagaatcgctagttgcctacacacacaaccttagactctccactgtcactgtcttgtgctcaagtcaacgctgcagaacacaggaaacgggggctggccgggaaatccgcgcatccggccccagggcgccccagcctccccggctcgttgcagttaccggttgctggctcgaaagctttctcggtaccggaggcgtccgccggctccacgcgggccccgccgcggtaattgagcggctgcgacacgacgaaggtgccagtgctcatggcggcgacaggagagggccgaagactgcgaagaagcggggagagcgcggccaggcctgctcggagaaacatgagtggcggacgcagctccgcggcagaggctgacgggccgcgggaggggcggggccgcgggaggggcggggccgcgggatcggttctaggagattttaggggcagtcactcgattcctctgcggtccaggccaggccctcccctcgccaggagggtggagcaagacaccacattctccccaccaccccgccataccccacacagtctccaggcgggaagaggacttccttcttcgtgatcaatatttgcgtagcactttgcaagtgttttcgggttcatcattgcatgtaagcatcctaggatcccattcttaatcctatcgcctgaagaaggcagaggattggagtgccaagagtctttggtggttacttcactgctaaaccaccgtttctgtaattgtataatgctttttaaagggtgacagtaaaaagcaaggggactgtgaacgagatagatgatattgtgatctgaaactgctttttaaattcttaaagagagactgggcgctgtggctctcaccaaggctggaggatcgcttgagcccaggagtttgcgggcaacagagagagatcccgtgtctataaaaaaataaaataaaaataataaaaattgggccgggcgcggtggctcacgcctgtaatcctagcactttgggaggccaaggcgggcagatcacctgaggtcaggagttcgagaccagcctgaccaaaatggtaaaaccccgtctctactaaaaatacaaaaattagctgggtgtggtggcgggcgcctgtaatcccagctacttgggaggctgaggtgggaaaatcgcttgaacccgggagacgggttgcagtgagccgagactatgccattgcactccagtctgggtgacaagagtgaaactcagaaaaaaaaaaaattatccaggtgtggtggcacacgcctgtggccccaggtacttgggcggctaaggtgggaggatcccctgagccccgggggtccaagcttgcagtgagctataatcgtgccactgcactcaggcctgggcaacagagcgagaccctgtctcaaaataaataaattctgaaggagcaatgtaaatgctattaatgacaaatattgatagaaacagaagcctaacatacagaatacgaagagcaaaggccacaggaaaaagtgtcaggaaacaaaatgccttctgtaagacaaagcagccacccagaggcactcacaggtctgtcagctgagggatcttgcacaaaggttcattcttctcaccaaacttccatgcacctccagtagagactttgacaaacagaaagtaattggcaatttggacatttcttttaggattgtttctcttctgggggctgctgtctttctcaatgttttttcctttacctgccagctcaccagcgcaatattagggagtgtggttttcaggtttagagtatatataatgtattctgatcaagttttctggcactctataccagtttgttcactttttcagtgctactgagatgtgtaggtcttggtcctcagatggaaacagcagtgcccaaactcagaatacctgaggccacactcacatattattttattattgtccattgcaaacagaattgaaacatatcaggagttggtgacgagcagcactatagatttccaagatcactgaatggtcatttaggtacagaaactatacgtctcaaattttatgggacaatttctatttaaaagattctgtccccaaccaatgcattttgacttgtcacatcataattcctgatgtttgttttggaaatgtggtcgtgatgtctattgaattaattcatagatgataagactgacaaacctctggccaggcacaggactcacacctgtaatctcaacactttgggagaccgtggcaggaggatcgcttgaggccaggagttcaagaccagcctgggcaacatagtgagactctgtctctacaaaatatttttaaaaattagccgagcatggtggcacaagcgtgtagtcctgactactcaagagactgaggtggaggattgcttgaggccaggagttcaagactggagtgagcgatcatggcaccactgctccagcctgggcaac

SEQ ID NO: 78 - DNA, 4001 bp, Homo sapiens
gctggtctccaactcctaagctcaagcaatccgcctgtatcggcctcccaaattgctgagattacaggtgtgaaccatcacgcccggcctaaacactttaaatatgatcctatttaatctctcctgtcctctctcaacccatgtagaaacagaaggttcagcgaggttaactaattgcctgagatccccaaggtagtaagtggcagaaatgtgattcatgtgtggtgttatgacaacctagaggcctgtggtcttaacccctacatgatatcaacagtggagtagcagcaattgctttataaagcaggattttaggccaggggtggctcacgtctgcaaccccagcactttgggatgctgaggcaggaggatcacttgaggtcggaagttcaagaccagccttggtcaacatggtgaaacactgtctgtactaaaaatacaaaaattagctgagtgtggtggtgcgcctgtaatcccagctactcgggaggctgaggcaggagaatggcttgaatttgggaggtggagttgcagtgagctgagactgcgccactgccctccagcctgggcaacagcgtgagactctgtataaaaaagaaaaaaagcaagattttaaatactctttacaatctggactcagtttacctccctacattgaactctacacgatagtgttctctcaactctggtcattccaagtgttatcaccttcttttcacatcctcccagccctcgaaaccctggctgtccctcatctgactaattctgggtcatctttcaagtttcagtttagcatcatttcttccaggaagctgtctgttttttaagacctgataaagtagtgcccttcctgaagactgccatagcaatttgtacttcttacacaattattacaagattatagcatttatctcattgtggcaaatactcattttgatttattttctgttagtttttttgtattctctatttcatttactgctgtatctttgcatctctcacaggacttagcacggagtcagcactccgtggcaagtaatgttagtcagttttgttatttccagaggttagtttagtgtttggtctttctaacagctcaaaacagattaagtgaataaagtaatgcgttatacttgaacataaacttagtacatttactcatactatacatgttctatctggatgcaatctcctgccatacccaaatgtttacattgtgtctgtgtgtgtctgtctgtccctgtcaaatatgtgtatttaaaattgtaagcacctacagagttggtggatttagattgtattacctgacaggtcagtgtgttgctcacactctgccaccgcgtgtgtattgttctacagcccgtagatcattgtttttatcctcttggactttgtatatttataaatgtgacaattcattttgcctcatttgtcatgtagcattcgtgtttcctaaactaaatacgcaatacctagattaataatgcacaacagccatacggggaaactgcatgtttgcatcaaaaggcttctacgttctctgttcactaattgtttgaaaaatatacgctacagagagtcttaattatagacaagtgtaaattacttgtcataaaaaaaacctctgggccgcgtcagcaaaccagcccctaccctggctggactgcccggttccggcaaggcagagaaactacaaatctctgcatgcaacactccaagaagtgctaagggtaccagggaagagcgtcgcggtgcactctggggtttgtagtgaccaacccaagtccgacagtcgcctcctcgatacttaccggacccagccactaccaagatactgagagactcccggggcgtaacgtccatggaacgaagcactacccatattcgcaggattaggaaaaccgccacagctcctgcggccgcagctagaacgagaacgcacaccatgcagagaaacggcgcatgcgtccaacttccggggaccagccgctgtcaaagttcacaactacgggtgccgaagcgactcaaacgcggaggacgcacgtcttggtgggctggtctttcctgagctgggaggagtggaggcgacggagaagctgaggtcccagtcacaatccattttacctcatttatcatgtagtattcgtgtttcctaaactaaatacgcaatacctagattaataatgcacaacagccatacagggaaactgcatattagcgttaaaaggtttctacgttctgtacgttcacgtttgtcagcggaacccctgcttctgcgcggattgtgcgcagctgcagccaagcgtaagctgaaaattgtaaagttaagcgctggggaagcttgatttacgcccacgacgaggtcaggcagtctctgcgccctaaaggtcccgaaactccccagttaggaggtgttctggctctgtcaacttcgtgaatgccacctgaagctaagggaatacatcctttctttctttctttttttttttttaatgccaagagaaatgtttctgttgcacacagacattactgaaagtgttcgccagtaaggaccctaggcttaaacatcgaatttagggccctcatccaaaccccctgtctcccaacatgtatgtttttaacttttctcgaggttttcacagctctcagtgtgaccagagtagttgagggtgaccacctaaaggtaagccacactcctaagaggattgcaaagctcagtggctctaggtagcaggatagacaaggcacagtcctacaattaatattcagttaattttatcacaaagcatttccagtgtgtttctcatgtcctcagccaaaatgatgatctgccaacacccccttcaatctcaattttgcttatgtctaattaattaattgttaataaattaattatgtctaattaatccacattacgacaacataaaatactaagatcaggagccccttcaccccaaatataatttgccttcggtccaccatagacctacctgtaggttatattgaacaggtatacagatgagtaaaaaggttcagaaaggtgcaactgcttgcccaagtggaatagcgtcagatctagaatcagaaaccagaaatctgagtcctgctggacaggagtactgcatcctgtattcctttgctaaattcaaacttgcctgatcaccacacttacctggagcctagaatgtgttattaaaggtgcagactcccagggtccattaggaaacactgaatcagaatttccggggatcgggcacctgggattagcttatgtaaccagcgtgtccattcctatcagcaagcaagtttgggagactttgtgagtagagtccgtggaccttacaacactttccaaattgtcttccatcaaatcttctttcttttcttttcttttctttttttttttttttgagacagagtctcactctgtcgcttggctggagtgcagtggcacaatcttggctcactgcaacccccacctcccaggttcaagcgattctcctgcctcagcctcccaagtagctgggactacaggcatgcaccaccatgcctggctattttttttttttttttttttagtagagacagagtttcaccatgttggccaggctggtctcgaactcctaacctcaggtgatctgcccgcctctacctcccaaagtgctgggattacaggcatgagccactgcgcccggctccatcaaatcttcttaactatacattctcgcagtaagaccttaaagtggatattagttccctttttacagacaaagaagtagattccataaaagttaaataatttgcctaagtctacttagctagtaagggtggagaaagttcatagttgtggacttagaagtcagtgtctctcaaattttaatggaatcagaattctctgggcttacaaatgcgtagttggaagtccagaggtagggtctttggtgtagtaagaaaaacagctcaaggataatacaaggagtatcatttacttgtatatgccc

SEQ ID NO: 79 - DNA, 4001 bp, Homo sapiens
atggcacaatatcggctcaccgcaacctctgcctcctgggttcaagcgattgtcttccctcagcctcccaggtagttgggattacaggcacccaccaccacgcctggctaatttttgtattgttagtagagacggggtttcaccagattggccaggctgatcttgaactcctgacctcaggtgatccaccctccttggtctcccaaagtgctgggattacaggcgtgagccactgcacccggccctaattattttcttatttaaaataaaaacatcacgggataactccagaactgattggaatggctaatcttttgtcattgatgccaaatctcaaatcatcccctcagaaagatcatccctgactatcctactaaagcttcctccccttactgtttgtatcattaccttcaatttgcttcctaattcttttcactaacaggatttgtattttcacatgacatggtgcaatctcacacacataattttcagtataaatgctggacaccaaagaatacatatcatatggttccatgaaaggttcataaataggcaaaactaatctatggtgttaaaaatcaggaaagaggttacctttggggaggaaagaagggatggtggttgggaggggtgcccagagaggtgttctgaaatgctgtgaatcttccttcttgatttgagtagtggttaggaaatgtgttgactttaggataaattaacaagttacaacttataatttgcgtacagtatttttctatatggtatattccaatttaaaaagcataaaaggggctgggcgcagtggttcacccctgtaatcccagcactttgggaggccgaggcaggtggatcacctgaggtcaggagttcgagaccagcctggtcaacatggtgaaaccccatctctactaaaaatacaaaaattagctgggcgtggtggtgcgttcctgtaatcccagctactcgtgaggctgaggcaggaaaatcgctcgaacccgggaggcagaggttgcagtgagccaagatcgtgccactgcactccagcctgggcgacagagcaagactctgtctcaattaaaaaaaaaaaaagtgtaaaaggaaattacttggatgtgttgactaaaggctccctgtgagcagggatcctcctgtcttagtcgttgctctctgttccccacttgtagaacagtgttagcagaaggcaggtacccaagaagtatttgctgaatggagctgtgtgcgtctgtgtgtacgaagcggggaggtaccctaattttactgagccctgtgtggttaaagatattatgcgaggcttttaacgactctcttctgcttaaaccagaaaaagggttatttgcgactttttccacctgtaaatcagaaaacagtaattttctaacccatccactggccacgaagttgctaggcaggcagtagatgcgcttttcgtcctcctttgccctgacggtgcatctcgacaaatgccaagcccgccgtccccatcccagaaccgactttgctccttttagtctgaaaggtccttccaccgcagtggacacaacaccggggagtgcagctatcccgggcgtgtatatggggcgaaagggatcccttctcgcgtttctccgcccctcctcttgagggccaggccctcagaaccgcaaggacaagggtgccaggaccgccccagcctgcaagtgccaccactatcaccgcgtcccctcacccgacccacaagcgaccctgcaggaagggctggggaggcctcgcgtcgcgtccctgggagtggagcggagctgggagacgggtcgccagctctgcgccggctcgtggcgcgtccgagcccccggcacctccccacactggcctggggtccggaacctccgggatcccatgctcttaccccgccgcccgccggccgctgggattcgcgcctgccgtgggtcccaggaaggcgcatgcgcgctcgcccccgcggcggactgcccctccggccttccgcctccgtgtgcccgcgcaccacccgcgcgcccggtgcgggagcgagcccgtcgagcgtgaggggaggggcgggcaacctggcctggacaggaggcggccggcttaggaggcggggcaagagccgatggaacccgagaggtccccagccccgggttaggctaggggcaggtggaaagccccttgctcttctttcctgggatcgtggccaaggccggagcggctgcttagccaacggattcctgtcaggggcgggccctggcttgctgcactgagcagagagccttggccggtcctcaccacctctgggcctgtgccctcgaggagccagaaagccaacctgcttcactttcttctagccacatgcctgcgaagaagaagactgggcagccccctaaagtaagaaacattgaacatccaaccatttgcgagagcctgtgcgttgtgcaaaaggacagccctgccctcgagtagccactacacgtgccccagcgggcagcttgaatcacctggtcccaaacttgccaaaaatacctatctagtaagttagtaagacctgcacacttttccttttgcattgatcccttcctttccagttccactatttccatctcagtctaggcttctgtccaatcacgcatggacggctgtgatgatttttacttgccttcctttgttcagagagtgccctcattccccacttctgaatcttgccattctacgtaagccaacccctataatttgtaagtgttagcaaatatttggctaggactatggctttctactgagtctgaataacttctctctgggcctcagtttcttcaactgtgaaagaaatcagtagggctaggtgaacttccaggtctaaaatatgattatatctaaaagaccatcagcactgggaatatggagaaatatggcaggtccctgccctcaaggcatttaattctcattggaaagacatttttatgcataaaaggataaaaagctatagaaggaaacacatactaaatgttacattacttacatatgcactaagcactgtaggagttaggagaagagggttcactgtaaactgcaaaccatcaggaaatgcttttcctggaggagtcagctgagctttgaaggaaagcctggctggataagcccagagaatgagagtaagaatctagacaaaggaaatggttcaagccaaatattgtggcagctgaaaagtgtagaacatttcctctagtttaggtggtgggtgatgaagctggaaaggactggtaattgtagagagccttgaataccaggctatggtgtctggaatgtatccagtgatcagtaaggggctattaaatgacttttagcagggagtcaagtatacagtacagttacagtgttagagaaaacttaaagtggtgaaaatggatcagatgaatcagagggagactatagcagtccacgcatgattagacaagggcttggactgagatggcaatagtggaactgcaaagggagagatcaatgcaagaagaaacatgtacaggtcttttttttttttttctgagacgcagtttcgctcttgttctcttgttgcccaggctggggagcaatggcacgatctcggctcaccacaacctccacctcccgggttcaagcaattctcctgcctcagcctcccgagtagctgggattacaggcatgcaccaccacacctggctaattttgtatgtttagtagacatagggtttctctgtgttggtcaggctagtctcgaactcctgacctcaggtgatctgcctgcctcggcctcccaaagtgctgggattacaggcgtgagctgctgcacctggcctcgtgtacaggtcttaatagcatactagatatgtacaagtgaaacaaaggagagggaagaatcaaggatggctcccaaggtttcaagtgtgcattacagttcccaagaactgatagatcttgggaagcctggagaataatctggcttggagggaaagatggtt

SEQ ID NO: 80 - DNA, 4001 bp, Homo sapiens
aggccgaggcacagagagggaacagaactgatcccaggtcccacagcaaggctgcctttgctaaagtgagggccaaaggttggccaatccattttacaggtgattgcgtcttaatctccttccttatgaatagcttgatttcaagtctacactgtgaattctgacagtttcaaagcctgaaagaattttgttatgcaaacatccaatccagaagagggcttttggctgatttactgtggcattcccggcacctagaacagagcttggcacacggcggatgcttaagtatttgctgaatgaagatagcatcttgttctggcctcagttcagttttattcctcacaatagtcccgaaaggggaatacacccctttttacaaatgggcacatggaccgggatcatcactcagcctagtcttcaccagttgggatgttgagaagctgtgtccaggggcctcttctgagggaattcacaggtattcagttaaagaaagaaaaaggtgacacaggaacaagatgcatggggccagggagtgggatggctggggcaggacagcgtggggacacccacaggtggggaggactaaacagttggaaagagcaagactggagagtggaggaagagcgggctgagcccaggaggagccggaagacaaaaccaaggctcagccccctatctcttaggcaacacagtgggagcaggacgctagggctgcagagtttggagtctggattcaaaccctggtcccaccacttacttaaattgtctaagcctcagtttccccatttgtaaaatgaaatgatgtacatgagatgtcagagcaggtccctctacgcacggtaggccttcaaaaaacagttgcagtatctacactgaggctgggacccaacccctgcctccctgggcagctgggcccacctgagcggtctgactttttcccagggcccaaagcccttcctggcccaagaatcgccccctcttttgatctcaaggaatttcaccctccacccagaggcctttgtaaaggccccgccttcgaccccattatgtgttgaaaaagagtcataaggcacaatggggagtgggggaggctttcctcggcctcctgcctttctgctgagacctgcgtttaaccctttcttaccaagactgggcagggaagcagccctgggaggcccacctcgcaaagcctaaagggggcggcaggctccttcggcttcgcgggctccagagctttgccccacagctgcggtgcccacagtgggtgcccacactttgacacccacgcgggtgtcctctgtctcctcccgccacgccccccattccaagcgcctcctgccctctcctcctcccaaaccaaactgctttagaccccaccgggtcaggtgggacgcctgggagggcgccaggccacgaggccttggggttggcagcccaggtctctagagctacggctaaggaggcaccaggaggggctcagtcacggggcaccaagggcaggtgcccagacagagcgcagggtcccaggcagcggctcgggaggtaggagaccctgggactgcagggcggtcccgagcgcggtcccctgagttcgccggctccgcgggcgccacgtccaatctcctgtcccgcccagagcgcgcgccgggagcttgggatgcgcgggaggacaggggcaggaccaattgcagggcgtcccgaatgggctgctgtgggcggcgtggcgctggagaccccggccctgccattaaagttcaaccacggggccagcggaggatgcagaaggggatggaccacgtccgctggggccctggggaaccagggcgcggggcagcgtcgaatccttacctgcgcagagcactggcgagggtccgtccaggcacaagcgcgtgggagcacggagccaggatagcgggcgcggagtggcgggagcgcaacgcggcccgggccaccacccccgccgccttataaaggcggccgcggggcccgagtgaggcccgggcagcccgccccctcccccgcccccggccccaacccctccccagcccggccccggccccgcccccggcccgagccccgcgccccgcgggccggtcgtgccacgaggccagggcgccccctgccgggagcggagctaggaacgggctggggtgacgcggccctggcgtccctcgcccgccccgcactctcggtctctctgcctccgggctgccccagcccagcccttcctctctcagcgagcctgggctctgacctgctccttgcgcgcgtctcctgttttgtctttaccgtcggcatcttccttctgcgtctcttggtgggagtctttgtctccacccgtctctttgtctgccttcctctctggcgtctgtctctgtgtctgtcaacatatctggctttctctgggtctctgtctttatccgtctctgcccacgtgtccctgtctctctgtctctgtccacgtgcacctctgactctgcacccccacccccgcttccctgcccgtgggctgcctccctggctaccgcaagaagaagcagaaggggacctcggaggggtggcatctggagggaaaccaccccctagacaggggcccttccctctttctctctttagagacgtaaagggcccgcaggtgtccggctatgtcccagccagagccccaggacatgctccctggatgccagaggaggggcaggcacttcccaggcagttgagtcagacagctcaagttcaaaactctgctctggtgaccttggccaagtcacttgacctatgtggaccagcctgcccctctttaacaggcagacaccatctcccctggcctctcgctggtgcgagagtcatatgagacagtgcttgaaaactacagaggaaacgctaaaatcccggatagacgggagccagggacagaggctgggtgctacaggccctgctcccgctcctggggaaccagctctgatggaataaccactccctttcctctgagcactgaattctctgggcaacttcgcagtgagaagtccgcaggctctgtttgaatgcctccagcgacagagctcactgactcctaacaggagggtcttctcagtggcccttgggaaaatgtctgcccagagaaccaattttagccaggtcaggcaacctctcttccactcactccatgccagtctcagggccaggcactgtgcatgcattaacttccaaaagctccattttccagaggagaaaactgaggcccagagagatcatgtgacttctcagtaaggttggagccagaactggggcctggtgccagaaaccaagaatgtctttgtatttatttttgtttcttttgtatttttggttgatactgtttatttagaggcgtgacataggttcccttttcagataagtttatgttttttaaaagtgagtcaaaatattgagtaaatactatttatttatgtatttcatgggttgggtgatatggcaaaaatcatggaggtagcaaatgaatggagtttaggaaataccatcctctgtaagaaattgcaggtgaaagcacccagcactgggcctaaaacatgggaggggctcaatacttgctcacaaatgccaaggaagggtttaaggattccaggagacttaagatggtatcatcatcagtgagccaggggcaagtccccaggcatggaaaatctgcctgttgcttggacagaggctgggaggcagagccagagggaattggaggcacccattgcacctatcatggggccagcacccctgacttttttttttttttttttttgagacagggtcccactctattgcctaggctggaatgcagtagcatgatgtcagctcactgcagcctcgacctcccgggctcaagtgatcttcccacctcagcctccccagcagccaggactacaggtgtgcaccaccacgcccggctaatttttgtatttttttgtaaagaacagggttttgctatgttgctcaggctggtctcgaactcc

SEQ ID NO: 81 - DNA, 4001 bp, Homo sapiens
catttattcattttagttcatcccagctcgccgactgccatttaccctctcgttctcgccgcgctctccgttgttttgttcaatttcccttccccttttcttggttgtcgctcgctttctttggttttctttctcggtatttcgttgtcaaggccacccttgccgtcggatcccggggtgctgggtttctcccggccgctcgttccgcaccagcgctctctgcagttcgcgcggcaccggtgtggtccgggggcccgagctgtcggtgccggatgcggcgcgcctagcagggacgcgggcctgggggggtggctcctgcccgacgcggagcgctgagccaggccgggtacctgtctctggcggtgctcaccgcactgcgcggcctctgccgtctggctgggatcagaggagccaggccaactgcttctcattaagtcccaactgtggtttttatcaggaaagcctctttcaaagggcacagacacgaagctccgcggactcgttcatttcctccgttgacccacacacacctccccgccctcccctacacattcccaccgccccggctgggcgaaagccggagatgcccggccactccgtggaggcccgcgaggcgccagccgggcggcggcagggggttgaggcggatcttggaggatccagttctgggcctaggctgcgggatatggcagcgcagataaggtgggtgcagtgcggaagccgagacgccttacaggtcatagggtgcggcggacggccgcagagctgccgatcagcctgccaggcccctgccttcaggcgcattctcggatgccggcgcggtccagccggccttagcacagggcaccggcccgtgagcccgcggcgccagggggttaggctgcccagggctgctcctgactgcccagcggtgatgatccagcgcggggaagccaagactgccagaagggcggctatcatagtgcataacggcagggaggccagcttagtatgagaaataagaatacagttattccgtcttgaggacagccctggcattgcacgaccagtcgcggccagactgtgccagtctgccgcacaggcagcacccttcctgtgaaggctaggcccggggaggagagacgggccaagaccaggccgcagtccccagccgaccccgatttgaccactctaggttgaggcccagcctcagggccctcaaagggcgccagacacaaaagccgcgcttcttcgtcaggtctcagtgtggctccacagccctcggccgggtctgggcttcagggtaggtggcagttccagtccaacttcggcagagcatgctctctccttcccaggtccaactgctttcgggccccgactggactccgggccgtcgccactgcaccttccctcgacctcccgccttccattcccgccgccgaggaacggtggttcaccctcccgccccacactggcctttgcctggcccgggccagcgccaacccggcttccgtggaagccgtggcgaaaggcgagaggggcaaaaagttgagaaataggcgagcgggagagataagcaggaaggcccgggtgggcccgggtaaggaagaagaagagagggtcgggctgcgcgctacgccccgcgccgcgcgttaccttccgcggggccctcgtagaagtggccgccgttgagggccgggccgggcccgaggtcctgcaggtacttggcgggcggcttggccggctctgggaggtagggctccaggggcccgcaggccggaaagcgggtcagccgcgggccgcggggcggcgcggggtgcaggtgaggcgcagcggcgggggttccctgcgggcccggaggctcgtcccccgaggccacataggggccgggtgcaggccccacgcggaaaggcgcgcagtgctcggggtccatgccggctcagggcgcacaggcctccggggctccggggctcgcgctgcccgcgccgcctgtgagcgcccgccaagggggagggacctgggcgcgggggcgcggagcccccgggagcggcgcgcgccgcggggggcggggggcggggggcaggggagggggccgcgcctctgacttaatgctggaaccatccacgtcacgtgtggccccgtgcgggttaacccctcggagcccgggaaccccctccccccattcacccagagcccagtcccaggcagctcaggagaggatgaagcagcttcctctctagggcaggatccctttgtctacccatccaggtgagtctcttgctcagagcagcacccgtggtcctgatatccagcctagaggcacttgcccctagaggggtgaggccgtgtgggcatcccccccaaacacttttgggcctggactctggacatcagcctgggatgagggcctgggcgggcagacaggcaggccttaggctgcagttttacttaggtctccgctaggagctggacaaaatgttgcctcagcaaaaaacacctcccttagagatctcttgtttctcacagtgaaaggagctattgggagtgttgtgtggaagcagatctaagctgggaatggggtgctggggagcttggacctggacactatcattaattagctatggttccttgcgccaatcattagtgtcctcatctgactgtggaggtcgggccaagccaaccctgggtctttctatgtatttgaggtgtgtttcagaagtagagacagggccagagcagacagggagactcccatgggcagctcaggactgaacagtgtcctgcaggggcagcctttggaacaggtggaggatgagcagaagggctggtgtttcctctggcagcagcttggagtgaatgcgtttcagtgggcagatgacccaagtgtctggggacccactggagagactgtctgcagctcggacctcagggctgtgctcccccaggcctgacgattcagaagggatgagggtagaactgcatcttctaagagctgagtctccccaaccaaaaggagacaggattagagcagtagcttagaatttcagaaaagagaaataaccaccaccctacctaagatctggggagaaatacccaaggacccgaggaccctgctcacttcccatggattgaggagcccgtggggctgcgttaaactgtttttattatcaatgcccccggagactagcaagagaggtggggagtcaaacatcatttgtatttcatttgaattctcaatttttaaaggaatccaagaggcctggtgtgaacacctccctcttccgctgggggcttagaaggggtttcttggctcctcagccagagttgggctgtaaatcaagaccaaacaggaaccagaagccttgcatctcacaaggagtcattaagccgttattaaacataccataacttctctgaagacttattggtttcaacaccaccttggaggcattatggccattagggcccctaatcacggaatgcagactggccagagagatgggagcacctggggctggtatttctagtcaagagggaggctcggcttgaaattaagcttcccttctggcctcaccagagggatcctttctccaggatctagtggatccagctctgggcaaccaatttgaaccgatcacctttgcccattaataaggtttttcaatagttgttgattggatattgttttcttttctctcttccccatacctgcgaaattggatattgttgactttctaggaggacatcaatttaggatacctattctattcaacagttatcaagaagtttactatggaggatgaaaatatcacccaggaaaatgtcaccaacaatttaaacaaggcagcctggatcaaaggctgagtcttctgcctcccatgacaaccttgctgagcctcagtttcctcatcagaaaggtgggccacacatggaagtagggtatttgcaaagcattcgtgttttgatgcactgtgttaatttaatagatgctgatgatgatggtgattaccatctccagtggg

SEQ ID NO: 82 - DNA, 4001 bp, Homo sapiens
accagcagcggcaaggggtgaggtataggtatatgaggaccaggaccacactaaggatacagcccactagggtggtataggctgtgttgagggtgtcatggtgtccgtgcaaggtgaaattgtgcactttcaattccacagacagtgtctcattgaaagtctctcccatggcatagcaggtatacacaccaccgtcctcgacctgcacctgctggaaaagaagactgccatccttagacacactcactgtgccattggtcacctcatctagcacccgttcattacttggtgtcacccacaccttggtcatcccttgctgcttggtgtcacacttgatgatcaaggtgtcacccaggtgggcctcccaggcacgctccttgtactcgccacagttgaggaaactcaggttgaagacattgtgcagcttcttggagttcatgcagtacagatcctcttgaaagtccatcacggagctcagctgccgatactgccagtgtgaaaacagctggtagagctcacagtcgcagttcagggggttgttatgtaggtacagcccattcttgatccaggccggcagcttctgcaggtcaggcaatggcaagttcttcagcttgttagaagagagatccaggagcgttagtttgggtagcttggctccttccttgaccagttccagagggaagcgagagatctggttctggctcaagtagagtttctgcagctgggccatgtcatcgaaggcgcaccggtccaccgccatgatgtggttattgtagagcagcagcacctccagtacttgcaggtcactgaacaggaactcatccagtgtacgcagctggttggaggagaggtccaggtagcgcaggttgggtaccggggaaaaggcctcagaggagatgaagttcaggtggttgtggctcagcagcagggagtgcagttgggtcaggcgcgtgggggtccactcggcccgcaggcggctcaggttgttgtgactgaggtccagtagtgctgtgtaactgggcaaggaatggggcacattgggcagctgctgcttggagcagctgaggatgttgctggcgcacaagcaggcggcaggacagctaaccacggctcggccagctctggccacctcaaaaagcagcagggacaaggacggcagcaggagccagaggcctctcgggtcacggtgggggtgcatagtgtcactggagtgggcgaggaaggccacaaggaagatctgggaggaggtcacccgggcatgttctggtggggtacggaagggtcacttgagagaaagaggatgggtttgtggtcaccaaggactccagagggaaggacaccctctcccacttcccctcccacccttacctccaccccctttgggctaggagagagagatgctgggtagtttccaggcactgtgcaggcagtgggctgtaaatatcggccgaagaggaggtggcccgagggcctactgggctggggtcacaggggtgcaggctgcaggtatgcacaggatggcagggactgctgggagtcacagggatggcacgggcagggtttggaggtggggtcggtgtgccttttgggaggagctgagggaaggtcaacagggcaccgggctgggtaggacgcgtccggtcggggttgagggtccccggggcctgtaggggcgggctccccccggggcctccggtcactgcacctgctcggcgaggacgtgtctcagcccatggccggtctgggagctccgtcgcggcctctcccggcggcgcctcaccggccggcctgtcactgcgcccaccttacgcaggggcccgcgcccggcaccgtcgcctcccggggacttgcggggccccgctccgctcaccctgccaccgcctcgaccgctgagcccgccggagcccaccgaccgcggtcgctgcctccaggtccgcaggcctggcgcggatcggtgcggggagccggaggcgcagcgatcccagcggagggagcggcgtgggggcagcgagcaccgcgcgcgcgcccgtcgccgccgccggagcctcggggcgcgtgcgcgcggcgggggcggggcgcacgtgcgtgtgtttgtgtcggagccggccgggcggacgcgcgcggggtcgttccctcaaccagcgagctccggacgctgagctaaagacgaaaattggcaggaagagcggcactggccccttaggctccgctataacttcctccatcccccattcccccatctcccagcacccttctcgctacacagaccggctctcaggaaaagtctaactaaagtgaattcgctgcacctactcgggcaagaggcgtcacatgtcttttaatttcgcaaattgaagaaatctggctcagctcccgcctgccaatgttggcgggaaattcattagtcacattctgaggttccccctcccttctctctgtggctgtggggtctcaaaaattgggggaggggttccccccaccccacccccgtcttgatgctactagttcatgacccttgaggtaccactgaagggcacagctccttagcctgcaagccagctgcgcaggagtgaggggaaagggggtgtttggtgagcccaggccccagaacacccctttacagacacctcatgcacctctccccactccacctgctacacacacacacacacacacacacacacacacacacacacacacggactgcatacaagccagggacaatttccattcctggaaactccgaaacccttcccagcccggaggaagtcattcagcccttaggtctggccacttgccttcttcctaaaccagtgccagctccccactccccttatggagcaattgcaacatagtttctctgttacctaatcctcaagatgaaggccagtggtggaggtggaggggtttcttctttagggtggcccctgaaacaacaagaagctgttactagtgtatgttgtttgggtttgggggtgaggaaagagagagatgcaggaagagcctagaccttatcattcaagatgttagctgttcttgagatggtggaccataagaaattacctttttatttgttccagtctcttataacagcaagatcaagactgaaattaatgtctcagtagattagcttgctaagagttttaaaaagaatttatatctgtcacatgttttaccatgaattttagtgaatatattatctcttcaaggagtattagcgtgttaatcttatgcatagtgtgaaaaggtctttctgcaaggtgcagtggctcacacctgtaatcccagcactttgggaggctgcggcaggaggattgcttgaacccaggagttcgagagcagcctgggcaacatggtgagactctgtctcttaaaaaaaaaaaaggcatggtggcacgcacctgtggtgcccactacttgagaggctgaggtcggaggatcacttgagccctggaggtcaaggctgcagtgagccatgtttgtgtcactgcattccagcctgggtgacagagcaagatcctgtctcaaaaaaaaaaaaaaaaaagaaagaaagaaagaaagaaagaaagaaagaaagaaagaaagaaagaaagaaaaaagagaaagatgttctgttctgttcatttcaggcatcattgaaaagatgaggagggtaatctttttggaggacaaggtgtgaagaatcttgaaatcacattgcatcagttatctattgctgcataatcacattaccccaaaacttagtgacttcctacagcaatatacatttattgcctttcacagtgtctgttggtcagattcaagagcagtctggtggacagttctggcttggcagtttctcatgcagttatgcgttagatggagctacagtcattagaaggcttcactggggccatagaggctcacttaaattcatgtggctggctgttggcaggaaacctctattcttatccataaaggtctctccacaagacagcttgagtttcctcacaacacggtag

SEQ ID NO: 83 - DNA, 4001 bp, Homo sapiens
tacagctcttcattttcttttcttttctaatatgtctcttaacatttataagtatactttttaaaaggcactctctataaaatatgatttttaaaaatatctgatgaagaaagatgggaatgctcatatgatgttggtagtagtaaacttaaaacagctcatttggtaaacaatttagtaacacctaccaaacaaccatttctgagaagctatcctacggaaatcatccttaaacatggaaaaagctttaggtgtcaatattgttatcagaacatacttatacttaaaaaaaccataaagaggccgggtgcagtggctcacgcctataatcctggtactatgggaggccgaggctggcagatcatgaggtcaggagatcgagaccatcctggctaatacagatattcactgtgttatatgtgaaacaccgtctctactaaaaatataaaaattagccgggcgtggtggcaggcgcctgtagtcccaactactcgggagactgaggcagaatggcatgaacccgggaggtggagcttgcagtgagccaagatcgcaccactgcactccagcctgggtgacagagcgagactctgtctctaaaaaaacaaaaacaaaaacaaaaacgaacaaacaaaaaaaaacccccaaaccataaagaacctaagggattaattaagaaaatagaatatgcagtcttttaaaatggtttttaggaaaggtttgggataccatggtaaaaggataagttgtaaagttaagccaaaacattatcctgccaaaagcaggatataaaattacatgtgcaatataataacagtgcctttttaaaaaaaactctttaattttacacagaaaatagattgaaaagaaaaaaaaacactaaaatgttaagagtgaatatctttggataatggatgtgcagatttttaaaattattacttttggctgggtgcagtggctaacacttgtaatcccagcactttgggaggctgaggcaggcagattgcttgagctcaggagtttaagatgagcctgggcaacatagcgaaaccctgtctctacagaaaatacaaaaactagctgggcgtggtggcaagtgcctgtagtcccagctactcgggaggctgaggtgggaggatcaccagatcccagaagattggggctgcagtgaatcgtgatcgtgccactgcactccagcctgggcaacagagtgacaccctgtctcaaaaaataaataaataagtaaaaaataaaattattacttttactgaatttcccaactttcaaaacgaatgtttattacttttattttttcagcacaatttctatttcacatgaaacatgtattgcttttatcatttaaaaattataacattattattttaaaaattactctgcgtacaaacctggacaacagaaagctattctcgtgaaccatcagaatacacacatgggttatttttgtcatgttcatgattttcagccaataccatagctagagtcattatgtagaagccgtctcagagctatggcagcacaggttttgtttagactagcagaatagatattaaatatttcacagagttttctactgggatcatcaaagatgcaatatacatgataacagttttagaaacttacccacatcccaaaactaaaaacaaacaaaaaacccttgaaaatattttgtgttttcctgaaatgtatgttaaagctatcacgaaccctaaatgaatgatcaaagctgatatggtagctaaaggaacagttgcttgtcaaaaaaaaaaaaaaacaacaacaactgagctctccaaacactttgtacacctacctgggagtttgaacagaggcattgttgctgaaatccttgattctaggatagcacagtagaaaagaagagagaggagactgtggggtgactgactgacactataaaatatcctgacattcattttattattttgctttgcccccggaaatttgattcttctctgctaagtggagagagatgagctttggacctatttatagcttgaggcatttgatagtgaaaaacaggtgaagctttcagtctttactttgggattagaagatatctgtggtgggccaaaaattgcatttcaatactctctaaatcttcttacagactggatctttggcaagtgtaggaccactgatggtgatatcccaccctagtgaaatacagtgaagtctttccggtttctgaagctatgatcctcagggtttcacatcacgcaaacagctttctgtggttggtgaatatgctggtacattcatcaagctctcaacagacacacacgcacacgcacacacgctcaggaatgcatgtttttattagtaatgtgtctgacttagcagaacttcagttgacagtttaatgaattaagtgttaaatttacttcaagtcttttacagaaactcaactgtcctccagagtatccagttaccacttctctacctattgttataataagaacaatagctttgttttgtataacattttattgtatgtaaaacatttggcaaacattatctatttgatactaattacaatcctgtaaggcaagtaataccttatccctgtttcccaaataagaaaactggggctctgacaggtatcttgctcaaagtcattctgttcatcataaatggcaaagccaaggctctctggacccaaatctcacgctctttccataataacacacagtcttagttatgactgtatatatgtgtgtgtatatatatgtatatatgtatatatatgtgtatatacatatatttttttcgagacagagtctcgctctgttgcccgggctggagtgcagtggcgcgatctcggctcactgcaagctctgcctcccgggttcacgccattctcttgcctgagcctcccgagtagctgggactacaggcgcctgccaccatgcccggctaatattttttgtatttttagtagagatgtggtttcactgtgttagccaggatggtcttgatctcctgacctcatgatccacctgccttggcctcccaaagtgctgggattacaggcgtgagccactgcgcccggccagttatgactaaatatttgatagttgctgctaggtaaagaaagtacgctgctagactcagcagaaattttaaattataacagcttatattgaagatgagcttggcacttcagattagcaacagaattatgggcatagaccaaatgatctttttactattaactatttctttttgaaaattgggacaagcctttttgttggcaaaacttaacaatattttagtgcttagccttatggccaacctctcaatcaacaatattgcaacacattacaaaggtgttactgaaccaaaatatttgttcatttctttccaactcctttttgttacatttttacctggatttcccaacagtatccacaaattgatacatccaaaccaagcatcttcctccatgaacctgcttctccttcagtaattcctatctttatataagttacactccaattttctcattccaattgtgtaaataccctagttgcctacccaaagatcattttccctacctttcttacaaacaaaaacttctttggtttgagcattaatgtgctcagccaaaaaacagcatttgctagaatcctttgtggctagaagcggccatttgacacagcctggccaaagtgatgtaagcagaattgctgggtgggatgtctccaaaagttcttttaaaagggaccagctcagctggcatatgttttgccttttgcccttcctcttcttcctgcctgaaaaaggaaatatgtggataggggcctccaaaccaaccattgttttaacacaaatggtgagcaggacaagagccacatgaagactatctgaacagaaacaaataattagggtccctgatggcatcctaaagccaccatattagtccaggacttcccatatttagaattcttgtttaattaaggaat

SEQ ID NO: 84 - DNA, 4001 bp, Homo sapiens
cctactggtcctttctctaggggtcagcaccacacacatacacccacacttacggagaagtcaagcaaaagccagagtgggctgctccagagccactcccaccaactctgagattctgagcaccccatctcccctctcgaccaggagcccctcacacactgccacgactgcctcagtaggcacaggggtgtccacggctttgaccccacaagtatcagatgctcttaccatctgaccaccgaagggtctccagctctgggctagatccgtatcagttgccctattgctgaaccaaacagggccaggaagggccccacccaggggacaccctttctggatggcacagacctgggcacagagaacaccctcaggacagtagagaccttgcaccagtcatcttcaatgaaacaaaaaaatataggaggttgatacttgggctatagctacagacagctgcaagggtgggggcagtcggcatgatctggtcatcaaagtcagggtgggtctttccttagccacaaggcctgggagcagacagcaggcagatatccctctgcaagcacagagccaggcagccaagccctcactgagacaggcactgccgcacctcactgcctgctccaaatgatgcagagatgcttactagagtgagagacgaaccaaagggtgcagaagcacacacagtgcgggcagcagccccagcctgaaccctgcacggacctgaccaaggacaccccatactcctaaggaggctcacaatatagaccaggaatgagcaaatagcaaacgatagatacagtcaagcccccagttgtgggatgccagccagcaatggttgtgcccagatgtcagacccccagtgagggggatctagatgtggggtcctaaaaagtggaactagccacagaacagcctaagcctgcctggtaaaggcacaggcgccagtcagagtggccagtccacaaaacagtcagtcccacacacccccgctccattcacacatgcttcacacgcagtcttagcacatgcacacgctgacacgtgtgcatacacacctcttgctgcacccacaccatgcccactccttgtgacagaggacagcatccctggcacagatatctcagatccaccccccgccccccaccacccctcaccccaccttccaagccggctgtccctgggactgaggttgaggggcaccaccacagagaggatgccggaggaggtggccccctctgaggggaccagcaccttgggcgagaggtggcaagacagagcccagcatctatcctgaggccaggaagcacacactcacctggagctgcagtggaggcctgcaggctggcccgcttcttaaagggatatttggccttgggcttgccagagccagatggataggatgccatggctgggaccacggcggcgacagcgggggagtctgagcggcaccggctggggcctggctctgccacatccaaccccttcctccgccccgcccccagcgggagtgactgatgcaggaagcagcggctccgcaggcggaagaggccctggccacgatttctcatgttgtctaggcaacctcggggagtggggcctccatctctgccccttatccctcccctgcctcctcagtcccaggagtgacgtgactgatggtggctgggcctggcggggggcggggagggggtgggtagaaaagaagatggggaagggccagcccccagctctccactaacccaccaagagccctcaccccatcatgccagggctcccgggcaaagaagccaaagtccaggctagctggtccttccagctagcctggaagaaaaaagaataacaaacaggaattcagcagcgagcgagtccaagctcaaacacagtcctcccggggcagggcaggcatactccgtgaaaacccagcacccactttccttccacatctgaccctcagctcccggggtagcccagctctgggaggagggggaagaaccgagaatcccagcccaggagggaggggcctgtcccgggaaaattccaccgtcgccaaatagctacctcccaggaaggcaggaaggccaggagacccccttgtctgggggtctgggacagagaccctagcctctttggatttttcctctgtctctgcacactctggctctgctccccaggccctcctgggaggagctgaccgccttccctaggtcctgctgctgtgctgtgactcccaccctcttgtcactctggccacagcacttctctgtcccagagaccctccctccaacacacgtacacacactcacctgaggccatgatgcccgagttccgaggggaggctgcccacgagaagtctgtacagcagaaagcccgggtcctgagggacggcagggggatcgggccacagaccccagccaagtcactccaagggcccctgccctggcactgagatggggaaagtaaggcagtctttcaaaattgccagctggccggaggtggactcccgcagacctcggcagccggactggcctcaaggcgaccccggtgtcgcgaccacccaaccctgcaatcgagaggctggtaggccacgtgctcccaagggagcgggacccgaaactcgtccagatttctctcaacactccctgggcattcagggtcggactcccgcggccggactgtgggggagtcacgcaacaggtgagaccccaccaaaatctcgccggctccgcgccaggctctgcggcccttggccccgcccccgcctggccccgcctccgcctgccgaccccgcctcgccatttttttctcttcctgggcgccacgtgggcagccaccacaccgcggtagggctggcctgagccgaccctgggtcttgggccagttccgtgcgtcagcttcctcatcagtaagatggggtaatgacagtacctcactcaaaggggttactgtgaagattaaacgtaaagtccctttacacagtgcctggcacgaagtgagggcccagtgaaaggtagctgttatcattgtcccaggattcattttaagcagaagtcctgcccctgcaatctcacttggtcgtctgttttcttccggccggcgtaggtaggaggctgtgccctgcaattctggctccccttcccacatttctgtatttggtggttaagagctttaactctagccagaatgtctgggttcaaatccagatttcacctacttcctgactgatactgggcaagttacctaacttctctgtgcttctatttcgtctgtaaaatgagtgtaagagtacctgctttatatggtggttaagataaatgagttaatataagttaactgcttagaactgtgcctggcctgtagttagtactcagtattcatgtattaccattgctttagccttggccttggttctctattgacactcacaggttgattcacttgcagccgttctggggtctatccaacaagcatccccactgccaaggggtagataatccgacctaaagggaacttgtggagggaagtccctaagacttcactgaatataattaaatgcattagcaggaattaatctcttccctattttccctcttgtgggaggcctttgccccccacacccagttgttctaatgctgtttgtctggctcctcccagttcttaccactcccacagcagagatccttcccaaactctgcctccctcttctctccccacgctggattctggaccctgaacccttttctccacctgcatctggtgccacttccattgatccctggctactgttccctgaacaaacttaaaaaaaacttggcctcttcacctcacacagaatccataaaactaaaaagagaacagagataaccaggtttacctaatcaaaatagcaaagactaaaaaacaaaaaaccaaaaaataaacgctaatgcaggttggcaagggtatagttagtgagatgggagacacacacacacgtacatgtgcacaaacacattactggtggc

SEQ ID NO: 85 - DNA, 4001 bp, Homo sapiens
ggaatgagcaaatagcaaacgatagatacagtcaagcccccagttgtgggatgccagccagcaatggttgtgcccagatgtcagacccccagtgagggggatctagatgtggggtcctaaaaagtggaactagccacagaacagcctaagcctgcctggtaaaggcacaggcgccagtcagagtggccagtccacaaaacagtcagtcccacacacccccgctccattcacacatgcttcacacgcagtcttagcacatgcacacgctgacacgtgtgcatacacacctcttgctgcacccacaccatgcccactccttgtgacagaggacagcatccctggcacagatatctcagatccaccccccgccccccaccacccctcaccccaccttccaagccggctgtccctgggactgaggttgaggggcaccaccacagagaggatgccggaggaggtggccccctctgaggggaccagcaccttgggcgagaggtggcaagacagagcccagcatctatcctgaggccaggaagcacacactcacctggagctgcagtggaggcctgcaggctggcccgcttcttaaagggatatttggccttgggcttgccagagccagatggataggatgccatggctgggaccacggcggcgacagcgggggagtctgagcggcaccggctggggcctggctctgccacatccaaccccttcctccgccccgcccccagcgggagtgactgatgcaggaagcagcggctccgcaggcggaagaggccctggccacgatttctcatgttgtctaggcaacctcggggagtggggcctccatctctgccccttatccctcccctgcctcctcagtcccaggagtgacgtgactgatggtggctgggcctggcggggggcggggagggggtgggtagaaaagaagatggggaagggccagcccccagctctccactaacccaccaagagccctcaccccatcatgccagggctcccgggcaaagaagccaaagtccaggctagctggtccttccagctagcctggaagaaaaaagaataacaaacaggaattcagcagcgagcgagtccaagctcaaacacagtcctcccggggcagggcaggcatactccgtgaaaacccagcacccactttccttccacatctgaccctcagctcccggggtagcccagctctgggaggagggggaagaaccgagaatcccagcccaggagggaggggcctgtcccgggaaaattccaccgtcgccaaatagctacctcccaggaaggcaggaaggccaggagacccccttgtctgggggtctgggacagagaccctagcctctttggatttttcctctgtctctgcacactctggctctgctccccaggccctcctgggaggagctgaccgccttccctaggtcctgctgctgtgctgtgactcccaccctcttgtcactctggccacagcacttctctgtcccagagaccctccctccaacacacgtacacacactcacctgaggccatgatgcccgagttccgaggggaggctgcccacgagaagtctgtacagcagaaagcccgggtcctgagggacggcagggggatcgggccacagaccccagccaagtcactccaagggcccctgccctggcactgagatggggaaagtaaggcagtctttcaaaattgccagctggccggaggtggactcccgcagacctcggcagccggactggcctcaaggcgaccccggtgtcgcgaccacccaaccctgcaatcgagaggctggtaggccacgtgctcccaagggagcgggacccgaaactcgtccagatttctctcaacactccctgggcattcagggtcggactcccgcggccggactgtgggggagtcacgcaacaggtgagaccccaccaaaatctcgccggctccgcgccaggctctgcggcccttggccccgcccccgcctggccccgcctccgcctgccgaccccgcctcgccatttttttctcttcctgggcgccacgtgggcagccaccacaccgcggtagggctggcctgagccgaccctgggtcttgggccagttccgtgcgtcagcttcctcatcagtaagatggggtaatgacagtacctcactcaaaggggttactgtgaagattaaacgtaaagtccctttacacagtgcctggcacgaagtgagggcccagtgaaaggtagctgttatcattgtcccaggattcattttaagcagaagtcctgcccctgcaatctcacttggtcgtctgttttcttccggccggcgtaggtaggaggctgtgccctgcaattctggctccccttcccacatttctgtatttggtggttaagagctttaactctagccagaatgtctgggttcaaatccagatttcacctacttcctgactgatactgggcaagttacctaacttctctgtgcttctatttcgtctgtaaaatgagtgtaagagtacctgctttatatggtggttaagataaatgagttaatataagttaactgcttagaactgtgcctggcctgtagttagtactcagtattcatgtattaccattgctttagccttggccttggttctctattgacactcacaggttgattcacttgcagccgttctggggtctatccaacaagcatccccactgccaaggggtagataatccgacctaaagggaacttgtggagggaagtccctaagacttcactgaatataattaaatgcattagcaggaattaatctcttccctattttccctcttgtgggaggcctttgccccccacacccagttgttctaatgctgtttgtctggctcctcccagttcttaccactcccacagcagagatccttcccaaactctgcctccctcttctctccccacgctggattctggaccctgaacccttttctccacctgcatctggtgccacttccattgatccctggctactgttccctgaacaaacttaaaaaaaacttggcctcttcacctcacacagaatccataaaactaaaaagagaacagagataaccaggtttacctaatcaaaatagcaaagactaaaaaacaaaaaaccaaaaaataaacgctaatgcaggttggcaagggtatagttagtgagatgggagacacacacacacgtacatgtgcacaaacacattactggtggccttgaacactgatataatctttctgaaagccatctggtaatatagaatcaaaattttcaaaaaggttcttattatttgacccagtaatcaactttctggaagttgtttttctaaaaagagctgccagaaaaatatgtatgcaaaaagttgttcagcaccacaatgtgtattgcatagaaaagttagatactttaaaggtcgaacaataggggaatgtttatgtaatattcataccatgaaatacagccattaaaaattgttcttggagaaatgtttaatgatgtggaaatgtttacaatataaagttaggtaaaagaatggatgcaaaacactatacacagtatggtcctacttatgtgatatacatgggtagaaaagaaacacaccaacaagtttaccaatgattatctgtagtgatggaattatgggttatatttattttctttatatttatttgcattttagaaattataatacatacccataacttttataatcaaggggatagaaatcaacaaaaatctgtaaaaatctgtaattgcctccacagtccccccaacccagccttcccggggtcttaaccccagacttaaactattctgtttacatttatggcccactgaattggtcttggggcgcttagggattttgaggctgatggactctcaagaatgaataaaatgaatctcaaaaatcaagcaccatgtaactacataaatgtcatgtatcttctgataagatgcaaatgttgacatagttttaaagata

SEQ ID NO: 86 - DNA, 4001 bp, Homo sapiens
taagttaagcaacatgacccagccacaccggcggctagaagacagaacagaacccagcagcccgactccaaagcccactctatgctccctgtgcagaccccccaaggcagggtgcgagggaaagaggcagaaaaggggctctgaaagggtctggaagggtatggagggagactaagcagctgcctgccgggctcacttgacatcctggctgatctgccgctccagccgctgccgccgctcctccagctgttcaatggggctctcctcggggaactcatacggggcactacggagctcgctctcagccagtgagcgggtgaacagctcctggggggagggaaggaaggtcagcatggctggccctccgccctcgggcactctcctacagagtctggggatggggtgagggcagcaggaccaggggtacctgggagaggctgaggatcaggagacagccaagcgtgaggtgaggggacagcttgaggtgaggggtgtggggagcagaggcagggcatggagacacggggtgagggtgcgggtggtgccaggtgatacctcggcgatctccttgcatttgccatccatagacgtgcgcaggtcgagcgggaagtgcttgaggcagggggcggggcccggcagggatcgggcagactgcagcggaggggcccccagaccaccccgagcctctgcagagacagtgatgccagggtcaaagggtggaggggcagcccctgaaagccctgggcccctgccctgcctaggccagctcccgagagagcccagggtcgggaaagagggcagtccctcctcagtagctgaggagtaggcctgtgtgtgtggctcccaaagggctcaccctcacctctaacgcagggacccctcacccattccaggcttggggtggggattctgagtctgcccctagaacaagtagattcattacctccacaaatgagactagagcctgatccctcaggccatgagaatctccacgtgactacctcccagaggcaggtgcacgtgtgtacgtgtgcacacacatgcacgtacgcacacagacaccctcagagacacacaccaggtgcttggtaaggaccaggcggccacaccagggacccccagcctgcagctcccagggcaggcaacccaggatcagacccgcccctggactagcagattctccactcaaaggggcagggccctgtgcctgacatcctagacctgtgcagcacaagagaagccgcagctgctgctcagctctgacctagggacgagccctcaagggaagaggagaggaagtggagggcctggttggcaagggaaccctacctcctccctggaggcccgccctgtcccccagggccccagggctgccaaaatgtggcctggccttagcctgcccctccaaaaggagctgccacaaacagtctatgccactcaggccccaggatctggaccgggggcaccacagagggccctggggaagggagtgtcagaagccaggggtctttcttcatcaagactagactttccatctgtaccacgaggaggctggcaccagagggccgtgaagctgctggtctatgggggctgccaaggcttccagcctaccccgaaggaccctccctgggctcagcagccccagctcctcagtgagaagctttccacacccaaactgcctctctcagccggctgtaaggagtgctcccctccagcaccctccaccctggcttagggaaggattacaggatctgcctaggtagccggccttaaagtctctgcgcccatttcccaatactccaggactggtcccaaagctggacaaagggaagagggaggggcctgccccagatccaggaccccgtcccctgcgcaccccggcccctgcctgaaccctacctgcagagtgcaggcagctccggccagcagccctgtgccccttgcccgcctgtttgccagtgaagctgcagccggtccctcaggggctggcacaggctgtaccaagtgcagctgcaagcaggggagaccctgagatggccgtgagcacggagctaggggagttcaagggagcccagaaaccaagggaaggagcatcagagttgggagataagacgaactccagaactgaagagggcctccacctctacagtgccagggaagacccagccagatgtgaggctcctaagggggagtagcagggtaggctgacttgggcagggcaggccgacagggaggagccaagcctccttaaaatccactgccctaggggacagtgagtgggcagggcctggctggccaaagagtaagaggggagaaaaaggaggggaacagcgctcttcatcacacccacagccccaggttggcctcttctggcagtggccttgttgctcaccactgtcctctgggccctgattatggcatccctcaggagagacagggcctttgctggggtaggagctggctggcagctggggaaatggcccagtctaggtaggggccagtcactgaggcttccccgctgcccagctgctcagggggctggttcgcaggcccctagacctgcaacccctgatccaagcctatcatcagggacaggacaaactgtccagaataagtttgggagaaagggggctagaatttggagaacatggatctgattctgttcctgcttccgggcatgtctctacctacctctgggaggctttgggtcctcatctacaagtggggcgataagtggtcccttccctgcctagccacaactgccataaggctcacagagataatggctctgcaagtgttctgcaaaacaccaggctctgtgttgaggcaaggcctgcaattatgaactcctgggaccctcaaaatacattctacctgtagccccgcccactgaggacagtgggaggttccctgggcccagtgcagggcaaaggcaataggccagtaaagggcagtgaagtgaacttggcaggagtggagatggggtgactctatctcttacttggaaaaggacaaagtgggaagaggaagaaaagaggggaagctgtctcacccccagagtgtaagatcttttcttgcccgagaaccctgattttacacacctcctccctacatatggccccagaccacttctgactccttctaggggaggccgaccacagacctccatggctggttcatattgggtcagcaggagttgagtcaaaggctcaaatctcaaccccctctcctagcaggggggtctcaggctccacagcaatcctggggtgagcaggacagattccaacagccagtgccatccccccagcctgccagaccactctccagggctgccgcaggctcactgaaggtggcacacgggcagtaaccgctacgttctcagaggccaggcctagaagactcagctgcctactggtcctttctctaggggtcagcaccacacacatacacccacacttacggagaagtcaagcaaaagccagagtgggctgctccagagccactcccaccaactctgagattctgagcaccccatctcccctctcgaccaggagcccctcacacactgccacgactgcctcagtaggcacaggggtgtccacggctttgaccccacaagtatcagatgctcttaccatctgaccaccgaagggtctccagctctgggctagatccgtatcagttgccctattgctgaaccaaacagggccaggaagggccccacccaggggacaccctttctggatggcacagacctgggcacagagaacaccctcaggacagtagagaccttgcaccagtcatcttcaatgaaacaaaaaaatataggaggttgatacttgggctatagctacagacagctgcaagggtgggggcagtcggcatgatctggtcatcaaagtcagggtgggtctttccttagccacaaggcctgggagcagacagcaggcagatatccctctgcaagcacagagccaggcagccaagccctcactgagaca

SEQ ID NO: 87 - DNA, 4001 bp, Homo sapiens
tggcatggaggggagcttgggtgaggagagcaagccgagccctgtggcctctcccaagccaacgcaacctcccacgctgcatccccccaacatgcaccacacccctcttactgctcgtcgggttccctgcgggtgtagacgtgcaccacaccccgcaccatgcgcagacccaagcccaggtccccaggcatggtgcttggctcacagtgctcatacgggtgctgctccagcgcaggggggtgcaccggggcatctgcaggggtgaggagggtaaagtcagagcagggctcttccaagccacccactgcccaacccaaaggccccacagagggcaagagatgttgaagacccagtaggtcagacagctcctgcccaacctccacccctgtaccccaagaggttggaatgagcctgggttgtagggagaggcaggcagggcagaggtgcccaggcaccaggctgagaagcccaggaggctagggcacatggcatggggcagagatggggagtcccaccagcagacacaggggtgtcggggccctgttcataggtccgggtctccagaggcttttcagccagctgctgcaggtagcggcgggtggtggggcagaagctctgcagggacagggccatgtacttctcccggatgaagagcgcccgcaccacactcttggctgcatccagcaggtctgtgaacggcacctggagatgaggatatgcgatcactctcctcagtcttggactcagagacctcctccctaaggccttatcttagaacccaaactatccccacctcccacaggccctgacccccaggaacactcagatcaccctggtccagcacatcaagtggctcctaggcagcccctctgcccctccgcccctccagctgctggaaagagaaacgccctttccagcccccacccccagctctccaggctgggggaacccactaagacataggtgatggcgactcacccaacatacaccccatacttaccccacacttctcctccccagagatggtgacccgctgaaactcccgttccagcacatcacgctcccgcaggctccggtcaccctgcccctcaccctgttccttgtagagcctgcagggggtgcattcaagggaggggtttagagccggcagaagggcaggctgcagctccgcatcccctgtgcccctctgccctcctcactgtaggtccgagtcactgtccgtcttcaggaaatcttgcttggcccgaagcaggatgtctggctccagcctagaggcaagaggggtgagaagtcaggcagatcccgagggacggcccttgctcccaggtcccagcaccgcactaggtgctgtgcacatgttgtcacatgtgatcctcaaaggcagagctgcagaaccctgtgctgttctcactcactttagagatgagaaagcagacccataagttaagcaacatgacccagccacaccggcggctagaagacagaacagaacccagcagcccgactccaaagcccactctatgctccctgtgcagaccccccaaggcagggtgcgagggaaagaggcagaaaaggggctctgaaagggtctggaagggtatggagggagactaagcagctgcctgccgggctcacttgacatcctggctgatctgccgctccagccgctgccgccgctcctccagctgttcaatggggctctcctcggggaactcatacggggcactacggagctcgctctcagccagtgagcgggtgaacagctcctggggggagggaaggaaggtcagcatggctggccctccgccctcgggcactctcctacagagtctggggatggggtgagggcagcaggaccaggggtacctgggagaggctgaggatcaggagacagccaagcgtgaggtgaggggacagcttgaggtgaggggtgtggggagcagaggcagggcatggagacacggggtgagggtgcgggtggtgccaggtgatacctcggcgatctccttgcatttgccatccatagacgtgcgcaggtcgagcgggaagtgcttgaggcagggggcggggcccggcagggatcgggcagactgcagcggaggggcccccagaccaccccgagcctctgcagagacagtgatgccagggtcaaagggtggaggggcagcccctgaaagccctgggcccctgccctgcctaggccagctcccgagagagcccagggtcgggaaagagggcagtccctcctcagtagctgaggagtaggcctgtgtgtgtggctcccaaagggctcaccctcacctctaacgcagggacccctcacccattccaggcttggggtggggattctgagtctgcccctagaacaagtagattcattacctccacaaatgagactagagcctgatccctcaggccatgagaatctccacgtgactacctcccagaggcaggtgcacgtgtgtacgtgtgcacacacatgcacgtacgcacacagacaccctcagagacacacaccaggtgcttggtaaggaccaggcggccacaccagggacccccagcctgcagctcccagggcaggcaacccaggatcagacccgcccctggactagcagattctccactcaaaggggcagggccctgtgcctgacatcctagacctgtgcagcacaagagaagccgcagctgctgctcagctctgacctagggacgagccctcaagggaagaggagaggaagtggagggcctggttggcaagggaaccctacctcctccctggaggcccgccctgtcccccagggccccagggctgccaaaatgtggcctggccttagcctgcccctccaaaaggagctgccacaaacagtctatgccactcaggccccaggatctggaccgggggcaccacagagggccctggggaagggagtgtcagaagccaggggtctttcttcatcaagactagactttccatctgtaccacgaggaggctggcaccagagggccgtgaagctgctggtctatgggggctgccaaggcttccagcctaccccgaaggaccctccctgggctcagcagccccagctcctcagtgagaagctttccacacccaaactgcctctctcagccggctgtaaggagtgctcccctccagcaccctccaccctggcttagggaaggattacaggatctgcctaggtagccggccttaaagtctctgcgcccatttcccaatactccaggactggtcccaaagctggacaaagggaagagggaggggcctgccccagatccaggaccccgtcccctgcgcaccccggcccctgcctgaaccctacctgcagagtgcaggcagctccggccagcagccctgtgccccttgcccgcctgtttgccagtgaagctgcagccggtccctcaggggctggcacaggctgtaccaagtgcagctgcaagcaggggagaccctgagatggccgtgagcacggagctaggggagttcaagggagcccagaaaccaagggaaggagcatcagagttgggagataagacgaactccagaactgaagagggcctccacctctacagtgccagggaagacccagccagatgtgaggctcctaagggggagtagcagggtaggctgacttgggcagggcaggccgacagggaggagccaagcctccttaaaatccactgccctaggggacagtgagtgggcagggcctggctggccaaagagtaagaggggagaaaaaggaggggaacagcgctcttcatcacacccacagccccaggttggcctcttctggcagtggccttgttgctcaccactgtcctctgggccctgattatggcatccctcaggagagacagggcctttgctggggtaggagctggctggcagctggggaaatggcccagtctaggtaggggccagtcactgaggcttccccgctgcccagctgctcagggggctggttcgcaggcccctagacctg

SEQ ID NO: 88 - DNA, 4001 bp, Homo sapiens
actattttcctacaagatcaaaaatcaactgtgaaaggaaagtaatgtgaactaaacacctacattcattccagacacttggccaaatatatataggaatgataaactgagagaaccggaaactaccataaataggaggaaaggcaaaaagcccattttggggagacacaactcagatgagactgaaaaggttactatttgggaaatttcagtgggtcaccaggagaaagcctgtactctctactaagcttggaagacaaataaggtagctattcatctcaaattctgctcctcattaaatagataagctacctattcaccacaaaaaaaacccaagaattaggaatggagacacaagtcatctaaaaatgagagcaaatattgtaactggaattaaaattcctcaccagaaaatccttccaggaaatatggatagttatagcggttaaaatttgatgttttgcttcagaagtaaactctgctataaactttaacttatctctttagtagagagcacatatacaaatattttcaaaaattgaacataaggtgacagttacttttgagttttaaagtatgaagtaaaattaaaactgatatggaaaactttctgctcaaaaggagcaagaaagaagagacagaaatcattttcctatctgttatttttaaaggaaactagaattcacttaccccaacattgttgcatctagtcaccatgtttctaaattcatcttcatttccagatcttgtgcataatttatagctaactggttggtatctttcccaccaaggtctgaaagggttgtgaatggcaacattttcatttggtggagagacctacaaattaaacagtcttcataagtaccaaattctgtcttactgtatatcattgaatgttctagaatctaatcaataatacaaaagattcttgaatcttggtataggcagctatctcttgaaaatattaacagcacatcggagggctcttgttgaagaaagattatatcagaaacaaaatatacagttgcaaagaatactacattgttttttcctcagaaaattcttttacttagaatacttacctgtgaagtaaaatgttgcccaagcttcacgtagaagatcagaatagtgtttactacaagcacagtgaattctgcaattgatactatgaatcatacccacctgaacccctccaaatcccttgggagctaaatatcgctcacattcaagagcaatatcaacccatcgccattcaaacagatgaacaatagatgttcgtccttgttgtgtatttgaggaatactgagcccagcagaacccaatggtgaaaagcaaccaaaagagcttcattttgctttgaagttgtcagtgtcctttccagaaactatttatattcctgtaagaagcacattttacaatgtaaatagtagcatgaataaatacttgagggcaaactgtttattcataatctgaaaaggattatcaataataatcctaactggtgaagaacatcaaaaagtctctcatggaaatcatctcaatgacctcttagacattaatgtttcttttcttttcttttttttttttttttgcatatggtagcacttttatttttccttacacaatgacatgttgctgtggcctaatgttctcacataacagcagaaaaccaaaatttgttgtcaactcttaaaagatcgagaattgcatactaaaaaactttacataaattaaaaggatgaatacatttaccggtataaatgcgaaccgcttccaactcaaggcaagtaacagcccacggtgctctggtagataacgtaagctaagaaaggaaactgggtcctatggcttggactttccaaccctgacagaccgacaagacggaaacaactggttcaggagcccttcccagcctctagataaatctcagaacactcagccctgacacattaataccctgcacggatcagagactgctgaccacacagactcaccaagccagacttgtcttccacaagcacgtttttagccatgaagtgaccaagccacgtgtactaaacactgacatcaaaggtatgtacagataccaaggggaagagttaacttgaatgccaggccaaaatcagcaacaagttctacaatccagtgctgatattgagaagagagaaagaccctgtcctcttgttttatattgttttctattcagtaaaaacaacaaggaagcaaaatcaaaggcacaaaaccaggcctgggcctggttggcctaaacccagtagttacaaatcaacttatgatttagaagccgatgttattcatagattccagacattgtatagaagaacattgtgaaactcccttccatattctgtttctccctgaccacgggtgcatgtagtccttgtcgcatatccctggcttgttcaaatcaatcacgaccctttcatgtgacatctttagtgttgtgtgcccttaaaagggacagaaattgtgcacttggggagctcggattttgagacagtagctatccgatgctcccaggtgaataacacccttccttctacaactcggtgtctgagagttttgtctgccgcttgtcctgctacatttcttggttccctgacctggaagcaagataactgatggacggccgaggcagctccttaggcagattaggcatgccttgtggagtaaggccggggcatccctcaggctgccagggactctggccagcctgagggatgggatccaaagagcgctcccaggtaggaaatggccccggttgaacgcctcgccagagcagtgatccccgcggaggattaacacagtggctgaacaccaggaaggaactggcacttggagtccagacatctgaaacttagtaagacaagtcttttcaacttgccccactccacctgagcggaagcttggcctgatcgctcatggtgtgcctgcacccatatcaatttccatatagagattcctagttacagctagttttagatcctctacagtggtaaaaggacaggcagcagcagtagtagtagcaaagggacatttatttcaggaaagttctcgctccaccggccaagagaagccagcacctaaagttctgtttgacccagagctcgaggactcaaggcaggagatggcaccaacagtgccctcaaccccttatccagtggggaggcccccttctcctgagcccacagcccctagaccacccagagtagacaagaacaaaagtgaaactgcgggaaaatccacttccctggcagcccgcttaacggcccaagacgggaattcaaatgccctgagagagcagcgatatactaggacagatgaggtcagacatacggtagaaaggcatgcttttgtgtatcacccttttacctctgctgaactactcaactggaaaaataacactccatcttacactgaaaagcctcaagccctaattgacttgcttcaaagaattatccagactcagaatcctacttaggctgattgccaccagctactcatgtacctctttaaaacacataaaaggcaacaggtgctgcaggcaacagttaaatggctggaggagcacatcccagccaattatcaaagtccccaagaatacataagaattcagctgccaggaacggaccctcaataggatccaaatgaaggaccagatatggaaaggctaagagggtaccgagaggcattaattgaaaggttgaaaaaaggggctcaaaagggtaccaatgtaaataaagtttctgaagtcatccaaggaaaggaggaaagcccagcccagttctatcaaagaccgtgtgaggcctattgcatgtacactcctttcgatctggagagtcctgaaaatcagccgttgattaatacggccttagttattcagagtgcagaagatatccagagaaaattgcaaaaacaggctaggtttgcaggaatgaaaaccttgcagttactggaaagagctaatgaagtatttgtaaata

SEQ ID NO: 89 - DNA, 4001 bp, Homo sapiens
ctattttcctacaagatcaaaaatcaactgtgaaaggaaagtaatgtgaactaaacacctacattcattccagacacttggccaaatatatataggaatgataaactgagagaaccggaaactaccataaataggaggaaaggcaaaaagcccattttggggagacacaactcagatgagactgaaaaggttactatttgggaaatttcagtgggtcaccaggagaaagcctgtactctctactaagcttggaagacaaataaggtagctattcatctcaaattctgctcctcattaaatagataagctacctattcaccacaaaaaaaacccaagaattaggaatggagacacaagtcatctaaaaatgagagcaaatattgtaactggaattaaaattcctcaccagaaaatccttccaggaaatatggatagttatagcggttaaaatttgatgttttgcttcagaagtaaactctgctataaactttaacttatctctttagtagagagcacatatacaaatattttcaaaaattgaacataaggtgacagttacttttgagttttaaagtatgaagtaaaattaaaactgatatggaaaactttctgctcaaaaggagcaagaaagaagagacagaaatcattttcctatctgttatttttaaaggaaactagaattcacttaccccaacattgttgcatctagtcaccatgtttctaaattcatcttcatttccagatcttgtgcataatttatagctaactggttggtatctttcccaccaaggtctgaaagggttgtgaatggcaacattttcatttggtggagagacctacaaattaaacagtcttcataagtaccaaattctgtcttactgtatatcattgaatgttctagaatctaatcaataatacaaaagattcttgaatcttggtataggcagctatctcttgaaaatattaacagcacatcggagggctcttgttgaagaaagattatatcagaaacaaaatatacagttgcaaagaatactacattgttttttcctcagaaaattcttttacttagaatacttacctgtgaagtaaaatgttgcccaagcttcacgtagaagatcagaatagtgtttactacaagcacagtgaattctgcaattgatactatgaatcatacccacctgaacccctccaaatcccttgggagctaaatatcgctcacattcaagagcaatatcaacccatcgccattcaaacagatgaacaatagatgttcgtccttgttgtgtatttgaggaatactgagcccagcagaacccaatggtgaaaagcaaccaaaagagcttcattttgctttgaagttgtcagtgtcctttccagaaactatttatattcctgtaagaagcacattttacaatgtaaatagtagcatgaataaatacttgagggcaaactgtttattcataatctgaaaaggattatcaataataatcctaactggtgaagaacatcaaaaagtctctcatggaaatcatctcaatgacctcttagacattaatgtttcttttcttttctttttttttttttttttgcatatggtagcacttttatttttccttacacaatgacatgttgctgtggcctaatgttctcacataacagcagaaaaccaaaatttgttgtcaactcttaaaagatcgagaattgcatactaaaaaactttacataaattaaaaggatgaatacatttaccggtataaatgcgaaccgcttccaactcaaggcaagtaacagcccacggtgctctggtagataacgtaagctaagaaaggaaactgggtcctatggcttggactttccaaccctgacagaccgacaagacggaaacaactggttcaggagcccttcccagcctctagataaatctcagaacactcagccctgacacattaataccctgcacggatcagagactgctgaccacacagactcaccaagccagacttgtcttccacaagcacgtttttagccatgaagtgaccaagccacgtgtactaaacactgacatcaaaggtatgtacagataccaaggggaagagttaacttgaatgccaggccaaaatcagcaacaagttctacaatccagtgctgatattgagaagagagaaagaccctgtcctcttgttttatattgttttctattcagtaaaaacaacaaggaagcaaaatcaaaggcacaaaaccaggcctgggcctggttggcctaaacccagtagttacaaatcaacttatgatttagaagccgatgttattcatagattccagacattgtatagaagaacattgtgaaactcccttccatattctgtttctccctgaccacgggtgcatgtagtccttgtcgcatatccctggcttgttcaaatcaatcacgaccctttcatgtgacatctttagtgctgtgtgcccttaaaagggacagaaattgtgcacttggggagctcggattttgagacagtagctatccgatgctcccaggtgaataacacccttccttctacaactcggtgtctgagagttttgtctgccgcttgtcctgctacatttcttggttccctgacctggaagcaagataactgatggacggccgaggcagctccttaggcagattaggcatgccttgtggagtaaggccggggcatccctcaggctgccagggactctggccagcctgagggatgggatccaaagagcgctcccaggtaggaaatggccccggttgaacgcctcgccagagcagtgatccccgcggaggattaacacagtggctgaacaccaggaaggaactggcacttggagtccagacatctgaaacttagtaagacaagtcttttcaacttgccccactccacctgagcggaagcttggcctgatcgctcatggtgtgcctgcacccatatcaatttccatatagagattcctagttacagctagttttagatcctctacagtggtaaaaggacaggcagcagcagtagtagtagcaaagggacatttatttcaggaaagttctcgctccaccggccaagagaagccagcacctaaagttctgtttgacccagagctcgaggactcaaggcaggagatggcaccaacagtgccctcaaccccttatccagtggggaggcccccttctcctgagcccacagcccctagaccacccagagtagacaagaacaaaagtgaaactgcgggaaaatccacttccctggcagcccgcttaacggcccaagacgggaattcaaatgccctgagagagcagcgatatactaggacagatgaggtcagacatacggtagaaaggcatgcttttgtgtatcacccttttacctctgctgaactactcaactggaaaaataacactccatcttacactgaaaagcctcaagccctaattgacttgcttcaaagaattatccagactcagaatcctacttaggctgattgccaccagctactcatgtacctctttaaaacacataaaaggcaacaggtgctgcaggcaacagttaaatggctggaggagcacatcccagccaattatcaaagtccccaagaatacataagaattcagctgccaggaacggaccctcaataggatccaaatgaaggaccagatatggaaaggctaagagggtaccgagaggcattaattgaaaggttgaaaaaaggggctcaaaagggtaccaatgtaaataaagtttctgaagtcatccaaggaaaggaggaaagcccagcccagttctatcaaagaccgtgtgaggcctattgcatgtacactcctttcgatctggagagtcctgaaaatcagccgttgattaatacggccttagttattcagagtgcagaagatatccagagaaaattgcaaaaacaggctaggtttgcaggaatgaaaaccttgcagttactggaaagagctaatgaagtatttgtaaata

SEQ ID NO: 90 - DNA, 4001 bp, Homo sapiens
ctattttcctacaagatcaaaaatcaactgtgaaaggaaagtaatgtgaactaaacacctacattcattccagacacttggccaaatatatataggaatgataaactgagagaaccggaaactaccataaataggaggaaaggcaaaaagcccattttggggagacacaactcagatgagactgaaaaggttactatttgggaaatttcagtgggtcaccaggagaaagcctgtactctctactaagcttggaagacaaataaggtagctattcatctcaaattctgctcctcattaaatagataagctacctattcaccacaaaaaaaacccaagaattaggaatggagacacaagtcatctaaaaatgagagcaaatattgtaactggaattaaaattcctcaccagaaaatccttccaggaaatatggatagttatagcggttaaaatttgatgttttgcttcagaagtaaactctgctataaactttaacttatctctttagtagagagcacatatacaaatattttcaaaaattgaacataaggtgacagttacttttgagttttaaagtatgaagtaaaattaaaactgatatggaaaactttctgctcaaaaggagcaagaaagaagagacagaaatcattttcctatctgttatttttaaaggaaactagaattcacttaccccaacattgttgcatctagtcaccatgtttctaaattcatcttcatttccagatcttgtgcataatttatagctaactggttggtatctttcccaccaaggtctgaaagggttgtgaatggcaacattttcatttggtggagagacctacaaattaaacagtcttcataagtaccaaattctgtcttactgtatatcattgaatgttctagaatctaatcaataatacaaaagattcttgaatcttggtataggcagctatctcttgaaaatattaacagcacatcggagggctcttgttgaagaaagattatatcagaaacaaaatatacagttgcaaagaatactacattgttttttcctcagaaaattcttttacttagaatacttacctgtgaagtaaaatgttgcccaagcttcacgtagaagatcagaatagtgtttactacaagcacagtgaattctgcaattgatactatgaatcatacccacctgaacccctccaaatcccttgggagctaaatatcgctcacattcaagagcaatatcaacccatcgccattcaaacagatgaacaatagatgttcgtccttgttgtgtatttgaggaatactgagcccagcagaacccaatggtgaaaagcaaccaaaagagcttcattttgctttgaagttgtcagtgtcctttccagaaactatttatattcctgtaagaagcacattttacaatgtaaatagtagcatgaataaatacttgagggcaaactgtttattcataatctgaaaaggattatcaataataatcctaactggtgaagaacatcaaaaagtctctcatggaaatcatctcaatgacctcttagacattaatgtttcttttcttttcttttttttttttttttgcatatggtagcacttttatttttccttacacaatgacatgttgctgtggcctaatgttctcacataacagcagaaaaccaaaatttgttgtcaactcttaaaagatcgagaattgcatactaaaaaactttacataaattaaaaggatgaatacatttaccggtataaatgcgaaccgcttccaactcaaggcaagtaacagcccacggtgctctggtagataacgtaagctaagaaaggaaactgggtcctatggcttggactttccaaccctgacagaccgacaagacggaaacaactggttcaggagcccttcccagcctctagataaatctcagaacactcagccctgacacattaataccctgcacggatcagagactgctgaccacacagactcaccaagccagacttgtcttccacaagcacgtttttagccatgaagtgaccaagccacgtgtactaaacactgacatcaaaggtatgtacagataccaaggggaagagttaacttgaatgccaggccaaaatcagcaacaagttctacaatccagtgctgatattgagaagagagaaagaccctgtcctcttgttttatattgttttctattcagtaaaaacaacaaggaagcaaaatcaaaggcacaaaaccaggcctgggcctggttggcctaaacccagtagttacaaatcaacttatgatttagaagccgatgttattcatagattccagacattgtatagaagaacattgtgaaactcccttccgtattctgtttctccctgaccacgggtgcatgtagtccttgtcgcatatccctggcttgttcaaatcaatcacgaccctttcatgtgacatctttagtgctgtgtgcccttaaaagggacagaaattgtgcacttggggagctcggattttgagacagtagctatccgatgctcccaggtgaataacacccttccttctacaactcggtgtctgagagttttgtctgccgcttgtcctgctacatttcttggttccctgacctggaagcaagataactgatggacggccgaggcagctccttaggcagattaggcatgccttgtggagtaaggccggggcatccctcaggctgccagggactctggccagcctgagggatgggatccaaagagcgctcccaggtaggaaatggccctggttgaacgcctcgccagagcagtgatccccgcggaggattaacacagtggctgaacaccaggaaggaactggcacttggagtccagacatctgaaacttagtaagacaagtcttttcaacttgccccactccacctgagcggaagcttggcctgatcgctcatggtgtgcctgcacccatatcaatttccatatagagattcctagttacagctagttttagatcctctacagtggtaaaaggacaggcagcagcagtagtagtagcaaagggacatttatttcaggaaagttcttgctccaccggccaagagaagccagcacctaaagttctgtttgacccagagctcgaggactcaaggcaggagatggcaccaacagtgccctcaaccccttatccagtggggaggcccccttctcctgagcccacagcccctagaccacccagagtagacaagaacaaaagtgaaactgcgggaaaatccacttccctggcagcccgcttaacggcccaagacgggaattcaaatgccctgagagagcagcgatatactaggacagatgaggtcagacatacggtagaaaggcatgcttttgtgtatcacccttttacctctgctgaactactcaactggaaaaataacactccatcttacactgaaaagcctcaagccctaattgacttgcttcaaagaattatccagactcagaatcctacttaggctgattgccaccagctactcatgtacctctttaaaacacataaaaggcaacaggtgctgcaggcaacagttaaatggctggaggagcacatcccagccaattatcaaagtccccaagaatacataagaattcagctgccaggaacggaccctcaataggatccaaatgaaggaccagatatggaaaggctaagagggtaccgagaggcattaattgaaaggttgaaaaaaggggctcaaaagggtaccaatgtaaataaagtttctgaagtcatccaaggaaaggaggaaagcccagcccagttctatcaaagaccgtgtgaggcctattgcatgtacactcctttcgatctggagagtcctgaaaatcagccgttgattaatacggccttagttattcagagtgcagaagatatccagagaaaattgcaaaaacaggctaggtttgcaggaatgaaaaccttgcagttactggaaagagctaatgaagtatttgtaaatag

SEQ ID NO: 91 - DNA, 4001 bp, Homo sapiens
gagacacaactcagatgagactgaaaaggttactatttgggaaatttcagtgggtcaccaggagaaagcctgtactctctactaagcttggaagacaaataaggtagctattcatctcaaattctgctcctcattaaatagataagctacctattcaccacaaaaaaaacccaagaattaggaatggagacacaagtcatctaaaaatgagagcaaatattgtaactggaattaaaattcctcaccagaaaatccttccaggaaatatggatagttatagcggttaaaatttgatgttttgcttcagaagtaaactctgctataaactttaacttatctctttagtagagagcacatatacaaatattttcaaaaattgaacataaggtgacagttacttttgagttttaaagtatgaagtaaaattaaaactgatatggaaaactttctgctcaaaaggagcaagaaagaagagacagaaatcattttcctatctgttatttttaaaggaaactagaattcacttaccccaacattgttgcatctagtcaccatgtttctaaattcatcttcatttccagatcttgtgcataatttatagctaactggttggtatctttcccaccaaggtctgaaagggttgtgaatggcaacattttcatttggtggagagacctacaaattaaacagtcttcataagtaccaaattctgtcttactgtatatcattgaatgttctagaatctaatcaataatacaaaagattcttgaatcttggtataggcagctatctcttgaaaatattaacagcacatcggagggctcttgttgaagaaagattatatcagaaacaaaatatacagttgcaaagaatactacattgttttttcctcagaaaattcttttacttagaatacttacctgtgaagtaaaatgttgcccaagcttcacgtagaagatcagaatagtgtttactacaagcacagtgaattctgcaattgatactatgaatcatacccacctgaacccctccaaatcccttgggagctaaatatcgctcacattcaagagcaatatcaacccatcgccattcaaacagatgaacaatagatgttcgtccttgttgtgtatttgaggaatactgagcccagcagaacccaatggtgaaaagcaaccaaaagagcttcattttgctttgaagttgtcagtgtcctttccagaaactatttatattcctgtaagaagcacattttacaatgtaaatagtagcatgaataaatacttgagggcaaactgtttattcataatctgaaaaggattatcaataataatcctaactggtgaagaacatcaaaaagtctctcatggaaatcatctcaatgacctcttagacattaatgtttcttttcttttcttttttttttttttttgcatatggtagcacttttatttttccttacacaatgacatgttgctgtggcctaatgttctcacataacagcagaaaaccaaaatttgttgtcaactcttaaaagatcgagaattgcatactaaaaaactttacataaattaaaaggatgaatacatttaccggtataaatgcgaaccgcttccaactcaaggcaagtaacagcccacggtgctctggtagataacgtaagctaagaaaggaaactgggtcctatggcttggactttccaaccctgacagaccgacaagacggaaacaactggttcaggagcccttcccagcctctagataaatctcagaacactcagccctgacacattaataccctgcacggatcagagactgctgaccacacagactcaccaagccagacttgtcttccacaagcacgtttttagccatgaagtgaccaagccacgtgtactaaacactgacatcaaaggtatgtacagataccaaggggaagagttaacttgaatgccaggccaaaatcagcaacaagttctacaatccagtgctgatattgagaagagagaaagaccctgtcctcttgttttatattgttttctattcagtaaaaacaacaaggaagcaaaatcaaaggcacaaaaccaggcctgggcctggttggcctaaacccagtagttacaaatcaacttatgatttagaagccgatgttattcatagattccagacattgtatagaagaacattgtgaaactcccttccgtattctgtttctccctgaccacgggtgcatgtagtccttgtcgcatatccctggcttgttcaaatcaatcacgaccctttcatgtgacatctttagtgctgtgtgcccttaaaagggacagaaattgtgcacttggggagctcggattttgagacagtagctatccgatgctcccaggtgaataacacccttccttctacaactcggtgtctgagagttttgtctgccgcttgtcctgctacatttcttggttccctgacctggaagcaagataactgatggacggccgaggcagctccttaggcagattaggcatgccttgtggagtaaggccggggcatccctcaggctgccagggactctggccagcctgagggatgggatccaaagagcgctcccaggtaggaaatggccctggttgaacgcctcgccagagcagtgatccccgcggaggattaacacagtggctgaacaccaggaaggaactggcacttggagtccagacatctgaaacttagtaagacaagtcttttcaacttgccccactccacctgagcggaagcttggcctgatcgctcatggtgtgcctgcacccatatcaatttccatatagagattcctagttacagctagttttagatcctctacagtggtaaaaggacaggcagcagcagtagtagtagcaaagggacatttatttcaggaaagttcttgctccaccggccaagagaagccagcacctaaagttctgtttgacccagagctcgaggactcaaggcaggagatggcaccaacagtgccctcaaccccttatccagtggggaggcccccttctcctgagcccacagcccctagaccacccagagtagacaagaacaaaagtgaaactgcgggaaaatccacttccctggcagcccgcttaacggcccaagacgggaattcaaatgccctgagagagcagcgatatactaggacagatgaggtcagacatacggtagaaaggcatgcttttgtgtatcacccttttacctctgctgaactactcaactggaaaaataacactccatcttacactgaaaagcctcaagccctaattgacttgcttcaaagaattatccagactcagaatcctacttaggctgattgccaccagctactcatgtacctctttaaaacacataaaaggcaacaggtgctgcaggcaacagttaaatggctggaggagcacatcccagccaattatcaaagtccccaagaatacataagaattcagctgccaggaacggaccctcaataggatccaaatgaaggaccagatatggaaaggctaagagggtaccgagaggcattaattgaaaggttgaaaaaaggggctcaaaagggtaccaatgtaaataaagtttctgaagtcatccaaggaaaggaggaaagcccagcccagttctatcaaagaccgtgtgaggcctattgcatgtacactcctttcgatctggagagtcctgaaaatcagccgttgattaatacggccttagttattcagagtgcagaagatatccagagaaaattgcaaaaacaggctaggtttgcaggaatgaaaaccttgcagttactggaaagagctaatgaagtatttgtaaatagagatgcaacaagcggccaagaaagccgtaaggagggcgaacgccaggccaggtgaaacgctagtttgctggctgtgacaattagaggaattctcctgaaaaggcagaaaaaagggggttctgggaggaatgccctgtccaatcactcacatttgcagcatg

SEQ ID NO: 92 - DNA, 4001 bp, Homo sapiens
gagacacaactcagatgagactgaaaaggttactatttgggaaatttcagtgggtcaccaggagaaagcctgtactctctactaagcttggaagacaaataaggtagctattcatctcaaattctgctcctcattaaatagataagctacctattcaccacaaaaaaaacccaagaattaggaatggagacacaagtcatctaaaaatgagagcaaatattgtaactggaattaaaattcctcaccagaaaatccttccaggaaatatggatagttatagcggttaaaatttgatgttttgcttcagaagtaaactctgctataaactttaacttatctctttagtagagagcacatatacaaatattttcaaaaattgaacataaggtgacagttacttttgagttttaaagtatgaagtaaaattaaaactgatatggaaaactttctgctcaaaaggagcaagaaagaagagacagaaatcattttcctatctgttatttttaaaggaaactagaattcacttaccccaacattgttgcatctagtcaccatgtttctaaattcatcttcatttccagatcttgtgcataatttatagctaactggttggtatctttcccaccaaggtctgaaagggttgtgaatggcaacattttcatttggtggagagacctacaaattaaacagtcttcataagtaccaaattctgtcttactgtatatcattgaatgttctagaatctaatcaataatacaaaagattcttgaatcttggtataggcagctatctcttgaaaatattaacagcacatcggagggctcttgttgaagaaagattatatcagaaacaaaatatacagttgcaaagaatactacattgttttttcctcagaaaattcttttacttagaatacttacctgtgaagtaaaatgttgcccaagcttcacgtagaagatcagaatagtgtttactacaagcacagtgaattctgcaattgatactatgaatcatacccacctgaacccctccaaatcccttgggagctaaatatcgctcacattcaagagcaatatcaacccatcgccattcaaacagatgaacaatagatgttcgtccttgttgtgtatttgaggaatactgagcccagcagaacccaatggtgaaaagcaaccaaaagagcttcattttgctttgaagttgtcagtgtcctttccagaaactatttatattcctgtaagaagcacattttacaatgtaaatagtagcatgaataaatacttgagggcaaactgtttattcataatctgaaaaggattatcaataataatcctaactggtgaagaacatcaaaaagtctctcatggaaatcatctcaatgacctcttagacattaatgtttcttttcttttctttttttttttttttttgcatatggtagcacttttatttttccttacacaatgacatgttgctgtggcctaatgttctcacataacagcagaaaaccaaaatttgttgtcaactcttaaaagatcgagaattgcatactaaaaaactttacataaattaaaaggatgaatacatttaccggtataaatgcgaaccgcttccaactcaaggcaagtaacagcccacggtgctctggtagataacgtaagctaagaaaggaaactgggtcctatggcttggactttccaaccctgacagaccgacaagacggaaacaactggttcaggagcccttcccagcctctagataaatctcagaacactcagccctgacacattaataccctgcacggatcagagactgctgaccacacagactcaccaagccagacttgtcttccacaagcacgtttttagccatgaagtgaccaagccacgtgtactaaacactgacatcaaaggtatgtacagataccaaggggaagagttaacttgaatgccaggccaaaatcagcaacaagttctacaatccagtgctgatattgagaagagagaaagaccctgtcctcttgttttatattgttttctattcagtaaaaacaacaaggaagcaaaatcaaaggcacaaaaccaggcctgggcctggttggcctaaacccagtagttacaaatcaacttatgatttagaagccgatgttattcatagattccagacattgtatagaagaacattgtgaaactcccttccatattctgtttctccctgaccacgggtgcatgtagtccttgtcgcatatccctggcttgttcaaatcaatcacgaccctttcatgtgacatctttagtgctgtgtgcccttaaaagggacagaaattgtgcacttggggagctcggattttgagacagtagctatccgatgctcccaggtgaataacacccttccttctacaactcggtgtctgagagttttgtctgccgcttgtcctgctacatttcttggttccctgacctggaagcaagataactgatggacggccgaggcagctccttaggcagattaggcatgccttgtggagtaaggccggggcatccctcaggctgccagggactctggccagcctgagggatgggatccaaagagcgctcccaggtaggaaatggccccggttgaacgcctcgccagagcagtgatccccgcggaggattaacacagtggctgaacaccaggaaggaactggcacttggagtccagacatctgaaacttagtaagacaagtcttttcaacttgccccactccacctgagcggaagcttggcctgatcgctcatggtgtgcctgcacccatatcaatttccatatagagattcctagttacagctagttttagatcctctacagtggtaaaaggacaggcagcagcagtagtagtagcaaagggacatttatttcaggaaagttctcgctccaccggccaagagaagccagcacctaaagttctgtttgacccagagctcgaggactcaaggcaggagatggcaccaacagtgccctcaaccccttatccagtggggaggcccccttctcctgagcccacagcccctagaccacccagagtagacaagaacaaaagtgaaactgcgggaaaatccacttccctggcagcccgcttaacggcccaagacgggaattcaaatgccctgagagagcagcgatatactaggacagatgaggtcagacatacggtagaaaggcatgcttttgtgtatcacccttttacctctgctgaactactcaactggaaaaataacactccatcttacactgaaaagcctcaagccctaattgacttgcttcaaagaattatccagactcagaatcctacttaggctgattgccaccagctactcatgtacctctttaaaacacataaaaggcaacaggtgctgcaggcaacagttaaatggctggaggagcacatcccagccaattatcaaagtccccaagaatacataagaattcagctgccaggaacggaccctcaataggatccaaatgaaggaccagatatggaaaggctaagagggtaccgagaggcattaattgaaaggttgaaaaaaggggctcaaaagggtaccaatgtaaataaagtttctgaagtcatccaaggaaaggaggaaagcccagcccagttctatcaaagaccgtgtgaggcctattgcatgtacactcctttcgatctggagagtcctgaaaatcagccgttgattaatacggccttagttattcagagtgcagaagatatccagagaaaattgcaaaaacaggctaggtttgcaggaatgaaaaccttgcagttactggaaagagctaatgaagtatttgtaaatagagatgcaacaagcggccaagaaagccgtaaggagggcgaacgccaggccaggtgaaacgctagtttgctggctgtgacaattagaggaattctcctgaaaaggcagaaaaaagggggttctgggaggaatgccctgtccaatcactcacatttgcagcat

SEQ ID NO: 93 - DNA, 4001 bp, Homo sapiens
ggagacacaactcagatgagactgaaaaggttactatttgggaaatttcagtgggtcaccaggagaaagcctgtactctctactaagcttggaagacaaataaggtagctattcatctcaaattctgctcctcattaaatagataagctacctattcaccacaaaaaaaacccaagaattaggaatggagacacaagtcatctaaaaatgagagcaaatattgtaactggaattaaaattcctcaccagaaaatccttccaggaaatatggatagttatagcggttaaaatttgatgttttgcttcagaagtaaactctgctataaactttaacttatctctttagtagagagcacatatacaaatattttcaaaaattgaacataaggtgacagttacttttgagttttaaagtatgaagtaaaattaaaactgatatggaaaactttctgctcaaaaggagcaagaaagaagagacagaaatcattttcctatctgttatttttaaaggaaactagaattcacttaccccaacattgttgcatctagtcaccatgtttctaaattcatcttcatttccagatcttgtgcataatttatagctaactggttggtatctttcccaccaaggtctgaaagggttgtgaatggcaacattttcatttggtggagagacctacaaattaaacagtcttcataagtaccaaattctgtcttactgtatatcattgaatgttctagaatctaatcaataatacaaaagattcttgaatcttggtataggcagctatctcttgaaaatattaacagcacatcggagggctcttgttgaagaaagattatatcagaaacaaaatatacagttgcaaagaatactacattgttttttcctcagaaaattcttttacttagaatacttacctgtgaagtaaaatgttgcccaagcttcacgtagaagatcagaatagtgtttactacaagcacagtgaattctgcaattgatactatgaatcatacccacctgaacccctccaaatcccttgggagctaaatatcgctcacattcaagagcaatatcaacccatcgccattcaaacagatgaacaatagatgttcgtccttgttgtgtatttgaggaatactgagcccagcagaacccaatggtgaaaagcaaccaaaagagcttcattttgctttgaagttgtcagtgtcctttccagaaactatttatattcctgtaagaagcacattttacaatgtaaatagtagcatgaataaatacttgagggcaaactgtttattcataatctgaaaaggattatcaataataatcctaactggtgaagaacatcaaaaagtctctcatggaaatcatctcaatgacctcttagacattaatgtttcttttcttttcttttttttttttttttgcatatggtagcacttttatttttccttacacaatgacatgttgctgtggcctaatgttctcacataacagcagaaaaccaaaatttgttgtcaactcttaaaagatcgagaattgcatactaaaaaactttacataaattaaaaggatgaatacatttaccggtataaatgcgaaccgcttccaactcaaggcaagtaacagcccacggtgctctggtagataacgtaagctaagaaaggaaactgggtcctatggcttggactttccaaccctgacagaccgacaagacggaaacaactggttcaggagcccttcccagcctctagataaatctcagaacactcagccctgacacattaataccctgcacggatcagagactgctgaccacacagactcaccaagccagacttgtcttccacaagcacgtttttagccatgaagtgaccaagccacgtgtactaaacactgacatcaaaggtatgtacagataccaaggggaagagttaacttgaatgccaggccaaaatcagcaacaagttctacaatccagtgctgatattgagaagagagaaagaccctgtcctcttgttttatattgttttctattcagtaaaaacaacaaggaagcaaaatcaaaggcacaaaaccaggcctgggcctggttggcctaaacccagtagttacaaatcaacttatgatttagaagccgatgttattcatagattccagacattgtatagaagaacattgtgaaactcccttccatattctgtttctccctgaccacgggtgcatgtagtccttgtcgcatatccctggcttgttcaaatcaatcacgaccctttcatgtgacatctttagtgttgtgtgcccttaaaagggacagaaattgtgcacttggggagctcggattttgagacagtagctatccgatgctcccaggtgaataacacccttccttctacaactcggtgtctgagagttttgtctgccgcttgtcctgctacatttcttggttccctgacctggaagcaagataactgatggacggccgaggcagctccttaggcagattaggcatgccttgtggagtaaggccggggcatccctcaggctgccagggactctggccagcctgagggatgggatccaaagagcgctcccaggtaggaaatggccccggttgaacgcctcgccagagcagtgatccccgcggaggattaacacagtggctgaacaccaggaaggaactggcacttggagtccagacatctgaaacttagtaagacaagtcttttcaacttgccccactccacctgagcggaagcttggcctgatcgctcatggtgtgcctgcacccatatcaatttccatatagagattcctagttacagctagttttagatcctctacagtggtaaaaggacaggcagcagcagtagtagtagcaaagggacatttatttcaggaaagttctcgctccaccggccaagagaagccagcacctaaagttctgtttgacccagagctcgaggactcaaggcaggagatggcaccaacagtgccctcaaccccttatccagtggggaggcccccttctcctgagcccacagcccctagaccacccagagtagacaagaacaaaagtgaaactgcgggaaaatccacttccctggcagcccgcttaacggcccaagacgggaattcaaatgccctgagagagcagcgatatactaggacagatgaggtcagacatacggtagaaaggcatgcttttgtgtatcacccttttacctctgctgaactactcaactggaaaaataacactccatcttacactgaaaagcctcaagccctaattgacttgcttcaaagaattatccagactcagaatcctacttaggctgattgccaccagctactcatgtacctctttaaaacacataaaaggcaacaggtgctgcaggcaacagttaaatggctggaggagcacatcccagccaattatcaaagtccccaagaatacataagaattcagctgccaggaacggaccctcaataggatccaaatgaaggaccagatatggaaaggctaagagggtaccgagaggcattaattgaaaggttgaaaaaaggggctcaaaagggtaccaatgtaaataaagtttctgaagtcatccaaggaaaggaggaaagcccagcccagttctatcaaagaccgtgtgaggcctattgcatgtacactcctttcgatctggagagtcctgaaaatcagccgttgattaatacggccttagttattcagagtgcagaagatatccagagaaaattgcaaaaacaggctaggtttgcaggaatgaaaaccttgcagttactggaaagagctaatgaagtatttgtaaatagagatgcaacaagcggccaagaaagccgtaaggagggcgaacgccaggccaggtgaaacgctagtttgctggctgtgacaattagaggaattctcctgaaaaggcagaaaaaagggggttctgggaggaatgccctgtccaatcactcacatttgcagcat

SEQ ID NO: 94 - DNA, 4001 bp, Homo sapiens
ccaaaatatttcataccttataactattttcctacaagatcaaaaatcaactgtgaaaggaaagtaatgtgaactaaacacctacattcattccagacacttggccaaatatatataggaatgataaactgagagaaccggaaactaccataaataggaggaaaggcaaaaagcccattttggggagacacaactcagatgagactgaaaaggttactatttgggaaatttcagtgggtcaccaggagaaagcctgtactctctactaagcttggaagacaaataaggtagctattcatctcaaattctgctcctcattaaatagataagctacctattcaccacaaaaaaaacccaagaattaggaatggagacacaagtcatctaaaaatgagagcaaatattgtaactggaattaaaattcctcaccagaaaatccttccaggaaatatggatagttatagcggttaaaatttgatgttttgcttcagaagtaaactctgctataaactttaacttatctctttagtagagagcacatatacaaatattttcaaaaattgaacataaggtgacagttacttttgagttttaaagtatgaagtaaaattaaaactgatatggaaaactttctgctcaaaaggagcaagaaagaagagacagaaatcattttcctatctgttatttttaaaggaaactagaattcacttaccccaacattgttgcatctagtcaccatgtttctaaattcatcttcatttccagatcttgtgcataatttatagctaactggttggtatctttcccaccaaggtctgaaagggttgtgaatggcaacattttcatttggtggagagacctacaaattaaacagtcttcataagtaccaaattctgtcttactgtatatcattgaatgttctagaatctaatcaataatacaaaagattcttgaatcttggtataggcagctatctcttgaaaatattaacagcacatcggagggctcttgttgaagaaagattatatcagaaacaaaatatacagttgcaaagaatactacattgttttttcctcagaaaattcttttacttagaatacttacctgtgaagtaaaatgttgcccaagcttcacgtagaagatcagaatagtgtttactacaagcacagtgaattctgcaattgatactatgaatcatacccacctgaacccctccaaatcccttgggagctaaatatcgctcacattcaagagcaatatcaacccatcgccattcaaacagatgaacaatagatgttcgtccttgttgtgtatttgaggaatactgagcccagcagaacccaatggtgaaaagcaaccaaaagagcttcattttgctttgaagttgtcagtgtcctttccagaaactatttatattcctgtaagaagcacattttacaatgtaaatagtagcatgaataaatacttgagggcaaactgtttattcataatctgaaaaggattatcaataataatcctaactggtgaagaacatcaaaaagtctctcatggaaatcatctcaatgacctcttagacattaatgtttcttttcttttcttttttttttttttttgcatatggtagcacttttatttttccttacacaatgacatgttgctgtggcctaatgttctcacataacagcagaaaaccaaaatttgttgtcaactcttaaaagatcgagaattgcatactaaaaaactttacataaattaaaaggatgaatacatttaccggtataaatgcgaaccgcttccaactcaaggcaagtaacagcccacggtgctctggtagataacgtaagctaagaaaggaaactgggtcctatggcttggactttccaaccctgacagaccgacaagacggaaacaactggttcaggagcccttcccagcctctagataaatctcagaacactcagccctgacacattaataccctgcacggatcagagactgctgaccacacagactcaccaagccagacttgtcttccacaagcacgtttttagccatgaagtgaccaagccacgtgtactaaacactgacatcaaaggtatgtacagataccaaggggaagagttaacttgaatgccaggccaaaatcagcaacaagttctacaatccagtgctgatattgagaagagagaaagaccctgtcctcttgttttatattgttttctattcagtaaaaacaacaaggaagcaaaatcaaaggcacaaaaccaggcctgggcctggttggcctaaacccagtagttacaaatcaacttatgatttagaagccgatgttattcatagattccagacattgtatagaagaacattgtgaaactcccttccgtattctgtttctccctgaccacgggtgcatgtagtccttgtcgcatatccctggcttgttcaaatcaatcacgaccctttcatgtgacatctttagtgctgtgtgcccttaaaagggacagaaattgtgcacttggggagctcggattttgagacagtagctatccgatgctcccaggtgaataacacccttccttctacaactcggtgtctgagagttttgtctgccgcttgtcctgctacatttcttggttccctgacctggaagcaagataactgatggacggccgaggcagctccttaggcagattaggcatgccttgtggagtaaggccggggcatccctcaggctgccagggactctggccagcctgagggatgggatccaaagagcgctcccaggtaggaaatggccctggttgaacgcctcgccagagcagtgatccccgcggaggattaacacagtggctgaacaccaggaaggaactggcacttggagtccagacatctgaaacttagtaagacaagtcttttcaacttgccccactccacctgagcggaagcttggcctgatcgctcatggtgtgcctgcacccatatcaatttccatatagagattcctagttacagctagttttagatcctctacagtggtaaaaggacaggcagcagcagtagtagtagcaaagggacatttatttcaggaaagttcttgctccaccggccaagagaagccagcacctaaagttctgtttgacccagagctcgaggactcaaggcaggagatggcaccaacagtgccctcaaccccttatccagtggggaggcccccttctcctgagcccacagcccctagaccacccagagtagacaagaacaaaagtgaaactgcgggaaaatccacttccctggcagcccgcttaacggcccaagacgggaattcaaatgccctgagagagcagcgatatactaggacagatgaggtcagacatacggtagaaaggcatgcttttgtgtatcacccttttacctctgctgaactactcaactggaaaaataacactccatcttacactgaaaagcctcaagccctaattgacttgcttcaaagaattatccagactcagaatcctacttaggctgattgccaccagctactcatgtacctctttaaaacacataaaaggcaacaggtgctgcaggcaacagttaaatggctggaggagcacatcccagccaattatcaaagtccccaagaatacataagaattcagctgccaggaacggaccctcaataggatccaaatgaaggaccagatatggaaaggctaagagggtaccgagaggcattaattgaaaggttgaaaaaaggggctcaaaagggtaccaatgtaaataaagtttctgaagtcatccaaggaaaggaggaaagcccagcccagttctatcaaagaccgtgtgaggcctattgcatgtacactcctttcgatctggagagtcctgaaaatcagccgttgattaatacggccttagttattcagagtgcagaagatatccagagaaaattgcaaaaacaggctaggtttgcaggaatgaaaaccttgcagttactggaaaga

SEQ ID NO: 95 - DNA, 4001 bp, Homo sapiens
ccaaaatatttcataccttataactattttcctacaagatcaaaaatcaactgtgaaaggaaagtaatgtgaactaaacacctacattcattccagacacttggccaaatatatataggaatgataaactgagagaaccggaaactaccataaataggaggaaaggcaaaaagcccattttggggagacacaactcagatgagactgaaaaggttactatttgggaaatttcagtgggtcaccaggagaaagcctgtactctctactaagcttggaagacaaataaggtagctattcatctcaaattctgctcctcattaaatagataagctacctattcaccacaaaaaaaacccaagaattaggaatggagacacaagtcatctaaaaatgagagcaaatattgtaactggaattaaaattcctcaccagaaaatccttccaggaaatatggatagttatagcggttaaaatttgatgttttgcttcagaagtaaactctgctataaactttaacttatctctttagtagagagcacatatacaaatattttcaaaaattgaacataaggtgacagttacttttgagttttaaagtatgaagtaaaattaaaactgatatggaaaactttctgctcaaaaggagcaagaaagaagagacagaaatcattttcctatctgttatttttaaaggaaactagaattcacttaccccaacattgttgcatctagtcaccatgtttctaaattcatcttcatttccagatcttgtgcataatttatagctaactggttggtatctttcccaccaaggtctgaaagggttgtgaatggcaacattttcatttggtggagagacctacaaattaaacagtcttcataagtaccaaattctgtcttactgtatatcattgaatgttctagaatctaatcaataatacaaaagattcttgaatcttggtataggcagctatctcttgaaaatattaacagcacatcggagggctcttgttgaagaaagattatatcagaaacaaaatatacagttgcaaagaatactacattgttttttcctcagaaaattcttttacttagaatacttacctgtgaagtaaaatgttgcccaagcttcacgtagaagatcagaatagtgtttactacaagcacagtgaattctgcaattgatactatgaatcatacccacctgaacccctccaaatcccttgggagctaaatatcgctcacattcaagagcaatatcaacccatcgccattcaaacagatgaacaatagatgttcgtccttgttgtgtatttgaggaatactgagcccagcagaacccaatggtgaaaagcaaccaaaagagcttcattttgctttgaagttgtcagtgtcctttccagaaactatttatattcctgtaagaagcacattttacaatgtaaatagtagcatgaataaatacttgagggcaaactgtttattcataatctgaaaaggattatcaataataatcctaactggtgaagaacatcaaaaagtctctcatggaaatcatctcaatgacctcttagacattaatgtttcttttcttttctttttttttttttttttgcatatggtagcacttttatttttccttacacaatgacatgttgctgtggcctaatgttctcacataacagcagaaaaccaaaatttgttgtcaactcttaaaagatcgagaattgcatactaaaaaactttacataaattaaaaggatgaatacatttaccggtataaatgcgaaccgcttccaactcaaggcaagtaacagcccacggtgctctggtagataacgtaagctaagaaaggaaactgggtcctatggcttggactttccaaccctgacagaccgacaagacggaaacaactggttcaggagcccttcccagcctctagataaatctcagaacactcagccctgacacattaataccctgcacggatcagagactgctgaccacacagactcaccaagccagacttgtcttccacaagcacgtttttagccatgaagtgaccaagccacgtgtactaaacactgacatcaaaggtatgtacagataccaaggggaagagttaacttgaatgccaggccaaaatcagcaacaagttctacaatccagtgctgatattgagaagagagaaagaccctgtcctcttgttttatattgttttctattcagtaaaaacaacaaggaagcaaaatcaaaggcacaaaaccaggcctgggcctggttggcctaaacccagtagttacaaatcaacttatgatttagaagccgatgttattcatagattccagacattgtatagaagaacattgtgaaactcccttccatattctgtttctccctgaccacgggtgcatgtagtccttgtcgcatatccctggcttgttcaaatcaatcacgaccctttcatgtgacatctttagtgctgtgtgcccttaaaagggacagaaattgtgcacttggggagctcggattttgagacagtagctatccgatgctcccaggtgaataacacccttccttctacaactcggtgtctgagagttttgtctgccgcttgtcctgctacatttcttggttccctgacctggaagcaagataactgatggacggccgaggcagctccttaggcagattaggcatgccttgtggagtaaggccggggcatccctcaggctgccagggactctggccagcctgagggatgggatccaaagagcgctcccaggtaggaaatggccccggttgaacgcctcgccagagcagtgatccccgcggaggattaacacagtggctgaacaccaggaaggaactggcacttggagtccagacatctgaaacttagtaagacaagtcttttcaacttgccccactccacctgagcggaagcttggcctgatcgctcatggtgtgcctgcacccatatcaatttccatatagagattcctagttacagctagttttagatcctctacagtggtaaaaggacaggcagcagcagtagtagtagcaaagggacatttatttcaggaaagttctcgctccaccggccaagagaagccagcacctaaagttctgtttgacccagagctcgaggactcaaggcaggagatggcaccaacagtgccctcaaccccttatccagtggggaggcccccttctcctgagcccacagcccctagaccacccagagtagacaagaacaaaagtgaaactgcgggaaaatccacttccctggcagcccgcttaacggcccaagacgggaattcaaatgccctgagagagcagcgatatactaggacagatgaggtcagacatacggtagaaaggcatgcttttgtgtatcacccttttacctctgctgaactactcaactggaaaaataacactccatcttacactgaaaagcctcaagccctaattgacttgcttcaaagaattatccagactcagaatcctacttaggctgattgccaccagctactcatgtacctctttaaaacacataaaaggcaacaggtgctgcaggcaacagttaaatggctggaggagcacatcccagccaattatcaaagtccccaagaatacataagaattcagctgccaggaacggaccctcaataggatccaaatgaaggaccagatatggaaaggctaagagggtaccgagaggcattaattgaaaggttgaaaaaaggggctcaaaagggtaccaatgtaaataaagtttctgaagtcatccaaggaaaggaggaaagcccagcccagttctatcaaagaccgtgtgaggcctattgcatgtacactcctttcgatctggagagtcctgaaaatcagccgttgattaatacggccttagttattcagagtgcagaagatatccagagaaaattgcaaaaacaggctaggtttgcaggaatgaaaaccttgcagttactggaaag

SEQ ID NO: 96 - DNA, 4001 bp, Homo sapiens
tccaaaatatttcataccttataactattttcctacaagatcaaaaatcaactgtgaaaggaaagtaatgtgaactaaacacctacattcattccagacacttggccaaatatatataggaatgataaactgagagaaccggaaactaccataaataggaggaaaggcaaaaagcccattttggggagacacaactcagatgagactgaaaaggttactatttgggaaatttcagtgggtcaccaggagaaagcctgtactctctactaagcttggaagacaaataaggtagctattcatctcaaattctgctcctcattaaatagataagctacctattcaccacaaaaaaaacccaagaattaggaatggagacacaagtcatctaaaaatgagagcaaatattgtaactggaattaaaattcctcaccagaaaatccttccaggaaatatggatagttatagcggttaaaatttgatgttttgcttcagaagtaaactctgctataaactttaacttatctctttagtagagagcacatatacaaatattttcaaaaattgaacataaggtgacagttacttttgagttttaaagtatgaagtaaaattaaaactgatatggaaaactttctgctcaaaaggagcaagaaagaagagacagaaatcattttcctatctgttatttttaaaggaaactagaattcacttaccccaacattgttgcatctagtcaccatgtttctaaattcatcttcatttccagatcttgtgcataatttatagctaactggttggtatctttcccaccaaggtctgaaagggttgtgaatggcaacattttcatttggtggagagacctacaaattaaacagtcttcataagtaccaaattctgtcttactgtatatcattgaatgttctagaatctaatcaataatacaaaagattcttgaatcttggtataggcagctatctcttgaaaatattaacagcacatcggagggctcttgttgaagaaagattatatcagaaacaaaatatacagttgcaaagaatactacattgttttttcctcagaaaattcttttacttagaatacttacctgtgaagtaaaatgttgcccaagcttcacgtagaagatcagaatagtgtttactacaagcacagtgaattctgcaattgatactatgaatcatacccacctgaacccctccaaatcccttgggagctaaatatcgctcacattcaagagcaatatcaacccatcgccattcaaacagatgaacaatagatgttcgtccttgttgtgtatttgaggaatactgagcccagcagaacccaatggtgaaaagcaaccaaaagagcttcattttgctttgaagttgtcagtgtcctttccagaaactatttatattcctgtaagaagcacattttacaatgtaaatagtagcatgaataaatacttgagggcaaactgtttattcataatctgaaaaggattatcaataataatcctaactggtgaagaacatcaaaaagtctctcatggaaatcatctcaatgacctcttagacattaatgtttcttttcttttcttttttttttttttttgcatatggtagcacttttatttttccttacacaatgacatgttgctgtggcctaatgttctcacataacagcagaaaaccaaaatttgttgtcaactcttaaaagatcgagaattgcatactaaaaaactttacataaattaaaaggatgaatacatttaccggtataaatgcgaaccgcttccaactcaaggcaagtaacagcccacggtgctctggtagataacgtaagctaagaaaggaaactgggtcctatggcttggactttccaaccctgacagaccgacaagacggaaacaactggttcaggagcccttcccagcctctagataaatctcagaacactcagccctgacacattaataccctgcacggatcagagactgctgaccacacagactcaccaagccagacttgtcttccacaagcacgtttttagccatgaagtgaccaagccacgtgtactaaacactgacatcaaaggtatgtacagataccaaggggaagagttaacttgaatgccaggccaaaatcagcaacaagttctacaatccagtgctgatattgagaagagagaaagaccctgtcctcttgttttatattgttttctattcagtaaaaacaacaaggaagcaaaatcaaaggcacaaaaccaggcctgggcctggttggcctaaacccagtagttacaaatcaacttatgatttagaagccgatgttattcatagattccagacattgtatagaagaacattgtgaaactcccttccatattctgtttctccctgaccacgggtgcatgtagtccttgtcgcatatccctggcttgttcaaatcaatcacgaccctttcatgtgacatctttagtgttgtgtgcccttaaaagggacagaaattgtgcacttggggagctcggattttgagacagtagctatccgatgctcccaggtgaataacacccttccttctacaactcggtgtctgagagttttgtctgccgcttgtcctgctacatttcttggttccctgacctggaagcaagataactgatggacggccgaggcagctccttaggcagattaggcatgccttgtggagtaaggccggggcatccctcaggctgccagggactctggccagcctgagggatgggatccaaagagcgctcccaggtaggaaatggccccggttgaacgcctcgccagagcagtgatccccgcggaggattaacacagtggctgaacaccaggaaggaactggcacttggagtccagacatctgaaacttagtaagacaagtcttttcaacttgccccactccacctgagcggaagcttggcctgatcgctcatggtgtgcctgcacccatatcaatttccatatagagattcctagttacagctagttttagatcctctacagtggtaaaaggacaggcagcagcagtagtagtagcaaagggacatttatttcaggaaagttctcgctccaccggccaagagaagccagcacctaaagttctgtttgacccagagctcgaggactcaaggcaggagatggcaccaacagtgccctcaaccccttatccagtggggaggcccccttctcctgagcccacagcccctagaccacccagagtagacaagaacaaaagtgaaactgcgggaaaatccacttccctggcagcccgcttaacggcccaagacgggaattcaaatgccctgagagagcagcgatatactaggacagatgaggtcagacatacggtagaaaggcatgcttttgtgtatcacccttttacctctgctgaactactcaactggaaaaataacactccatcttacactgaaaagcctcaagccctaattgacttgcttcaaagaattatccagactcagaatcctacttaggctgattgccaccagctactcatgtacctctttaaaacacataaaaggcaacaggtgctgcaggcaacagttaaatggctggaggagcacatcccagccaattatcaaagtccccaagaatacataagaattcagctgccaggaacggaccctcaataggatccaaatgaaggaccagatatggaaaggctaagagggtaccgagaggcattaattgaaaggttgaaaaaaggggctcaaaagggtaccaatgtaaataaagtttctgaagtcatccaaggaaaggaggaaagcccagcccagttctatcaaagaccgtgtgaggcctattgcatgtacactcctttcgatctggagagtcctgaaaatcagccgttgattaatacggccttagttattcagagtgcagaagatatccagagaaaattgcaaaaacaggctaggtttgcaggaatgaaaaccttgcagttactggaaag

SEQ ID NO: 97 - DNA, 4001 bp, Homo sapiens
aactattttcctacaagatcaaaaatcaactgtgaaaggaaagtaatgtgaactaaacacctacattcattccagacacttggccaaatatatataggaatgataaactgagagaaccggaaactaccataaataggaggaaaggcaaaaagcccattttggggagacacaactcagatgagactgaaaaggttactatttgggaaatttcagtgggtcaccaggagaaagcctgtactctctactaagcttggaagacaaataaggtagctattcatctcaaattctgctcctcattaaatagataagctacctattcaccacaaaaaaaacccaagaattaggaatggagacacaagtcatctaaaaatgagagcaaatattgtaactggaattaaaattcctcaccagaaaatccttccaggaaatatggatagttatagcggttaaaatttgatgttttgcttcagaagtaaactctgctataaactttaacttatctctttagtagagagcacatatacaaatattttcaaaaattgaacataaggtgacagttacttttgagttttaaagtatgaagtaaaattaaaactgatatggaaaactttctgctcaaaaggagcaagaaagaagagacagaaatcattttcctatctgttatttttaaaggaaactagaattcacttaccccaacattgttgcatctagtcaccatgtttctaaattcatcttcatttccagatcttgtgcataatttatagctaactggttggtatctttcccaccaaggtctgaaagggttgtgaatggcaacattttcatttggtggagagacctacaaattaaacagtcttcataagtaccaaattctgtcttactgtatatcattgaatgttctagaatctaatcaataatacaaaagattcttgaatcttggtataggcagctatctcttgaaaatattaacagcacatcggagggctcttgttgaagaaagattatatcagaaacaaaatatacagttgcaaagaatactacattgttttttcctcagaaaattcttttacttagaatacttacctgtgaagtaaaatgttgcccaagcttcacgtagaagatcagaatagtgtttactacaagcacagtgaattctgcaattgatactatgaatcatacccacctgaacccctccaaatcccttgggagctaaatatcgctcacattcaagagcaatatcaacccatcgccattcaaacagatgaacaatagatgttcgtccttgttgtgtatttgaggaatactgagcccagcagaacccaatggtgaaaagcaaccaaaagagcttcattttgctttgaagttgtcagtgtcctttccagaaactatttatattcctgtaagaagcacattttacaatgtaaatagtagcatgaataaatacttgagggcaaactgtttattcataatctgaaaaggattatcaataataatcctaactggtgaagaacatcaaaaagtctctcatggaaatcatctcaatgacctcttagacattaatgtttcttttcttttcttttttttttttttttgcatatggtagcacttttatttttccttacacaatgacatgttgctgtggcctaatgttctcacataacagcagaaaaccaaaatttgttgtcaactcttaaaagatcgagaattgcatactaaaaaactttacataaattaaaaggatgaatacatttaccggtataaatgcgaaccgcttccaactcaaggcaagtaacagcccacggtgctctggtagataacgtaagctaagaaaggaaactgggtcctatggcttggactttccaaccctgacagaccgacaagacggaaacaactggttcaggagcccttcccagcctctagataaatctcagaacactcagccctgacacattaataccctgcacggatcagagactgctgaccacacagactcaccaagccagacttgtcttccacaagcacgtttttagccatgaagtgaccaagccacgtgtactaaacactgacatcaaaggtatgtacagataccaaggggaagagttaacttgaatgccaggccaaaatcagcaacaagttctacaatccagtgctgatattgagaagagagaaagaccctgtcctcttgttttatattgttttctattcagtaaaaacaacaaggaagcaaaatcaaaggcacaaaaccaggcctgggcctggttggcctaaacccagtagttacaaatcaacttatgatttagaagccgatgttattcatagattccagacattgtatagaagaacattgtgaaactcccttccatattctgtttctccctgaccacgggtgcatgtagtccttgtcgcatatccctggcttgttcaaatcaatcacgaccctttcatgtgacatctttagtgttgtgtgcccttaaaagggacagaaattgtgcacttggggagctcggattttgagacagtagctatccgatgctcccaggtgaataacacccttccttctacaactcggtgtctgagagttttgtctgccgcttgtcctgctacatttcttggttccctgacctggaagcaagataactgatggacggccgaggcagctccttaggcagattaggcatgccttgtggagtaaggccggggcatccctcaggctgccagggactctggccagcctgagggatgggatccaaagagcgctcccaggtaggaaatggccccggttgaacgcctcgccagagcagtgatccccgcggaggattaacacagtggctgaacaccaggaaggaactggcacttggagtccagacatctgaaacttagtaagacaagtcttttcaacttgccccactccacctgagcggaagcttggcctgatcgctcatggtgtgcctgcacccatatcaatttccatatagagattcctagttacagctagttttagatcctctacagtggtaaaaggacaggcagcagcagtagtagtagcaaagggacatttatttcaggaaagttctcgctccaccggccaagagaagccagcacctaaagttctgtttgacccagagctcgaggactcaaggcaggagatggcaccaacagtgccctcaaccccttatccagtggggaggcccccttctcctgagcccacagcccctagaccacccagagtagacaagaacaaaagtgaaactgcgggaaaatccacttccctggcagcccgcttaacggcccaagacgggaattcaaatgccctgagagagcagcgatatactaggacagatgaggtcagacatacggtagaaaggcatgcttttgtgtatcacccttttacctctgctgaactactcaactggaaaaataacactccatcttacactgaaaagcctcaagccctaattgacttgcttcaaagaattatccagactcagaatcctacttaggctgattgccaccagctactcatgtacctctttaaaacacataaaaggcaacaggtgctgcaggcaacagttaaatggctggaggagcacatcccagccaattatcaaagtccccaagaatacataagaattcagctgccaggaacggaccctcaataggatccaaatgaaggaccagatatggaaaggctaagagggtaccgagaggcattaattgaaaggttgaaaaaaggggctcaaaagggtaccaatgtaaataaagtttctgaagtcatccaaggaaaggaggaaagcccagcccagttctatcaaagaccgtgtgaggcctattgcatgtacactcctttcgatctggagagtcctgaaaatcagccgttgattaatacggccttagttattcagagtgcagaagatatccagagaaaattgcaaaaacaggctaggtttgcaggaatgaaaaccttgcagttactggaaagagctaatgaagtatttgtaaat

SEQ ID NO: 98 - DNA, 4001 bp, Homo sapiens
actattttcctacaagatcaaaaatcaactgtgaaaggaaagtaatgtgaactaaacacctacattcattccagacacttggccaaatatatataggaatgataaactgagagaaccggaaactaccataaataggaggaaaggcaaaaagcccattttggggagacacaactcagatgagactgaaaaggttactatttgggaaatttcagtgggtcaccaggagaaagcctgtactctctactaagcttggaagacaaataaggtagctattcatctcaaattctgctcctcattaaatagataagctacctattcaccacaaaaaaaacccaagaattaggaatggagacacaagtcatctaaaaatgagagcaaatattgtaactggaattaaaattcctcaccagaaaatccttccaggaaatatggatagttatagcggttaaaatttgatgttttgcttcagaagtaaactctgctataaactttaacttatctctttagtagagagcacatatacaaatattttcaaaaattgaacataaggtgacagttacttttgagttttaaagtatgaagtaaaattaaaactgatatggaaaactttctgctcaaaaggagcaagaaagaagagacagaaatcattttcctatctgttatttttaaaggaaactagaattcacttaccccaacattgttgcatctagtcaccatgtttctaaattcatcttcatttccagatcttgtgcataatttatagctaactggttggtatctttcccaccaaggtctgaaagggttgtgaatggcaacattttcatttggtggagagacctacaaattaaacagtcttcataagtaccaaattctgtcttactgtatatcattgaatgttctagaatctaatcaataatacaaaagattcttgaatcttggtataggcagctatctcttgaaaatattaacagcacatcggagggctcttgttgaagaaagattatatcagaaacaaaatatacagttgcaaagaatactacattgttttttcctcagaaaattcttttacttagaatacttacctgtgaagtaaaatgttgcccaagcttcacgtagaagatcagaatagtgtttactacaagcacagtgaattctgcaattgatactatgaatcatacccacctgaacccctccaaatcccttgggagctaaatatcgctcacattcaagagcaatatcaacccatcgccattcaaacagatgaacaatagatgttcgtccttgttgtgtatttgaggaatactgagcccagcagaacccaatggtgaaaagcaaccaaaagagcttcattttgctttgaagttgtcagtgtcctttccagaaactatttatattcctgtaagaagcacattttacaatgtaaatagtagcatgaataaatacttgagggcaaactgtttattcataatctgaaaaggattatcaataataatcctaactggtgaagaacatcaaaaagtctctcatggaaatcatctcaatgacctcttagacattaatgtttcttttcttttctttttttttttttttttgcatatggtagcacttttatttttccttacacaatgacatgttgctgtggcctaatgttctcacataacagcagaaaaccaaaatttgttgtcaactcttaaaagatcgagaattgcatactaaaaaactttacataaattaaaaggatgaatacatttaccggtataaatgcgaaccgcttccaactcaaggcaagtaacagcccacggtgctctggtagataacgtaagctaagaaaggaaactgggtcctatggcttggactttccaaccctgacagaccgacaagacggaaacaactggttcaggagcccttcccagcctctagataaatctcagaacactcagccctgacacattaataccctgcacggatcagagactgctgaccacacagactcaccaagccagacttgtcttccacaagcacgtttttagccatgaagtgaccaagccacgtgtactaaacactgacatcaaaggtatgtacagataccaaggggaagagttaacttgaatgccaggccaaaatcagcaacaagttctacaatccagtgctgatattgagaagagagaaagaccctgtcctcttgttttatattgttttctattcagtaaaaacaacaaggaagcaaaatcaaaggcacaaaaccaggcctgggcctggttggcctaaacccagtagttacaaatcaacttatgatttagaagccgatgttattcatagattccagacattgtatagaagaacattgtgaaactcccttccatattctgtttctccctgaccacgggtgcatgtagtccttgtcgcatatccctggcttgttcaaatcaatcacgaccctttcatgtgacatctttagtgctgtgtgcccttaaaagggacagaaattgtgcacttggggagctcggattttgagacagtagctatccgatgctcccaggtgaataacacccttccttctacaactcggtgtctgagagttttgtctgccgcttgtcctgctacatttcttggttccctgacctggaagcaagataactgatggacggccgaggcagctccttaggcagattaggcatgccttgtggagtaaggccggggcatccctcaggctgccagggactctggccagcctgagggatgggatccaaagagcgctcccaggtaggaaatggccccggttgaacgcctcgccagagcagtgatccccgcggaggattaacacagtggctgaacaccaggaaggaactggcacttggagtccagacatctgaaacttagtaagacaagtcttttcaacttgccccactccacctgagcggaagcttggcctgatcgctcatggtgtgcctgcacccatatcaatttccatatagagattcctagttacagctagttttagatcctctacagtggtaaaaggacaggcagcagcagtagtagtagcaaagggacatttatttcaggaaagttctcgctccaccggccaagagaagccagcacctaaagttctgtttgacccagagctcgaggactcaaggcaggagatggcaccaacagtgccctcaaccccttatccagtggggaggcccccttctcctgagcccacagcccctagaccacccagagtagacaagaacaaaagtgaaactgcgggaaaatccacttccctggcagcccgcttaacggcccaagacgggaattcaaatgccctgagagagcagcgatatactaggacagatgaggtcagacatacggtagaaaggcatgcttttgtgtatcacccttttacctctgctgaactactcaactggaaaaataacactccatcttacactgaaaagcctcaagccctaattgacttgcttcaaagaattatccagactcagaatcctacttaggctgattgccaccagctactcatgtacctctttaaaacacataaaaggcaacaggtgctgcaggcaacagttaaatggctggaggagcacatcccagccaattatcaaagtccccaagaatacataagaattcagctgccaggaacggaccctcaataggatccaaatgaaggaccagatatggaaaggctaagagggtaccgagaggcattaattgaaaggttgaaaaaaggggctcaaaagggtaccaatgtaaataaagtttctgaagtcatccaaggaaaggaggaaagcccagcccagttctatcaaagaccgtgtgaggcctattgcatgtacactcctttcgatctggagagtcctgaaaatcagccgttgattaatacggccttagttattcagagtgcagaagatatccagagaaaattgcaaaaacaggctaggtttgcaggaatgaaaaccttgcagttactggaaagagctaatgaagtatttgtaaat

SEQ ID NO: 99 - DNA, 4001 bp, Homo sapiens
actattttcctacaagatcaaaaatcaactgtgaaaggaaagtaatgtgaactaaacacctacattcattccagacacttggccaaatatatataggaatgataaactgagagaaccggaaactaccataaataggaggaaaggcaaaaagcccattttggggagacacaactcagatgagactgaaaaggttactatttgggaaatttcagtgggtcaccaggagaaagcctgtactctctactaagcttggaagacaaataaggtagctattcatctcaaattctgctcctcattaaatagataagctacctattcaccacaaaaaaaacccaagaattaggaatggagacacaagtcatctaaaaatgagagcaaatattgtaactggaattaaaattcctcaccagaaaatccttccaggaaatatggatagttatagcggttaaaatttgatgttttgcttcagaagtaaactctgctataaactttaacttatctctttagtagagagcacatatacaaatattttcaaaaattgaacataaggtgacagttacttttgagttttaaagtatgaagtaaaattaaaactgatatggaaaactttctgctcaaaaggagcaagaaagaagagacagaaatcattttcctatctgttatttttaaaggaaactagaattcacttaccccaacattgttgcatctagtcaccatgtttctaaattcatcttcatttccagatcttgtgcataatttatagctaactggttggtatctttcccaccaaggtctgaaagggttgtgaatggcaacattttcatttggtggagagacctacaaattaaacagtcttcataagtaccaaattctgtcttactgtatatcattgaatgttctagaatctaatcaataatacaaaagattcttgaatcttggtataggcagctatctcttgaaaatattaacagcacatcggagggctcttgttgaagaaagattatatcagaaacaaaatatacagttgcaaagaatactacattgttttttcctcagaaaattcttttacttagaatacttacctgtgaagtaaaatgttgcccaagcttcacgtagaagatcagaatagtgtttactacaagcacagtgaattctgcaattgatactatgaatcatacccacctgaacccctccaaatcccttgggagctaaatatcgctcacattcaagagcaatatcaacccatcgccattcaaacagatgaacaatagatgttcgtccttgttgtgtatttgaggaatactgagcccagcagaacccaatggtgaaaagcaaccaaaagagcttcattttgctttgaagttgtcagtgtcctttccagaaactatttatattcctgtaagaagcacattttacaatgtaaatagtagcatgaataaatacttgagggcaaactgtttattcataatctgaaaaggattatcaataataatcctaactggtgaagaacatcaaaaagtctctcatggaaatcatctcaatgacctcttagacattaatgtttcttttcttttcttttttttttttttttgcatatggtagcacttttatttttccttacacaatgacatgttgctgtggcctaatgttctcacataacagcagaaaaccaaaatttgttgtcaactcttaaaagatcgagaattgcatactaaaaaactttacataaattaaaaggatgaatacatttaccggtataaatgcgaaccgcttccaactcaaggcaagtaacagcccacggtgctctggtagataacgtaagctaagaaaggaaactgggtcctatggcttggactttccaaccctgacagaccgacaagacggaaacaactggttcaggagcccttcccagcctctagataaatctcagaacactcagccctgacacattaataccctgcacggatcagagactgctgaccacacagactcaccaagccagacttgtcttccacaagcacgtttttagccatgaagtgaccaagccacgtgtactaaacactgacatcaaaggtatgtacagataccaaggggaagagttaacttgaatgccaggccaaaatcagcaacaagttctacaatccagtgctgatattgagaagagagaaagaccctgtcctcttgttttatattgttttctattcagtaaaaacaacaaggaagcaaaatcaaaggcacaaaaccaggcctgggcctggttggcctaaacccagtagttacaaatcaacttatgatttagaagccgatgttattcatagattccagacattgtatagaagaacattgtgaaactcccttccgtattctgtttctccctgaccacgggtgcatgtagtccttgtcgcatatccctggcttgttcaaatcaatcacgaccctttcatgtgacatctttagtgctgtgtgcccttaaaagggacagaaattgtgcacttggggagctcggattttgagacagtagctatccgatgctcccaggtgaataacacccttccttctacaactcggtgtctgagagttttgtctgccgcttgtcctgctacatttcttggttccctgacctggaagcaagataactgatggacggccgaggcagctccttaggcagattaggcatgccttgtggagtaaggccggggcatccctcaggctgccagggactctggccagcctgagggatgggatccaaagagcgctcccaggtaggaaatggccctggttgaacgcctcgccagagcagtgatccccgcggaggattaacacagtggctgaacaccaggaaggaactggcacttggagtccagacatctgaaacttagtaagacaagtcttttcaacttgccccactccacctgagcggaagcttggcctgatcgctcatggtgtgcctgcacccatatcaatttccatatagagattcctagttacagctagttttagatcctctacagtggtaaaaggacaggcagcagcagtagtagtagcaaagggacatttatttcaggaaagttcttgctccaccggccaagagaagccagcacctaaagttctgtttgacccagagctcgaggactcaaggcaggagatggcaccaacagtgccctcaaccccttatccagtggggaggcccccttctcctgagcccacagcccctagaccacccagagtagacaagaacaaaagtgaaactgcgggaaaatccacttccctggcagcccgcttaacggcccaagacgggaattcaaatgccctgagagagcagcgatatactaggacagatgaggtcagacatacggtagaaaggcatgcttttgtgtatcacccttttacctctgctgaactactcaactggaaaaataacactccatcttacactgaaaagcctcaagccctaattgacttgcttcaaagaattatccagactcagaatcctacttaggctgattgccaccagctactcatgtacctctttaaaacacataaaaggcaacaggtgctgcaggcaacagttaaatggctggaggagcacatcccagccaattatcaaagtccccaagaatacataagaattcagctgccaggaacggaccctcaataggatccaaatgaaggaccagatatggaaaggctaagagggtaccgagaggcattaattgaaaggttgaaaaaaggggctcaaaagggtaccaatgtaaataaagtttctgaagtcatccaaggaaaggaggaaagcccagcccagttctatcaaagaccgtgtgaggcctattgcatgtacactcctttcgatctggagagtcctgaaaatcagccgttgattaatacggccttagttattcagagtgcagaagatatccagagaaaattgcaaaaacaggctaggtttgcaggaatgaaaaccttgcagttactggaaagagctaatgaagtatttgtaaata

SEQ ID NO: 100 - DNA, 4001 bp, Homo sapiens
tagaaaatagagaatttaggaaataaagtcgatgagatttttaattgggaacttcttagaagtgggcaaatgtgtattgattaaaaatcttaaatcaatatttgaaagttcttaaatatggatttgagtttcttaaagtagtcaaacttgttaacttctgtccctaagagatctaaattcctattttaaatgaaattcaattagctacatgtctacaagaaaaggcatatattactcttttattcagatcactctcgtaaaaaaattacctgagtagcatcattgtagttctcgatatctccacttccagttttacatttaccatcattgaaatcccatccagaatatgggactgctggaaagtccctacttccagggttgaagtaacttccacaggtactgcttgttcctgcactcacagcgttaccacacatatgattaattacagcatccacataaatacgaacctagaaaacaaagtttctacttcagtgtgacttacagagaggtagaaatttaaagcattattgatgcaagtttatagtatgttaataaaactccaaaatatttcatgatatcttataattattttcctacaagatcaaaaatcaactgtgaaaggaaagtaatgtgaactaaacacctacatgccttctagacacttggtcaaatatttataggaatgataaattgagagaccagaaactaccataaataggaggaaatgcaaaaagcccactttgggaagacaaaactcagatgagagtggaaaggttattgttttggaaatttcagtgggtcaccaggagaaagcctgtactctctatgaagcttttgaagacaaacaaggtagctattaatctcaatttatgctcctcattaaatagagaagctagctattcaccatgaaaaacccaagaattacggatggagacacaagtcacctaaaaatgatagcaaacattgtaactggaattatacttcctaaccagtaaattgtttccgggaaatacgaacagttataagggttaaaatttgatgttttgctttagaagcaaattctgatttaaactttaacttacctctttagtagatagcacacacacaaatattcacaaaagttgaacataaataaacagttaattttgagttttaaattatgaagtaaaattaaaaaaataaaatacggaaaattttctgctgaaaaggagcaagaaagaagagagagaaaccattttcctgtctgttatttttaaaggaaactagaattcacttaccccaacattgttacatctagtcaccatgtttctaaattcatcttcatttccagatcttgtgcataatttatagctaactggttggtatctttcccaccaaggtctgaaagggttgtaaattgcaacattttcatttggtggagagacctacaaattaaacagtcttcataagtaccaaattctgtcttactgtgtatcattgaatgttctagaaactaatcaatagtataaaagattcttgaatcttggtataggcagctatctcttgaaaatattaacagcacattggagggctcttggtgaagaaagattatctcagaaacaaaatataaagttgccaagaatactacatagattttccctcagaaatctcttttacttagaatacttacctgtgaagtaaaatgttgcccaagcttcacagataagatcagaatactatttcctacaagcacagtgaattccgcaattgatactatgaatcatacccacctgaacccctccaaatcccttcggagctaaatatcgctcacattcaagagcaatatcaacccatcgccattcaaacagatgaacaatagatgtccgtccttgttgtgtatttggggaatactgagcccagcagaacccaatggtgaaaagcaacagaaagaacttcattttgctttgaagttgtcagtgtcctttccagaaactatttatattcctgtaagaagcacattttacaaagtaaatattagcatgaataaatacttgagggcaaactgtttattcataatctgaaaaggattatcaataataatcctaacaggtaaagaacatcaaaaagtctctcatggaaatcatctaaatgaccttttagatattaatgtttttcttaggttctggcagcacttttatttttccttaaacagtgacctgttgctggggcctaatgttctcacataacagtagaaaaccaaaatttgttgtcatctctttaaagatccagaatggcatacaaaaaaactttacataaattaaaaggatgaatacttttacaggtataaatgcgaaccccttccaactcaaggtaagtaacagcccacggtgctctggtagataacgtaagctaagaaaggaaactgggtcctatggcttggactttccaaccctgacagactgacaggacagaaacaagtggtccagaagcccttaccagcctctagacaaatcccagaacactcagccctgacacattaataccctgtacagatcagagactgctggccgcacagactcaccgagccagactggtcttccacaagcatgtttttagccatgaagtgaccaagccacgtgtagtaaagactgaaatcaaagatatgtacagataccaagggcaacagttaacttgaatacaaggtcaaaatcagcaacacattctacaatccagtgctgatattgagaggagacaaagaccctctccttgttttatattgttttctattcagtaaaaacaaccaggaagtacaaccaaagacatgcagcccagcgccaggcctgaaaccaggcctgggcctgattggcctaaacccagtagctaaaaatcaacttatgatttagaagctgatattattcacagattccagacattgtataaaagaactctgtgaaactccctgccctgttctgtttctccctgaccagcagtgaatgtagtccttgtcacgtatcccttgcttgctcaaatcaatcacgaccctttcatgtgaaatctttagtgttgtgagcccttaaaaaggacagaaattgtgcactccgggagctcagattttgagacagtagctggccgatgctcccagctgaataaagcccttccttctacaactcagtgtctgagaggttttgtctgaggctcgtcctgctacaatgtcagatacaagcttcaaggacaacttctttccaaaggcttattccagtttggtgcggctagcatgtggtgtattttttaatttacctgaccaaatgcacaaagggagaacacattctttttttaatcgtctatatagagtcagaagttgagtcttttaaaggattgaaataaaacagaatattctaactggactaagatcatacggtatgcgccttattaatatgaacatttatttccaaatattttgtttttataagaagtgttataatgaacatctgtatacatgtttacacatgggtaattctgtatgctagataaatgtatggtaaacatgaagcatatttttatattttcatattgtgcaaaattgcccttacaaaatttatcaatttttactctctagtagcagtatattatagtaccttttgccacactcccaccaaaaattaatattatcatagctctaatttttgactaatagattaaaaatgatttgggtcgggcacgtgtctcactcctgtaatcccagcactttcggaagctgaggcgggcagatcacgaggtcaggagacggagaccatcctggctaacatggtgaaaccctgtctctactaaaaacacaaaaaactagccaggcatggtggtgggcccctgtagtcccagctactctggagcctgaggcaggggaatggcggcctgaaggtggtaggtggagctggcagtgagcccagatcacgccaatgcactccagcgtgggtgacagagggagactccatctcaaaaaaaaaaaaaaaaaaaatgatttgtgt

SEQ ID NO: 101 - DNA, 4001 bp, Homo sapiens
cttagtactattatactatacttagtatactatacttagtactattatactatacttagtatactatacttagtactattatatattattatactctaatttcaatttcagccaccccactcttatttaaatctcccaaatttctagtttgtacctcaagaactccaatgcatcttcaaccacactgcaatctacaattgatgataccattttccactgtctcaaccttctttattttctcacttcactccttaacccagattactttccatatctctcttttattatctttctcttaaatgtaacaacatctcatcactgtcttattcacctagggaaatctcaactttagttaaattgaattctgtactttttcagtgatagcacctatgctgaactcaactggagaaaaacacaaaaccacattgactgataccacttaaataaaccacagattgcctaagagtatgtttactttcctacattcctggatacccattttacatctccttttccttccttaatccttcatgacttcctccctctttatgaccttgtttcctatttctctgagaaaatataacaaaaatttgacatgctcctatttactgaactaccgacatctagaactccataatctgcccttcatcctaccgttactaatgagctgtttgtgtgcctatctttaaaacgaacccttctatttgtataccaggtctatggcttcagcaatatccctctctttccggcattatgttttttctctctactgaatcagtctgattagcatacaaacctgctatatcatcaatcttaaacagctttttgatactacattgccctccattaacaacccatttctcacaaccccttgaacgcaagactctttaagagttgtcttcgatactcactatattaaattcttcttcaaaattctcttgaatacccttactcctgacatccaccaagtttgtcaacgtcaagttgacaaaaaagaatgttttcctacgtatatacagctgaaactcatttcattaaaggaacagaataattttatgtgggaaatattttcacctttgagtgacgttctgacagatgaaagatttgggggaacaaaaatggaagactgtattacagcaaggatacaaatttctaaattgggataaacccccatttccaaaaaaccaaaagcccagtaaaactcaaagccagacaaatataaaataattacaaaaaacaagattacaataaaaaaaatgtgaaagtgctttggtatccaggtaagaatttttaaaaggcagtatttgtaatcataaaaaaattatattacaaattatatatattttttataatattatgttttcctagatgtgttaaaccagataaagaaaaaatacaaacactattttattggaaaggaaacaatttattatatttgaggaaaatcattaaaatacatgtaatatgtttccaattcactgatttaaaggcatatagatttaatttttaaatacactttcaaagctgttacgcacagttccatagtccaggtggtcaatttcttcctctcaaagttagaaagcacttgaaggacacgggattcaaaaaaacctaaaacatcataaaagcccattaaaaataggaagtataacacaggtcattagtttaaaaataactaagagctgaaccatttatatttagaaaattagtgaatcatgtcagtataacaaaatttatctaaataaaccgcttataaagaaactgatttataacatttacaaaatctttttaactatgcctacagaaaaataattacattttcaaaatctataggttttgtacttttaaggtgataataaccgaattttcaattgttttcacagatctaataatagtagcagatttttcaacaaagaaacacagaggctccaaccctttattttcctagttattaatataaggttggatggctaggttgatactaggtacctaatcattttactctaacaaagcagtgtctaaactggtcagtccttaaaattactaaagaaaccttttcaaatctgattgttatactccattcccagagattcagatgtattagttctagggtagagtacaggaatctttatgcataaaaactcttccttggtggttctcgaccttgtttgtatattaaaatcagtttgagaggtttattccaacatctgtgctacactcccaacaccttaaatcaaaattctgaccaaaggaaccaagcatcaatatatttcttaaggatttttttaggagggagagggtctcactctgtcacccaggctagaatgcagtggtgtgatcatggttcactgcaacctcaacctctggggctcaagtaatcctcctgccttagcatcccaagtagctgagaccagaggtgcaagccaccacacttggctaatttttgtattttttgtagggacagggtctccctacattgcccaggctggtctcaaactcctgggctcaagtgattctcccatctcggacttgcaaagtgctgggattacaggtatgagccactgcacccttttaaaattagtatttaagttccagatcactgcaatgtgcagccaagactgagaaccactgttcttggtgattacggtcatcaaccagtctggaaaccactattcctatatacctgccaagactgtttttccttaatgcactacccttagtgggcattatgtgttctcccctctattacgcttttcttctcttgtttagaaaaagaaaggggaaagaagaaagatacttctattgctatctatgtcaaaagagattcactaagacttcagatgagaggtctgctactctctagaatttacatagtaatccagacatcttaattttcaatgtaagtactttttaaaagaaaaacatttcctttgcccaaattttaaacacattataaatacctaaaccagatatattacacaacagaaagcatatgttattgaattaggtttaggaaacatacaaatagaagaaacaagactgtattctgggttaaagtaaatgaacacattctctaagtaagttgacctgattcactaactttccctcaaaaaattatataaaggacagcacagaaaattcaacaacaaatctaaaaacacataaaagatctgttcagtctatacaaataattttagaaatatttcatttgaataaagtgtaaaaaagtattccttaacctggatcaacaggtgggggaaggacaaacatttctaggaaaaaaacaaaaaaacactgccccaaaaaggatacgacaagaaaggatacactttgcatgacagtattacagcagtatttacgcaggaatgcttctaaagaagaacagcagaatgcagtttaatttttttcttatttttcagcaccagatttaaaataaatgatgtttaaaaatacagactgaaatccatctttcctctaaagtgtttataagacttgtgactacccagtatagacgtacaacaaaattcaaatattcaagccatctcagaaggactaaatattaaacaaaattttcccttatttacccatatttggcagttaaacaccagtaattgtgaccaattacttcgtgttcttttagtttacagaggaacaaaaatttaaataaaaaacaaaggaatatatttctacttatttcttgaacaatgtaacaaacattaacatttaaaatgcttaattctaccatatttaatcatcaaattaagtatgcactaaaattacctgttttaaagacaaaaaatatttaactccacaaacacatattgttgtgaaatgtgttaataattttatatactcagcactgtagattttttttttttttgagatggagtcttgctctgttgccagtgtggagtgcagtggcgtgatcttgatctcggctcactgcaacctccacctcgcaggttcaggcgattctcctgcctcagccgcccacgtagctg

SEQ ID NO: 102 - DNA, 4001 bp, Homo sapiens
cagttttttataccaagggcagatttttccaaacacttgtatagttaggaaaacaaaagcctatccacaacttcataaattcacaaaactacttctcttactaatcaacgggtggataatttatttctccattcttttttaagcatgattctcgttgggggaaatgaaagaggatggggatgacgtactacgaatgcaccaacactccaaaccaacagcttcaatttaacccatcatccaaaacatctccaaagtggcgctaacatttttaataggtatgttgctctcaggctctcaagaaacacttcagcttaataaagcaccatgttcctctcactatactactttggcaaaatgttaagattcagagaaggacttttatcctttcctccaaaattcttaacagctacatttctaccacagcatcaataatgtgcgctcccatccctaagggaattttgtttaagttgcgtttactgttatttaactttatacgctgttattctcgttttaacagcatttaaatttttattataatttttacagtttaagtattcgctagttgttctctaaaatctacttaattgtaaatctttaaaggcataacatgggcattctacactgctttgtgataactctgaaagccataggaatttgggcacttggtccatgcattttctatgctaataagccactgtattgaaatataatacttgtactacaaaagctattatctatatttgcagttatttattcagacttttttttctcttaagatgttaagctccttcagggccagaacagaaccgtcttattcattttaattccgttatcttcacaagtgcctagcacagtgcctggcaaacagctggtactcaggaaacattgttgaactgaattaccatcaagtcccaggcctatgggagttacaaccaaatccccatcgcttatgtaataatacatgctgtgtttcccaagcgtggtgggtggtacacgagtcggtttcacagagtacacagttaaattacttgattgtaatttctaaatacttatgttagtttattaggaaaaaacataatcgcacatcaaatccaagactctgcagacactgcttagggtgaagctaatgtgggcagcacctactgaagtgctttttaaaaaaaactgagtcaatttaaagaaaaatatccagtaaataatacacgtgaaacaagaacttggccataacagtaagggatgacatacaagtgactaaagtttgaaagacactaacacatcaacaaaaatcaagcccctcctgggcgtgtgccacacacgcgcctccaagggatcaggcccgccgagacctactgcggagaggcggcctccccgccgacgctcggttcccgggacggtgctgcggagtgtgtggagcaggccagcgctggtctggaggctgggttgggggaagcaggccagggatccaaagccactggcacaagcctggccggcggcccatgaactccgcgccaagaccccagacctcgttggcccagcgtcccgccagctgcgcggcgggtttacctatcccgcttggtctctggaggctcgtcccggatgcaccatcgcccagaccctcttcctcttccttccacccctagcccgccccgccccgccccgggttagtcccggacgcccgcccgctctttcaggccgcccgcccctctctcctccctccgagtacccagccctactgaccggcctcttcccaccacacagtggccgtagcccttcctcacacagcgccaggcttccatcttcgccctccgcgtgcgtccagttcccaggccccgggttccacctcaatctctataatcgatgcgacggcctaaagtatctagggaaccccatcactcttaagtaccgactccagtcctggctgcaaggcatgctgggaggtgcagtctcgccggccggcctacactccatcttgcgcagtcagagtccctgaatgccttaacccggaattctgctcaaggagcatgcgcagagcgtgggacgcgcgtgcaaccatttctgaagagggcaaaacacccgaacttcgtcttaaagaaacagaaataaactttcttttttttctttttctttctttctttctttttttttttttgagatggagtttcgctcttgtcgcccaggctgtagtgcaatggcacgatctcggctcactgcaacctccacctcccgggttcaagcgattctcctgcctcagcctgccaagtagctgggattacaggcatgagccaccacacccggctaatttttgaatttttagtagagacagggttgcaccatgttggccaggctggtttcgaactcctgacctcaagtgattcgcccgcctcggcctcccaaagtgctgggattacaggagtgagctaccgcgcccggcagaaataaacagagcagtgaaaatttttaattgcccaaagtgcagattcccagctgaggctgaacaacgcatcctctgggtgcccatggaactgaggtaccacagaattttgcaattaatgttgcggaagcacagccatagctctcactttaaaatgtacgtgtatgggccgggcgcggtggctcacgcctgtaatcccagcactctgggaggccaaggcgggcggatcacgaggtcaggagatcgagaccatcctggctaacacggtgaaaccccgtctctactaaacatacaaagaattagccgggcgtggtggcgggcgcctgtggtcccagctactcgggagcctgaggcaggagaatggcgtgaacctgggaggcagagcttgcagtgagcagagatcgagccactgcactccagcctgggcgacagagcgagactccgtctcaaaaaaaaaaaaaaaaaaaaaaaaagtacttgtatgtcttgtgtgtccacctttattaaatgtattataggactgtagattgttgaaagacattatttaagtggagaccctgcaagaaacaggaagagagaaaccgagaaagaataaagtgtggagagtagaggggaaaaggatactagaaggcaggagcactgcttttataggctctttgaaacagtggtaatttcttgggaaggcttttcttatccctggtgcataaaaggaagtaaagtgtatttgaaaaaaacctttccctcagtatgtaattgattcttgttatttgcagtagttaggttctgtaaagttgctggaaacactgaattagtaaatactgaatcattactcctaagggaaatacaggattaggatcctgtaagcctctggtcgcattttcatcaacttaatcaatacatagttttgttgtatgtgtgtttccgcttaaagacatcttatttaatatatattgttgattcattaacattgaactcagtcaacagcactataattcatacctcaacaaagcttatctaacactgctattttctctgcaaggctcatgacagccttcttgtgcttaggagcactatacagcacaacgcttggggaccattttaaacagcaacatcaacaaaaagtacaaaaacgtgaaaaacatatcactaaatggaatgtgaaaaggacacttggtcctgatggctcacgcctgtaatcccagcaatatgggaggccaaggcggctggatcgcttcagccagggagttcaagaccacactggacaacatggcgaaaccccgtccctacaaaaaatacaaaaattagccgggcatggtggctctcgtctgtagtcccagctactccagaatttgaggtgaaaggattactttagcccgagagggcgaggctgcagtgaaccaagatagtgtcactgtactccagccctggcaacaaggggacactatggtatagcatgagagctgaaacaaaaaggcagagaatgccttgtttagcctcagctgggaatgtgcactttgggcaattaaaaattttccctgctctgtacatgtccaagaatacatggaggtta

SEQ ID NO: 103 - DNA, 4001 bp, Homo sapiens
tctaatatttaaaatctggctgctaaatctgtgaaggatgaagaggaaagcacccatgatttacctattggcatcaatatctcaatactctcgtcctaaaaaaccatgaatggtattctgaatacttaacacagaatgcctcccaggctcccaaaataccacatacccctgaaaatgtacatagttcaactgagagatgaatcaactatcaaaatgatattcagagtagctttcaagcacctacaaaactcaatgagaaaataaaatacacaacaagtattatactgaaatcgaataaggaactcatatcacactacaattaaagtaaacctctcctccaacttggagtaataacaagtttctgaacagttttttataccaagggcagatttttccaaacacttgtatagttaggaaaacaaaagcctatccacaacttcataaattcacaaaactacttctcttactaatcaacgggtggataatttatttctccattcttttttaagcatgattctcgttgggggaaatgaaagaggatggggatgacgtactacgaatgcaccaacactccaaaccaacagcttcaatttaacccatcatccaaaacatctccaaagtggcgctaacatttttaataggtatgttgctctcaggctctcaagaaacacttcagcttaataaagcaccatgttcctctcactatactactttggcaaaatgttaagattcagagaaggacttttatcctttcctccaaaattcttaacagctacatttctaccacagcatcaataatgtgcgctcccatccctaagggaattttgtttaagttgcgtttactgttatttaactttatacgctgttattctcgttttaacagcatttaaatttttattataatttttacagtttaagtattcgctagttgttctctaaaatctacttaattgtaaatctttaaaggcataacatgggcattctacactgctttgtgataactctgaaagccataggaatttgggcacttggtccatgcattttctatgctaataagccactgtattgaaatataatacttgtactacaaaagctattatctatatttgcagttatttattcagacttttttttctcttaagatgttaagctccttcagggccagaacagaaccgtcttattcattttaattccgttatcttcacaagtgcctagcacagtgcctggcaaacagctggtactcaggaaacattgttgaactgaattaccatcaagtcccaggcctatgggagttacaaccaaatccccatcgcttatgtaataatacatgctgtgtttcccaagcgtggtgggtggtacacgagtcggtttcacagagtacacagttaaattacttgattgtaatttctaaatacttatgttagtttattaggaaaaaacataatcgcacatcaaatccaagactctgcagacactgcttagggtgaagctaatgtgggcagcacctactgaagtgctttttaaaaaaaactgagtcaatttaaagaaaaatatccagtaaataatacacgtgaaacaagaacttggccataacagtaagggatgacatacaagtgactaaagtttgaaagacactaacacatcaacaaaaatcaagcccctcctgggcgtgtgccacacacgcgcctccaagggatcaggcccgccgagacctactgcggagaggcggcctccccgccgacgctcggttcccgggacggtgctgcggagtgtgtggagcaggccagcgctggtctggaggctgggttgggggaagcaggccagggatccaaagccactggcacaagcctggccggcggcccatgaactccgcgccaagaccccagacctcgttggcccagcgtcccgccagctgcgcggcgggtttacctatcccgcttggtctctggaggctcgtcccggatgcaccatcgcccagaccctcttcctcttccttccacccctagcccgccccgccccgccccgggttagtcccggacgcccgcccgctctttcaggccgcccgcccctctctcctccctccgagtacccagccctactgaccggcctcttcccaccacacagtggccgtagcccttcctcacacagcgccaggcttccatcttcgccctccgcgtgcgtccagttcccaggccccgggttccacctcaatctctataatcgatgcgacggcctaaagtatctagggaaccccatcactcttaagtaccgactccagtcctggctgcaaggcatgctgggaggtgcagtctcgccggccggcctacactccatcttgcgcagtcagagtccctgaatgccttaacccggaattctgctcaaggagcatgcgcagagcgtgggacgcgcgtgcaaccatttctgaagagggcaaaacacccgaacttcgtcttaaagaaacagaaataaactttcttttttttctttttctttctttctttctttttttttttttgagatggagtttcgctcttgtcgcccaggctgtagtgcaatggcacgatctcggctcactgcaacctccacctcccgggttcaagcgattctcctgcctcagcctgccaagtagctgggattacaggcatgagccaccacacccggctaatttttgaatttttagtagagacagggttgcaccatgttggccaggctggtttcgaactcctgacctcaagtgattcgcccgcctcggcctcccaaagtgctgggattacaggagtgagctaccgcgcccggcagaaataaacagagcagtgaaaatttttaattgcccaaagtgcagattcccagctgaggctgaacaacgcatcctctgggtgcccatggaactgaggtaccacagaattttgcaattaatgttgcggaagcacagccatagctctcactttaaaatgtacgtgtatgggccgggcgcggtggctcacgcctgtaatcccagcactctgggaggccaaggcgggcggatcacgaggtcaggagatcgagaccatcctggctaacacggtgaaaccccgtctctactaaacatacaaagaattagccgggcgtggtggcgggcgcctgtggtcccagctactcgggagcctgaggcaggagaatggcgtgaacctgggaggcagagcttgcagtgagcagagatcgagccactgcactccagcctgggcgacagagcgagactccgtctcaaaaaaaaaaaaaaaaaaaaaaaaagtacttgtatgtcttgtgtgtccacctttattaaatgtattataggactgtagattgttgaaagacattatttaagtggagaccctgcaagaaacaggaagagagaaaccgagaaagaataaagtgtggagagtagaggggaaaaggatactagaaggcaggagcactgcttttataggctctttgaaacagtggtaatttcttgggaaggcttttcttatccctggtgcataaaaggaagtaaagtgtatttgaaaaaaacctttccctcagtatgtaattgattcttgttatttgcagtagttaggttctgtaaagttgctggaaacactgaattagtaaatactgaatcattactcctaagggaaatacaggattaggatcctgtaagcctctggtcgcattttcatcaacttaatcaatacatagttttgttgtatgtgtgtttccgcttaaagacatcttatttaatatatattgttgattcattaacattgaactcagtcaacagcactataattcatacctcaacaaagcttatctaacactgctattttctctgcaaggctcatgacagccttcttgtgcttaggagcactatacagcacaacgcttggggaccattttaaacagcaacatcaacaaaaagtacaaaaacgtgaaaaacatatcactaaatggaatgtgaaaaggacacttggtcctgatggctcacgcctgtaatcccagca

SEQ ID NO: 104 - DNA, 4001 bp, Homo sapiens
gagaatgttataaattagttatagaatacttacgtttaaatttaagtctttacttagttgtttttagaagagaaaaaaaagtcttctatgcgttgggttaattttattagtagcttttctcttcatagttgctatattgccagctagtagagagaagaaacgaaagtcaggatttgcctcctttcagatggtaaactcacagaggcatttaactggctgtgtcatgcactgaaaacagcatgaggcaatgaagttaaatttatgaagcattcaggatatgttagataaagaatttctagattgtgaaatatgttctgggaagagacttgagaacaatctaatcccctggatatatttaagaaaaggataaatagttatctgtgtaatttggggttcagattaaatgcctgccttaagacagcgtcagtaagaactgaggcttaatgaagtcctgcacttcccatagcatgcaacaacaaaaaagagagatgacagtatttcagatccactgttgcttggaaattttgttagaatttcttgtaaaatatgtgtttaacagaaatcctgccagcatttacagttttaaatctttaaggaaaggacacaaaagcaaagttggaaaaaattttagctttaccattatttgcttgttcaagattcttaaccattaatatctttaatttttacaaggctaaaggagccccaaatctaacaaacttaagtgtctttggtttaaggcatactattggtaacgagtaattttatctttaatagtttttataatgcatgtaaaaaaagctcccagatagaatattgaaggaaacctcttatgtgtgcttaacaaaattatttctacctaaaatattacatatttttggccttttagtcatgaatttaattacatcttctgggttcttattttctattgttaataccacttacataatgcttttgtgtgtatatcaataacttagcttttccaagtgattccatttgtagcaagtttaatttctgtcatccaaattaaattactattacatgtaagcctggaaagctatttaaaattttgagttggaacaagaaatgccatagattaatcttaaatctgtacaagaatttctgcttaatatttggttatactgtaattgagattttgttgcaaagactttcaactatttttgtatcttagctttgttttatgactacactgagaaatccaacagtttatgtatatcttcagcacacacactgtggctgcaggaagagaaactaattgtgttcacgactatttagtttgtattcctttgtttttaatcattgtgctgtaagccttatacatttaatctgttacttgttaaaatttctttctactgtcactaaagcacttgttttcagaaacccagcatggcatgcatgtatcagtctgtaatcatatacactaaacatcattaaattgaacctcaaataatgcattaaccattgcacagtacttaatgtttttatgtcaagttgcaagataaaacctttttcagatgagataaactgtagtatattccaaaggtctttgtttagtaaaagattctgaaatttctactacaaatataaaatagttatgcatttgctatacataatatttttaaataaaagaaatattaaatacctttttgtgtctgttgattcagtgaatccagaaacttgctgcccttattcttgattttaaaaatcagtgtagaagtttgttcatctgtgactttaatggcagctgcatttttgttttggaccgttgaatccaagctgtaagaaggaacttctttttccttttacaatactaatcaattgaatttgacaagccacctatgtaattttaagtagtatagtggaagttctggtctgtgggccgtctttaatccagcagagaaagcgttgtggctttgctctgtctgccacatggagaaatgcagtaaccagctgcagctgacccagattgtatatacagtacccctgaatagtgattccctctttctcagtagactcaagttcagcccacatattacatcaccaaaaattgctggagactgggggcgggaatctccttaggatttcctctttgtagccttaaataggggggtgggatcagcaggaggttgaatagttttgaacaaggagagattgtgtgcaggttgaaggaagggcaccatctggaaacaaactatcatagttcagcgggcaattataaaacaaacattttagtctgctggccagagatcttttaagttgaataccgaaaaaaaaaatagtgctccacttcacttagaagtagttgcaggctgatgagtttggtttttgttaacaaagaacaagagctagactttgtcaggaggcagccacctaaataatgtaataaatactctttatagcctagaagaatttgtaaacattttactaagttgctaatgaaggttttaaacttacaagaaacttgatgttgttgtagtatgttatgtcttactgtgtaatgtgtcttaagataaaacagcctttatatataattaccaaacataagtgaaattctttcagatgcttaagacttttaaatattacattctggtgttacataatgtcatatcctcctattctacaaaatgacctctcctctctgtaaaaggtcattcttgttattaattgatgtggtgtggtttaaaaacaaacataaccctgaactgagtaaaaaacaaggaagctctgactctatgccagctatgtgaacttagacaaatcactttacctgcctctggcaaggttcttctgctatgaaataaggtggtggaagaaatgaataagtgttgagtacaactatactattgtatttcattaattgaagaaatgttaaataactcagtagctgaagaaacacaaacttaggcttaagtaacttagcttagcacttaagtactaagtagtggaactgggatttgaatctaatgccaaagcattatgccacactctctgtcattgattacctagttgctgtaagctgcttctagataaaacttttgggctttctctacatacctgtgctttcccttccttattgctgtagcttgtgctgtgtttctctttctgttaggccacactgttgatccacatcctttatttaaagtctgagcttattttctacctctttcacagaatcatttatttgaattcctatgccatatataggtataccagaggttgcaaacacaagggcctagaaaggcaaatgctcacaagaagaatggagcaggtaatataaatcagtgaagtaaatcagtagtaagatactggagggaaatgaagtttatggcaagttggcatccttttggttaatttaaagggatctgcctgcaccttctcagctgtgcttgtggccatgaaggattatgagacagtgttgccagatcttcccattattcaggaaaaaagagccatttagatttttcctgtaatacttcctgattttaaaaaacattgggacagatgtgctgccagcttctggcctctgatttgtattatgtatcgtttcttgagcattcagtaattatgttgtagtcactaatggcttaaatctgggaaaaataagagataataaattctttctgagcttttaaactttcagcagtttggagctttctaacttgagcacttagtaatatcactagccagggtaggaaattggaatgacaggtatttagggacagattatggttagatatgttaaattgaaaatgaaagtcaggagctcagttatatggagagatttgaaagtcaccagcaattaggtagtagctaaagctatggaactaagatactagagaaagtacatgtagaatgtaaaggaaggttaatgacagaccatgataccaatttccaggaaaccagcttacaagaaacatgaggaaaaagaagaatggtgggggcttagggggaagatacgaaagttcaaggtagggaaaacctga

SEQ ID NO: 105 - DNA, 4001 bp, Homo sapiens
aggaagtagaagttttcagggatgggaccaggcggttgtgatttttggttaagtgaccttgtaagtcttcattgggaattttttgtttgataacgaccctaagggaaatcagagagtgggccacgtagataccagggcagaagagcgttccagttagaggaaacaacaagggcaaaggctttgaggtggcagtatgtttgatgtgtttgaatactggtaaagcggtcagaataactagagtagaggaggtgaagtcagtgagatgacgaagggttgggtaatcttggtctaaagagccaatatgagtgaaatggaaagctattgtgtggttttgagcaaagagaaacatgatctaatttgaattttagtaagatgacattggctgctatgaattaattttttttcttacaataatcctataagttctgttattatctttgtagtatatgtgaggaaactgagagataaaggggtgaagtaatttattcaaggtcacacaaagttttagagccatggtttaaatgcaggtagtttattagcttcagagcctgcaattttaacagttatgctgatgtgataattttactcatgatccagttaaagcttgtaaataattttaggattcagtgtttttacagacctgtgtgaaagatgggacataccattaaaatactgacttacctgattttctatttcttttatttgactatgctgttggtttaattgtttatattggtcttccacggtctggagaaggtctttgatgctattatcttgtttttctacaaaagtctggatatagagagtaggttggttataagttgctttcctctttcttttctattaatttcctgtaacactatcataatctaaatttttaaactaataatggatttgaaaaatgaatattggcaattccttccccttgtatgcttctttcaaatagcacatatttttgtccttaacattttatttaaattgtactatctctaaaatttgattttctgaacttcaattaaaagaaaaagcccagcatattttcatatgaataaatcttttccatttactgtattatttaatctgttttaaacactggagaatagttttaaattttttttaactttttacttaccttcagtaatttacaatagtgtaatgacatagtgttctagattgtataatttaaccgatttgtaattttcatataaaatgcaaattttcagtgttttcatatataacattagggaaacaaaaaactaacttgaaattataataggaaattttattttctggagattatttttcttggaaaaaaaagtatttcaacaatgcaacaaagtatttcaaatggcatgccttagaaatattttttttaaaagatccacattgaaaacataaacatgaaccctctttattttctacttactttaagtgaagttacttctgggtgttctggagtttcaggttgattttgaattaagttagttagttgctcttctaaatatttcactttttgttgaagtagaattttttcttctaggaggctttcaagttttgagttgagttcaagtgacatattctttacctcttcatttttgacttgtagtttatatgtagttcttctcagttccttttcttcttctttgatttcactggtttgcagcgatagatcataaaaagactgatcaaatatgttgagtttttgaaatatgtcattaatttggcccttcgtcttatggacaaagtctttaagaccatgtcccaactgaaggaggccattggctaaaatttttacatcgtctaacatagcaaatcttgattttggctctggagatagagaatcaaatgatgaattgtcttgatcaattctggaggaaataactagaggaacaataaaaagaaggagcttaattgtgaacatttttatcttgattttcaatttcaagcaacgtggaactgttttcttctggaagcagacctagacttcttaactctatatataccaatatttgcccagaaaaggtaaggttggtaggtgaacatagttaatcattaagccgtgttaacttgcacgaatgtaaccttcttccacattgagttagatcaatgctaaatgaaatcaaagaaatgagcaactaacttaataggtaatttgaaattgtatttaactttgctgtattataaactacacattcaatgctatggtgactacctgtttttaaaagctaattttacttttttatgattttaagagatttacaagtcaaaaataaacttttttgttgggtaaatttattattaaagttgaggggaaaaaagtaatgaattaagtatgcatttctcaaactgtactttagttcttttggaaacagtgatccattccaaaaaacactttctctctgaagcctttctccactccctcaggtggtgttacggctctcaatgctgtgttcctctggtactctgtataaatcaatgtataattatatgctcctcattttttgtcactataattgttaatatgtttttttgcatcaccttatatgtcttaaccatccttgtatattgtcacaaaatcccatatatagtaagtgtcattaaagacatttcactcccttttctccactgtgttctgtgtctctgtgttctaggctctttaccatgtgctcgttgaaggaacaatggatatgtggtcatctaggaccaaactagaattgaatcttaaataccttcaatgtcacaagcagcttgcccatcataagtttttctgaagtttgttagcttagtaacaattttgataatatacatttaacaaaaagaggagattaataacattttttttttaaagatgatgtcttaatgtattgcccatgctggtctggaaatactgggctcaagcaattcttttaccttggcctcccaaaatttacaggcatgagcccagccgattacaagcgtgagcccagccaattaataatatttctaaaaataaatgttccactatgcttccaacttagtgttaaaaaaatactaaatgcttatattagtgattattcttattgagtgttcatattaagaaatttgtgagaaaatagcatcctttaaaactgcttaatcttgacatattaatatggtgaaattgttaagaatatgggtgctggagtcagactgtggtgtgggtccaaaagccggctctagctgtctggccttggacaagttacttaacctccccatggattagtctcctcatctgtaaagctggggtaattatagtacataattcatagtgttatgataatttaacaataatacatgtagagcacttagaacagtgctgggcaaacaggtagtgctcaaaatgctagttattatgtcacatgaaactaacttttaacctgtgtatgtgtgtgggtatatataatcaaccttacctaaaagaaatttttcataaagttaatagctttttaacacagggaaaagttttatcataataaatttcagtgtaaattataaattgttaatacaaaataaaccatttccaaatttcttttcttttttagagacagggtcttgctctgttgtccaggctggagtgcagtggcatgatcatagctcactatagccacgaactcctgggctcgagcaagcctcctccctctgtctcccaagtagctgagactatagatgcatgccaccacacccagctaatttttaaatattttgtagagactgtgtttcactatgttgcccaagctgaccttgaactcctgacttcaagtgaacctcccatatcagcctctcaaagtgctgatattaaaggagtaagccactgtgctcgtccctaaatttctattcttagaaatgcctcttcattgtgtaaaatagaggctcttccttttgatgacttaggattaagggttttgggtataatagttacagtagaggcagtattccatagtggttaagagcatgattctggaataagactgcctgaatcagaa

SEQ ID NO: 106 - DNA, 4001 bp, Homo sapiens
gggactacctacttatagaatataagggtaactgagcacttggtcatagagaagaaaaataaggaatgatgtcctgggcaagaagagcaagagacctggtgggagagctgcacttgaccccaagaacctccttgcaggatggtgagaaagcctcctgtttggatgagcaggaagtggcacggtcagattcctctgtctggcctggtcttccgcatgtctggtttcatctcacagaccaaatcaggactcacttgtctggaaaatggcctgagaatacctttctaatcccaaactgagggcccggaagtccatgcttagaaagtgattgatacatgttggttcaggtaacagaattttcaagcttggtttcatgttaaaactttttcttaatttgagctgaggttaaccattgacttagtcagtagaagctgatcatgtctttgttcttcatgtagtttataatgggaccaatggtttttatatcagcaagaaatgacatgtctataggatatgctccttacaactaatattttcctgataatttcagaaaaccaaatttttatctctaaaccgtaaattcatgttggcccacctgagctgagctaaccagaaataaaagttattttgcaaaagaaagattaaatttatcttatttttggcctattaagtctatatttcagcattgcatttaaaaaatcctgtattcggagaaattcatttaagaccatggaaaaaaatagacgtatcacaattgaggaaccttaaggagccgcatccttcctgaacacaaagggactcttcacatggttatgtgtctctacacttaactctgagccaatgagaagagttacgtttacagagagaggacacaaaattccattaatgctcattcctggtaaatcttaggaacaccagagaactgtttctggcaaaactttgcttccagaggaacagctgttacagtttggtgcttccttggaatttcttgagatatagcctgtcagctcttggtgaggaagtagcagagctacaccaatcaggaagacttgaaccctgcttctaagacttgctgggtgactttgggcaaaccatgtagtatctcagcactccaagatggtaggctgaaacactgtgtggataaaagagacccgtgaaggtgttaggtaaacttacatagcattagaagtcaaaggaaatactgcataagcctttactaaagggaaagtgtacccacaaaagaggccccagtagtggttctgatgaccaggatatgtagaagcagtgctgtagatggggaggcactccacgctccctcaggggactggtctccttacctgcggaggtctgagtgaccgtctgtgctgcctgcagctgcatgatgtcaatttggttgttcatctcggagtacttgctctcagcatctgtgagccgcgactccatgcgcttgctgttgctctccagctccatcacctgcatgaccacgctgacccagtccctctcctgcttcttgttcagttcactcagcaggctgctaaggttggcaacttgggccttgagctccttcacctcctcacagcagttggccgctttgagctgtggctgtgctggtgtcttgtgcttagagagcttctgcagccacgctgggtggctgacaaaggccacgatgaaaatgcagagccaggtcacagctgagagaggctttttcagcatcttttgtgggtttgggtgaggaaggctcttccttcaggggagtctggagatgcccagctgaggtctgcaaagctgcagcaggctgactgaaccttacgctttcactctgagggcctcgccactttgttgttttctctctttccttgctctttgctagcctttctcaaagcttgagtctctgacaggggagctgaatgggtagcctatagctttccttccaagcccgaatgctccacaagtcagcatcttaaatattgtttgctgcctgtacctccacccctaccatggctgcaccaggctttagcccctcccagctcatctgggagggtcaggtgcctgttgggtgaagtcagcggcaacttaggccagaggaggggaggagggagatggggcgagtctttctttccttgcctgtacagtctctgggctaagacaagaggactgtgaatttgtgtgtttccagtttcgcctattagattatgcccctgccagccactggctcaactctatcagcaagcaggacagggtcagaagaatttccaaattccgttcaaaaggttatataaccatggggtgagcgtaaggtaggcgaaagagacgctactcacccagggaggcctgttaatgtaatccatgctgtttatatgaggatctggtatattttgacatcctgctgaatatgcttttatctaggctgattattcccatctctgatcattatttagtattttataaaatccttactcaacctggatctaacactatctcacatttgaaatcttccaacttagaaaagttctagaaatagaagaatagagtaaatctcttaggaagccaaaaaaagactttgtagccacagggtttggacagttgtctttttacatgctttctccttcaacaaagagagggccagtattagcatataacacttgatattttgcaaggaggtgtcagaagattacaacagagatgaaaactcagcagtgccaagcatgtctgggattggtcacccatgcttctgtcagtttctaggcaggacagagaacaggcccatccttagcccgtggttcaaaacttggaaaatatattaaaatatagagaaaagaatccctgtcacctaataaatccatatctagagtctcatttccctctttctttgctggtatggtttgcaatttgaaattattcctcctctatttgtatatgactttgtatctaaaaaacatgaatattgtaatttttcatgtactatatatgaaggacaatgctcttttgaaaagaaatgtgaaaaacatggagtttcagcaaacatccttaaaataagcttttcactaagaatctatacaaaggttcctctgtccttaaaacagtaactctgtctttggaacatacgattgctgtttccatgttatggagccactcaggcagttacttgtactgttgtagtcagcgtgggtccttcccacataagcctgatgcctgacagctctcctcccatgccataatcccccagagctcttttccagtcagggcttctagctcctcagaaagtaatttctgttcaggcagctggagttactgaacaatttttttttttctcagaatcaaaaagcagtggaggatcaggtggatcagagtttgttttctcacatacccagcctcctttgcctgctaaagggtgaggatgttactgatacccttatagcaacttggcattctaatcaaaagattctgttgagaattggcactgtctgccagtctgctctctttttgcaaatgtctagcccagctgggcaccacagccttagctccatagcattcattttagtaacgagactctggccccaaatattggcatcctacaaggtctgctaaaaatagggattttcaagtggatctcctggccatcaaatgacactgagcttaaaccacatgccacagaagtgctatgtaccatacagtcatgtatagcaggggtccctaatccccaggctgcagacctgtacttgtccatggcctgttaggaatagggccatacagcaggaggtgagtggcaggtgagtgagcattaccgcctgagctctgcctcctgtcagatcggtggcagcattagatcctcacaggagtgtgaaccctgttgtgaactgcacatgtgagggatctaggttgcgtgctccttgtgagaatctaagtactgcctgaagatctgaggtggaacagttttacctcaaaaccatcccccatctccccacccccaccctggtccatagaaaaattgtcttccacgaaac

SEQ ID NO: 107 - DNA, 4001 bp, Homo sapiens
tgtactataatagtaaaatgattaagtaatttaaatgtaggaaagaaaaactggctgcaactttaacatacttttttggggatttatgataaatgataggtggtgattttattacaattacaacattgtaaattctgaaaacaaatgcagttgttagataattatacagccaagagaaatcttactcgttttttttatctgaatttttgtcctaaaaagcctacgatccaatggaattaagtgagcttatttcacaggcaaatatttcattgatacgtatatcattttgagcacaaagttggttcagtgtgttctaactgaatgtatacaattttcatattaatagcagagcgatcaacaatatttgccaactacccagtttaaaacggctattaaatgttaaaatgtcagtgttcacattagtcttcaataataaatttactgttgcttaaaagtcaactcagtcacattattttttagaattaaacaaaaaattcagctgacaaggcaaaaagaaatggtcaatattgactaagataaaattaccataaaaatcataatactatttttagtcacagtcatcaagatgagacattactattagcaattatctacttaaaacaagcaaaaaatcaaatctctactcaaacaaaaatcggctgttgagaagtcactttaactgttctacgtatcaaataccaacaaatttctactgtgtggctttcagaaatctaacattctaagtttactgaaagcagacaaaaaagaaacaacctggtggcaggcaaaatcacaaccagttgcagtcaagatgggatctgtatgtgagcaatgaagggaggagggcaatttatgcgttcaaaatttaaaatgccaaggtagggggaagagagagaaataaagatatatagctccataaacaaagggagaaaaccatgttgggtgggaggcaacctaaaatttctgacagtccagaatcagcaaatcgaaggcctgtctcaaacaaaacagcttctcacgacaaactttgaagtgggcaaggaggatacattcctttgcacccacaagaaccaaccccttgaccactggcacgctattactgagtcgatcatgatttaccgaacggcccggatgatgggcaaaaagaagagtctgctggagggggcctaggattccagaagcctggggaggcacaccctaggctcggggaaggagagaggtggagaggggctagcactcctcaccgtgattatctttctgcccgatattgtgcgtgcggatgagagaggagagtctcctcacatcccccttgaagacgcactcgtgcaccgggtagtgtgcggggcaactgcctccatccgcgacgacagcaacggggttggtgccggccagaagggccggggactgggagttggcagtcacggaggaattgtgcagcggcagagccggggcgccggggggattggaggaggccggagctgccttcagctgtagccggtggtgatggttactgaagatcttatgacaagctttgccgcccttgccaatcctgcttctggtaaaggtaccgccgagggcagccgccgcttcctcatccccgggctccagcaggtccccttcttctttgctgggcttgtggtccctccgcagtgagcggatcttctccccggtcatcgccgccgccaggggcaagggggggaatcgggaggctcaccgctggcgacggagctggcgctgcggcggcacaaggcgattagagcggtggccaagagcctccagcgcagcatgaactcccactgagcccccgagcctgggacaaacgcatctcccggggaagagccggctctcgcctaggcacgaagggacgcgcgctcgctgggggaagctagaactcaggtgcccacgacaccaggatctcagtctcgccgtcgcagccgccgtcgctgccttacaccgaaaaacagggcacggccatcttcctcttgctcctctcgcgagagctcccccaggagtgaagagagagaaaacaccgcgataagtgagccacccgctccctccctcgcaccttctattcccagaatcactaggcgccggcgcctccgaggcagtgtgtttccgcccagagctggagtctcccagctgccagccgaccccgaacccgcactcccgccaaccgcgctttttgtgggcggtcggaaaccacagcctccgttggatatgttcggtgcatgttataaacaaccacttaaaccctccggatctgagcctcccgcagaggaatgcagaatgacgccacggcacgcaggatgtgatgtcaccgagatgcagaggatactcagtcaaccaacatttactgagcatctacttcgtgccgtatgtacgaagctagcaaatatgtacagcaccagtactgattgcagggagcactgtagaagaggaatgaaggccaaacaattaaaagcggaggcggggaggtgggttgcacacaaaaaagggagggacgaattttagtgttgagttgtcaggaaagtcatagaagagtttaggtgctgactttggaaaatgatgggctgtccagcaatcggaaagaggggaggccactcaaatatttattagatgaatgaatttcgggcagatgtcagagttaacatatatgagggtggggacactcaaggagggcaaagaatcgtgtaactgaaatataattgtattagttcatggccaacctcaacctagtgtcaaactctgaagaaacgtaaatctgccaaccataaaactttaacaaagtaactaaagctggccactgaggacgtaaggagggggcttagcaaaacatcctaaagatcttcacccatttaactctccaaagtccccctatgttctgagagcaaatacttcagatctctctctcttttttttgtttttttgtttttttgacagagtctctgtagtccaggctagagtgcagtggtgcaatctcggctcactgcgacctccacctcccaggtccaagcgattctcctgcctcagcctccagagtagctgggattataggcctgcgccaccacaccaagctaattgttgtatttttagtagagacggggtttcaccgtgttggccaggctggtcttgaacccctgacctcagtgatccgccagcctcagcctcccaaagtgctgggattacaggcatgagccactgcgcccggccagatctcttctttcttaaagtttatactactgctaactcatctccgcaaacaaacaactcgatgggcctctcttaatcctccccagtcactcaacttttcacctccaattttcttctcagtctgttcagataaatctgtttcttcctcttctttctttttcggtggagtggagagttccgtttatgttaaaacattacccaatcaacagttcaaagcatcctcttgagacagcagtagagactgaaaaaatacatgcaataatgtttgcttcttccacaatagccaatatttattgttaacgctaagccaggcagtatgcttggcactttatatgctgttatctccccctgattagcattagtatcctcacttgacagttaaaaaaaacttgcccaatacttcaatgctagaatgtggtacagtcaaatctgacagtaaggctagagagagaggaagggccaggtcatgcagggctttgtatgtcatcttaaaagtttacacttggccgggcgcggtggcttatgcctgtaattccagcactttgggaggctgaggcgggcagatcacgaggtcaggagttcgagaccagcctggccaatatggtgaaaccctgtctttactaaaaatacaaaaattagctgggcgtggtggcttgtgcccgtactcgcagctactcgagaggctgaggcagaagaatcgcttgaacccaggaggcgggggctgcagtgagctgagattgtgcccctgcactccagcctggggacagagtgagactctgtccaaaaaaaaa

SEQ ID NO: 108 - DNA, 4001 bp, Homo sapiens
tcctcccggagcgccccgggcacagcgccggctcgggaggagagaagcttggcgggggggggggggggggggggggcggagctctgctgtgctatttatagcctagtcactgcgggtgggggcgtcaggcaccaaactgctcccccactcatgcacacataaaccctcaaaaacctagaggctccaatcctgacttccttttctcagccgacctcccctcagccccaacaaacctaagtgttccttaggggactcctccgcgacccagacagggaccatcatccagattcttcgctgagattcagcagatccccattctccgcacttggtgtgtttgtgcgctcctgtgcgccagacctgacctgccatacacggcacatggcacactgtgtaagaaaggtgtagaaaggctttttggatccacagccggtgtccatactgtgcaaagagaggcaagagatgtggctttcttcctgtagtttaattgtgaaggagatcacggtccagcctggagtcagacacagatacacccccgccccatctctcaaaaacggaacacccatcgcagagaaacttggacctcagctcccttatgtagacctcttagataagtatgaggaaggtggatatgggagcacttttagataaggcaagggacattccaggtgcctccaccccgtattattgtgggcagggagataggacaggggcaggaagaagagcgaaccttgtaatacactctctcacattgcatctctttaatctcagtcttgcttagacgtcttattttttccatcttgcttgacgatctctgtctgaaacattccttatatcttctctcttcctatctgtctattggtctctcacactgtctctgcctctccttgccacctgccctgtctccatggttaccatagcttccatccacatattttaggaatgagtttgtgtccagctggaaggcaccaagggaagtgggagaaaaagaaaaatcctaaggatttaaaaagttcactcagggtcctgagctaattcagaggctggaggccccccagatgcaagatactgaaaataatgttcccggggatgggagagagagagaaatatttgcaggaagctacccatttttactagttatttcttggacacgtgtcaactatgtgccatgtgctttacatacactattttcaatcctcacaactttataagataggaactatcatcttcttgttacagatgaggaaacagacttaataaggttaagcaagctctccaaagcttcacagctatgtttctgtcctatggcaaagactgggagcttgccactacacctacagcctcccagtctacaggccattttctctgacatctgggatgttcttcttgactaactcctagatttcatctccattctgaacctttctcccttgtttctgctttctgtgaaaataggactcctccttccactctgctggctttcccaaggagctcgcaggaagtggaaagtagtggaaaatgcagaaaaagctgggctcctgccctgtctccccaaccctggtacgctgatcccaaatccttcctttcttgaaccctctgcccaccttctcacagacacggcagcaacccacagaaaaacatttttagaaaagaagtatccattggtggtgctggagagaggcagtgtatgattgaaaggaaggctggagtaatggagagaccaagctatgaagctagagtcacaaaaagactgatccctaaagagcagcttttacagaggttcatttctccgtaggccctctcctcctttggcctctctgtaggggctccctcaacacggtccctcgatgagatatgagtgtcacgttccctcggtgaactctcgccggctagtggctccttcatctggagtgagaccggaaataagtgaccccagctgattctgcaacgcccatctctctctgcgacccgcttcgcaagcttcggttccgggcgtactcgctccctccctccttctcttcctaggcttcaagagggcggacttccctcctcggcttctcctgcattggccgagaaaactcaccaatagggagctccgggaggcgggcttagaacgccaccgacttgaggaagcccagtacatttcaagttggtcgcggcttgggctccgctttggggaggggcagcaggtaaggcttgacctggttcggtccgacacttgccaaacttgttcaccccggccaggctgcgaaatagacaacgctttccgtcaggttgttggatcagcccccttctggctccctaccgtttctcccctgggcttccatttctgtattgattgtatactagagaatggcagttttctatcgcgcatggggagagacattaaagcagaaaacgagacagcctcttgtatctgtctttgctatagcatcaacttccccctaatctattaatattatcccaagagcctgacaaactcctgttatctatgaagactagctgaaatgctacctgtagttttcctgggccgcctttcttgcaaaatgaattgttcccccgtctacgatagcgttttgtatatacctttattaggacacttagtgcactgtctctctttaacgtttctatgccttttagaatagaaggttttgtaggacaggtgctagtagttaatatatagtgcccaataaacgttagttaaatagaattgatttctggtaactagcactctttttggggaggcagaatttaaactcctaacataactagggaacaataaaagacaatacagtatgtaattaagagccattaaattagtggttcataatattagtgtttcataattgtttctacaatctagagaaggaagaaagcaaggagaactggaatggtgaggggaggctttatggatcacaatttctcaagtttggaaaggcccatagaaatgatgtatttattcattcaataaatatttattgagcacctactatatgccagacacaatgctaaatcatgctgatcatagggaatcctctactagagccatgcatccttcttacaaaccctatgtagtaaatttttacccagcttctatgtaaacatctttagtaagggaactctcttatctctcttgtagatcattcaattttttgatacctgttctttagtcaatatcctacaaatattctaaataagaaatatatagctaaaggaaatgcattccacacttccactgtaaaagagggaaatatggctgggcacggtggctcatgcctgtaatcccagcactttgggaggccgaggcgggcagatcgcctgaggtcgggagttggagaccagcctgaccaacgtggagaaactctgtctctactaaaaatacaaaaattagctgggcgtgttggcgcatgcctgtaatcccagctactggggaggctgaggcaggagaatcattagaacccaggaggcggaggttgcagtgagctcagatcgcaccattgcactccagcctgggcaacaagagcaaaactccctctcaaaaaaaaaaaaaaaaaaaaaaaaaggaaatctgtccttttacagtggaattggtagcattcttaaaagcaagccatttctggctgggcgtggtggctcatgcctgtaattccagcactttgggaggctgaggtaggcagatcactttagcccaggagttcaagaccagtctaggcaacatgacaaaaccctgtctctacaaaaactacaaaaaaaatagccaagcatggtgtctcaggcctgtagttccagctgctcaggaggctgaggtggagggttgcttgagctggagaagtcgaggctgcagtgagccaaaattgccactgcactgcacttcagcctaagcgacagagcaagaacctgtctcaaaaaaaaaaaaaaaaaaaagaggccgggcgtgatggctcatgcctgtaatcccagcactttgtgaggccaaggcgggtggatcacgaagtcaggagtac

SEQ ID NO: 109 - DNA, 4001 bp, Homo sapiens
gaaacagttttctttccagctagataattctaaacccatccaacttacttcccataatctcattatagtaagatcttgttatactaaaagtttagaatgggtggtcattctttatggtcaaacctctgtacagctagaatcaaggaggacagagggatggttccaaattccaaaagccagcccactcattccagcaccttggaaaggaggtactgcccaaggattgggggatcagaaagaatgaaatagtttccccattcctaagaagcaggcagactccacaaacctgtaagggaaaggcaacattgaatactttcagtaactaaggaagagtccatatgaatttctaaaaagtcattatgagttaagactgagtctgggcagcctcagtttctggtgcatataatagtaaataccttttgattggttgatcaatgtgtggaaactaagtagagatgcaaatgtaagtgggacaaggacaggcctcaacagagttcatactcttgcctcatagcttgcttccaggattctgtaacctgcccatgcagaatgagctaattgaacatttctgatattttcttatgaacgatactactaagtcaagttagcaaagcaatattgctacaagtagctggctaatttgcttctaaattagccgtaaccccaacctctacagaaaattccatttccaaataagggggctctctgtaagagatctctagagaagaagaagcaataccctccctaagccaccaccttctataatcttatgtttttttttttctgggagaacatggggaatagagtgacttctgctgggaactctgagtctgctctatcctcttctctcatcatcactttcccccacctcaaccaaggaaacagagagtatcattcctaagcaactgggcaagggttcaggaaatgaataatctggggaaaagcaggcagaaaggccttgagccttgactggcccaagaaccagtctgatgatcagacactgcagtgaactggctggggtggactctgcaggcaactcacccagtcctctggggagcagtcaggcaactgtgcatcctctggcagtgcctgtgaggctgaccagactgcaatattaactcacagcaagcaggcaggaggaaaagtgggactggcgaccactgggcagagtagggcagaggttggaggggagaacagaaggttgctgttgtgggagcatcaattggaaaaaggtttggagtgatgtttgaggaacagcagtgctggtgagagatgggagtgaaagtggcatggggcaggagggaagcaatgacagaggagattgtgaaaaagggttagcagaaggcacagggctgggagtgcttgttgaactaacaggaaacagcaaggatagagctacgtggaaggcaagattgcggggacagggcagggatgaaatatggggctctggggcatgacttggtggtgtagaatggagcttgaggccaggcaggggctgaggaagatgcttgggggaggtttggtactgggagacggagcagaagtagggtcagggccatgggaaggggacagagttgcagaaaacgaaccagaaatcgggggtgtagatgctaggaggacaagaaaggggccggggaaagggccttggggatggcagaggtgagcagggcaagtcagaagctgcagggcagggtcttgaggaaggcaaagctggcgggcttccttgcaagactagaagagctagaaagactgataaaaagaaaaggcgatgatgcattgagacgggactaaagacttctgtcaccacagagctgggatcccaaccccatcctcccacacattttggcacctaccgccacctgtgtgctggagcaggagaagatacgcttcatggccggggtcggggccacgggggatggggacgcgcagagagccgggccacaggttcccgaacccaccggacttggctgcggctgtgcaagagacagctgtcaaaaagcagagcgggccccgccccacgatccgcctcagaacccgccctgctcaatcagaggcaagaacccaagggctgggctcaaaactccgcccctggccctgccctaccccatccctgcagaggagaaaagcccgcagtcttaggctgcgacgggggcttggcctcgaacctcgcccttcaaatctgaacccaccctgggatccgacctgctcaatcaggaaaggaaccgggtgggctccagctgagactcctcccggacccggacccgccccaccctcagttccaggcggggcctccgccccaagccccgcctcagccccgcccctcggagagcggcagccagaggcaggagggtcccggcttctaccaggggcttcggtctcacggactgtcgcatttgcatttaatcactggtaaagttacctctgcccccgccaactccccccgcctctcccccgccactattccccggccaaaaacccaagcaaaaaagagcatttgaagagagcagttcggaaataggagattgtagtgttaagcagagcagagataatgcgcggcccacggtaacctgggggacaaaacctaaggaaaggtgatcaggttcaattttattttttctttctgttttctgagacagtgtctctaatctgtccctctgtcggccaggctggagtgcatggcgctatcatagctcaccgtaacctccaacttgtgggcttaagggattctctcactccagcctcccgagtagctgagactacaggcatgcaccaccacgcctggctaattttttttttttttttttaagagatggagtgtctctatgttacccagtctggtcttcaactccaggcctcaagcgattctcctcaccgtagcctcccaaagcgctgggattataggcatgagccaccactattcctggcccaggctcaatttttaaacgcacatctgaattagaaaacagcagagagcgaggagagcaattttattttaagctgccccccccgcccccgcccccgcatagaaacaaaaaataaccaaacaaaaaactgtcttcattatttccactgcccttgaagttcaggctcttggtaattcttgaacagtcagtcgcagccaactggtcttcctgtctttcttttctcctctccccgccggagagagctcactaaaatgcatatgaaaacctacagggtaaagcccaaagttcttaagtggtttacaaggctcttcaggagtcatatgctgccgccctctttcccagtcccatctctcattactttcacacaaaagagccactcaaactgtttctttttttattattattatttttattttttgagacagagtctcacccagactgaagtgcagtggcacaatctcggctcactcaccgcagcctctgccttcccggtccaagcaattctcctgcctcagcctcccaagtggctgggattacaggtatgtgccatcacgcccgctaagttttgtatttttagtagagacagggttttgccatgttggccggactggtctcaaattcctgacctcaagtgatccacctgccttggcctcccaaagtgctgggattacaggcgtgagccactatgcctggccttgttttttttgttttgagacagggtctcgctgtcacccaggctggagtgtgatagcatgatcggggctcactgcagcagccttgacttcttaagctcaagggatcctcccacttcagcctcctgagtagctgggactataggtgcacatcaccatgcccagctaattttcatatatttggtagagatggggtttcaccatgttgcccagactggttttgaactcctgggctcaagcgattctcctcacctcaactcccagagcaccaggcctcaaactgttctaatttacaattccctttgcagctggtgattaatcctcccaagaatgcctcctgtcacatttgatccctgcggtggaaaagttaaatattaaatttgaa

SEQ ID NO: 110 - DNA, 4001 bp, Homo sapiens
catattgcaacggatagactgcagaagcagacataagaatctgtctcccattaagccagaaattaaagacatttgcagaaatgtaaaataatgccactttctaactaattcttttgttctggaaaatatttttatgagaaatatataattatgttacatgtgaatttattttttaaggaattaataaacattttttaaatcctcagtttaatttctaattcttacaacatatgtaatactatattaaaagacataactcacataaaggaaagctcttcgggatcatttcttaagagtaaaatggagtcctgagacaacaaagtttgagagcactgccttaggatatacatgagacctagaaataggaaagtcttgcaggatgcttgccctactcaattgctatagcagggcaaggaggctttgcagggagggagggctgtggtgcaaaccactccagtcagggctgaagggaagtcacagcaggaactcagcgcaattgagtgagccagggagctcaaccgagtcctgacaaaaccaggagatacctgttcacaaggtatataagccaaaggttaaaaccaagaaagccatagggcagggagcactcggtataccaggaacatcaccccccagagccaagggaaggcaaagggaccctgacccgtccccataactgattccgtgagccatccacatagccagggcaccatctcaaggaaagaatccaagaagatacctgataacctaaatatttgtatataagagaaattaaacactagccaaagaaatcaattctagattgagctaaactttaaaaccaatcggacatttagattctttcctaataatcaataagtaaatgctcatgaaaggaaccagatcagtcatatacaaaaataaattacattttctttgcccacaaaagtaataacatacatcaaaattgtaaccttgctacatataactgaagtttcacagagaatatgagcattggagggaagagggaaggctggaactatgaaggcagaatggcattgctttagtcttgattctgttactaattatgtgacttttctgaaatgaggatagcacctggtctgccttactaaataagtgtagaaaaatctataaacttttctttttaactatagaatgtgattgctttcgagccacccacaatagaaaatcacataggtcatagcacctaccccataggctctcacattttggtagggaagacacaagtaaatcagcaatgacagagtgagatcagggattcaatggaggtaggtagagtgctttgaaagtaaaaccgtggacatctacattcaattctgggtggcggtctcagaaagttttcccagaagaggtgaaacctcgatagtgaagagtaggagtcttaaaaggaggaaaaaaggacaatccaggtaacgggaagagcataaacaaagggcaaggaggcaggcgacgcagcctgaagttgtgatagaggagtagatcctaatgtgccttttaagccaactgatttttttcttcaaaaaaaaaaaaaaagtagtcgcttaatcaagtcccagctcaaggagaaggaccccaagggcaaccctgggcacacagagttaaacaaagagaaggcctgaggaacaggatacagaaagtggcagcgccgccaggtgatccaggaggtcccgcgagggggcaacggacacttcagggcaccagagtttgctcttcggcctgaattccctagggaccttctgcgatcccttgcggctgccggcggggtaggagaccggtgcgcaaagctctggacagaagcagtgtgaggacgctgagattgaagcccactcccctccagccctgcccgagcagcctggagggaagatgtccgtctaccccatcgcactcctccccaagtgcccaccccggcccacagcgccaggacccctagactcaccacacccgggccccggcctcctcggttaccatagcaacggcgcaacacgcgaggcagcgcctcctcctgcgccgcggttccggcagcgcgggaaggttattcttggttgcaaaggcgcaggaagccagagtggaaaacagccaggaattatctataatttcagtctctgggtggcgtgtcggttttttctttgttttgtaaattttctgtaataaggtatttgttttacagtttaaaaataagttgtgcatattggttgttggcctgtctttggcttttaaacgaaagaattttctggaaatatgaggttgcattctaaaaactacaaaagattgtatgaataaccccttgcttaattttctagttattggatatctttctcccatggtttatggtcattgtcaccagcaaggagtgtttcaggcgacctcacaagtgccaactaccttaggagcagaagaaacttggagactatatccctcttgattcagaaattcaagatgcaaaacacaactttaaaaggggggaagcgatggaggtggagggacaaggggttcgaaagaaaccagcagggaagggccaggcatacctagcaattatatcaatgttcacatgaatcacacagtgaaaacagggaagtttttgtgctgaaggcaggtgtgaaggaaaatattcatttctttactgtttctaccaagagtccactaaggagtaagtgaatgttttagaggggctctgaacatctgtgctgaagttcgaatagcctagttctgaaatgaatatttgacctaaggcccaagcaaaatttcaccattgttacagtaggtagtcaggcatgagcagagcaggctcccctatcccccaccaggaatgtcaggcgaccatcaggtgataggcagttgttaactgtctctctaaaataataattggttgcagccaatgccaggaaaaggcactctccgaatagatagaaaacatctgaaactggttatcagcagcttccccataagagctcaggagttaggtgatgtgagaaacacactcacctgtccaaacccaaagaatggacttagaggcatgaagaacagcaaaagagacactttttaataacggtcttgcaagatcgggtgtctggtgagcaggaacacccagtgcagtttcaacaaggaatttatcacctagtgtgcaagtccctaccctggttcctcataggctgagtactatggggttacagtcttccccaacgttgcctaagtttcattatccccttataaggttacatcttgtctccttccccactttaagttttgatttcccaatgacaaaactttctttccttttatggattagccaccccaccccctatttttttttctccctcccctctgacttctgtgagtcttatcactcttcccagatgtctgtagcatgcggcttgtcacatctgcaagggagctgcctggatttgccggggcctgttttctgaaaaatggaccacttaaaaagtacttcttacaggtgagtgggctcaaggatacacattaagagtcaaaatggtggagtttaactggtatatgaccttcttgggtacattcaattggtaagagaagaatgcctcaagtgtcatgcatagaactgcagtaaacacactgcacgtgctcctctcccaagtgctagcaggccactgcacatgtggatagcccatcccaagagaagaatcaggggagaagggacgcaagaccctagaagtatgccaccatataaaaccctaaggccgggcacggtggctcatgcctgtaatcccagcattttgggaggccaaggcgggcggatcatgaagtcaggagaccaagaccatcctggctaacacagtgaaaccccgtctctactaaaaaataccaaaaaaaaaaaaaaaattagccaggcgtggtggtatgcgcctgtagtcccagctccttgggaggatgaggcaggagaatcacgtaaacccgggaggcggaggttacagtgagccgagatcgcaccactgccctccagcatgggtgac

SEQ ID NO: 111 - DNA, 4001 bp, Homo sapiens
gacggcaagcaggtgtcctcgggcggcagccctgtgcagcgcagagcggccatgcctgtccctgatgcctgggtctgccccgtggcccagcagcacctcaatgtcctagaagaggagagaaaagcaggggccggcctcagcccggtaggcgaggggcagagccaccaggcgtttgcccagcccaggcctcttctgtccccgcagcggcctgtctctcctgacaccacttcctcatgttgtgaggccgaacccaaggctggcctgcttggaaacgtccacttttccccctaagagtccttagagcaaatccaaggatctgcagccaacaccctgcccgctgcccaggaacgggggtctcaggcacaggcccggcgctggcggagagtctgttgctgccaccagcatgaagccgagccccgggcctcggatcccgccctggtctccacgggacggggctacaccggaggggcacagccgggggcgcgctcagggccttcgtgcctggacaccgtcccccagcctggctccagctgccccggtggcacgtctctggggatcctggccctgcgccccctcccatcactgccgggcggagggcgggacgtacctgggagcggcctagggcggccgccagacccagcgctgtggcccccgcgccatcccgggcgtccacccgcgccccgcgcgccaggaggaagcgcagcgccgccccgcgccccgcagcggcagccacgagcagggcgccgtccaggcccgcgccgccggccgccagcagctccagcaccgccagccgcccgcccgcggccgcccagtgcgccgccgtccagccgcgcgcgtcctccgcctccgctgccgcgggtcccgggcccggagcctccagcaggcgcgcggccagcagcgtgtggcccagggcagcggcccagtgcagcggcgtgaggcccgtcccggagcgagccgccgccgaggccccgcgctgcagcagcagctcggccacccgcgagtgtccgtgccaggcggcctcgtgcagcgcggtgcgccccgcccggtccaccgcgcccaccggggcccctcgctgcagcaggagacgcaccaggggcgcgtggccccgcagcacggccaggtggagcggggtccggcctgcgtggtccctgaggagggggcaagggcgtcggcgcgggggtggaccactgaccagaaccccgccctgccccaccccgtcctgccgcccacccagcgctgggacccccgtcctaccccatccagagaagggactcctccacccacccagtgctgggacccccatcctgccccacccagagaagggaccccttcaccccccagcgcaggtgcacctctcctccacgctggcaccttgccgcagcagctgcgtcaccaggcctgcagggcccctccacacggcctggagcaggtgcccccagccctggacaacactaggcccctctgtcctggttcccagggcctcttcggagtccagctccatccaccgcagttcctgttcctcctcctcctcctctctgggctcaggcctctgggagtccatctgggggggagcagggatcctacatccactgtggaggcctctggcctgcccccagccgtgtcccaggccaactggagccccccattccagttaccacttagccttcagaggggcttggctctgttacccaagggagctggctcaggagctttctgctctggctgagggtcctctgtagacgggttctggccgaggctcagcctggtgaccctcttcacaaaatcccttctgcaggctttggggtggagtgtctgctgctgaaaagctgaatggtggcagcttcagccttgcagggggtgggagaacacagctggtcccctgggccaggctgaggccacctgacgctgtttactcagccacttaggaaggccctgccttcgggcacagccccctgtccaacatactccctcccctgctggctgccagggccccagttcggctgccctcctggggaacaaaggccaggcggttggggaggacaagcaggaacatgcttgtggacgaaagttgctcagacgccacctcccccaggaagcgcagccttggatgtaccccgatgtgcccctggaaggcctcacagggctctccatggggcccaccctcgggcagccccctcacccactcctgtcccagctggctaagcccacccaggggtgggtgccggcccctcctcccgattccaggctggggaggagggcagggtgaggttctggccttcctttctgtaaatgctggacaggacaaaagattcaccaaggactccaggcaggtggcctggaaaagagggtggcgctggcatgggagggacgaaaaccctttggggactggctggggcaagtctggagccagggaagggacagatgcctgggcaggtgggggcgggggtcggggggcaggcgggagagtggggagaatccctgctagggtgcgtctgcatctggaaaagcagctctgccccagcaaggcctggggcagcgggatcctgggggcctggggcaggatgggtggggctggtgctgagggcatcttcctgtctcccagtacctggggccaggcaggagaagggagcatggctctttggggtggctgcagcagcctggcccctccagcggctgcacgggaaaggtaatgagggctacccattcccaccccagcccccttcagcctcccaggtccccaaggacagggtctcctgagggccctggtctggcctcccccactccctagaggactgcctctccaagggcccaagggaccaggggccccatcccaccaccccccaagccacacagaccctgccctacaaacctcatcaggctactcatccgtcaccttcccagatcctgaccacaggtggatctgaggcaacgtgcgactctaaccctgttttagtttgttcttagcatttatcactacaggaaagtatctatgtgtttatttaaatgtctgccttcctcttctagaaggaaagctccgtaaggctgaccgggaaagaagcgaggagctctgggggctgggtggaaagtcccgtactcatcagggccagggaggccacagaaactacctcacgccagcttcccaggggtacagcggctagaatggacctcgaggaggcccctcccaagactcccgtctcccgggttccaccgcagtgggggcagccacagctgcctctgcaatgcttgtaggacccacacacagtggggcacggaggggcagaggccgcagcccctttgccatgaatccaaagaacctggagtgattctgcagagacgttcgaaccagagcgactccatcttgaacaggggctgggtaaaatgaggccgagaccggctgggccgcattccctggaggtcaggcattcttagtcacaggatgagatcagcacaagatacagatcacaaagaccccgctgataaaacaggatgccgtgaagaagccggccccaaaccaccaaaaccaagacagccagtcctcactgctcattatgtgctgattataatacattagcatgagacacgcccaccagcaccaggaccatttacagttgccatggcaatgccgggaagttaccctagatggtctaaaagggggaagaaccctcacttccgggaattgcctgcccctttcccggaaaagtccggaataatccacaccatgtttagtacatatcaagaaacaacaataagtgttctcgtcggagtagcccaggccgctgctcagcctatggggcagcccttctcttattcctttactttcctattaaacttgctttcagtttactccgtggactcccccgaattcttccttgtgtggggtccaagaaccctctctcggggtctggatcgggacctccttttccgatgacagtccctgggacttagtagcagttcagcagtgtttgttgaatgaataagcgagagacctggttggggggcac

SEQ ID NO: 112 - DNA, 4001 bp, Homo sapiens
gccaggctagtcttgaactcctgacctcaggtgattcgcccccctcagcctcccaaagtgctgggattacagggatgagccaccttgcctggccattttttaaatttaaacttggactaaagttcaatgcctgcttcaaatcactgatgcataagaaacaaactttgaagaagttcccatgtgaaacctgtttctgaccctgataaggaggaccctcaacatcagataatatatttatgcaaggagcgagtacctgagctaccaggaaaagattcaagtgagctgccctaaaacctacaaagagtgccaggctcgggggctcacgcctgtaatcccagcactttgggaagctgaggcaggtggatcacttgaggttaggagatcaagacaagcctggccaacatagtgaaaccccgtccctactaaaaatacaaaaatcagccgggcgtgatggtgggcacctgtaatgccagctactcgggaagttgaggcaggagaatcacttgaacccgggcagcagaggttgcagtgagccgaggccgcaccattgcactccagcttgggcaacagatagagactctatctcaaaaaaaaaaaaaaaaaaaaaaaacctacaaagagaagaaactgtttaatcactttttcagtttaaacctccttctctttggttgataaaaccatcataactcaaaaaatcctccttaccctttatgaagaaacgttagaaagctcttctgggaacagcccagagggtgttattggttctcacatccaggccaaacggtatcacccagaacaatacattcttaacaaaatgttacttctccctaccactctggtataatagcatttctgtgcacttttccccattcctcaaggagtggggctgaattccctattaggtaagagttgtagtaacaaacttcctggtgtgggcctgaatggacttaatctttaagggaaaggttgaagatcctggttctctatacccaatgtgaaaacctgtttgaggtatccgagggctaaaatttggcaacaaggaatgccaccttctctatttgaatatgattttgacataattatttctgtggccagaaagagcatcttgagctccgttttggagaagaggaaactatggcccagagatgaagaatggcttgcctagagtcacagttggtttgccgaaggactgtgaattggttctgtcttcagactccccgtttagctgaggagtgggggctactagatttggtgtcagaaaaccagttcctccacttctgtaaatcatttcactgccctgagactgtctgctaatttggattctagaacaacacaatccaccttacaagtacgtaaggaggaaagtaaataacaaacgggtaaagtgctttgtaaactgtctatacaaatataagagaccgttattacaacacagcggaagaagttgaaaaaaggcaacgtcttgcacaccccaaaactggcaaagaaattactacaatcactaagtgaaagaatcctggcgggggaggcgggggcgggattcaattttccaacccaagccaccaaaaagtattctaaacgtgtgcttgtgagagacagcttttaaagtttgattttggtttttttatttttttcctgaagcctctaagaataagctctagaaacttcaagttatctccgggatgaccctgatagcaagcaactgtttcctctccctggcccctgccaatttcagaaaacaggcacttaaaaaaaaaaaaaaaatcttagttgccactccacacgccggacgcgaaagcccagacagaccctgctcatcctctatgccgatctgcacagacaccaccccagttatatccttctatcgatcggtcgattcagctacagacaactcccttacgttccaattctaggcttatttcagcaagactgatgctttcctctgcgaggctccccgctggccaccagccctgctctcgcgacctgccgctccgactgacgggaaaccccacacggggcggggactccccaaggaaaaaacgggtcgcctcccaacccgcgttgtcctcgcgccttcgccctgggtaggtgaggccgagaaggcaaccgcgaaaaggaggcggaaacgcctcctacccgacccccgaaaagttgaccgcgaccccgcctcacatggcccctcccaaccccgtctctttaaggcgacagcagtgagagcgcatcatttagtttcggcgaacccatctttaaagcacgaaactactacgtcccttatgttgagttttgtgaaaccgtctccagggatcaaattcagagttgcggccacacgacgtgccacatatcgttacacggcgggggaagaagcggattacgcctcccgtcccctctccacctccggtcactgcgacgagtccccaaactcgcccgcggtcggagaacccgccgctgacccagattccgccgggcgaagggcagagggcggcgcgcgcggcttcccggaggagtgggcgccgccggagcagacagtgcgcggaccctgcaagcgaccccagcccgcgcccgtcgcgacgtcggacgcccagggcctcgaggccggggaagcccaccccctaaaaagatgagttggccgcactgcagaaaagttggactaacttctcaggcgcctatggctgcggcaggggctgagtgggactggggggtcgcgcccacgccgccggcccccaggaggaggagtgccgggagcgaagcggcggagcgcccccaccagcccgcttcccgcccccacgaggtcaggacgcccgactcgatgaaagccgaaaggagctaagcccccatgcacacacaaaaacgcccctagaaacttcaacccttcgccattttaagtagaagattttaatgatttaaaacttaaaattaaacatttccccaaccctaacccggggggatgggggctaacttattactccatccccgcacacccacccaggaccaccagaaatccgatcctcagaatactggactgatggggaagcggtgggggctgagtcatctcacctcctccggggatctgttccttaactccaggttaatcttcttcttcatctccatgtcctcctcttgctcttcagctactactctccttttccctttcctgccttccccaatacccccaacccaaaatttttaagagatttagaaatgaatgaaaaggaacgcaaatataaacgcccactaccaccaccagataggtgtgggggagaaagaagagaatagcaaatggagtccaagagttgggactctaactcagctgcccccacctccttgtccacacactagcgcgcgcacacacacgcacgcacgcgcgcacacacatacacacacacatacacacacacacccgcagttccttccccttcaatggctgctcagagactgagcctccatgacacggcaccgccaaccccctggcctacactccacccacctcccaaacgtgttggttgattcttcagcgtcacattacttcattgggctaggtaaaggtctatcagtcttcagggaggccctggaccagaaattccgtacctattggctacgatcaagcgcgcagttaattttgataggtccaggagggtgtacgtcccggagaaatgattttgaatcccagtaccccccctacttttctttatgtagttggcgcgctttccctaggcactcggacagtttcgttgtctgttggatttggtttttagtttttggttttttattctgttgttagtgttaaagagggagaaagcatccttccgtgcccaacttgcgatactgagaattcaccacacggcacgcactggctcttggccgttttaaaagcatagcctctgctttgcaaccaaggtgtacagcaacgtgcgcatcacattaaaaagatgccttcgtggcattgtcctgctggggtcaggctcttcacagagactgaccttccgtgatgcagagctagagcc

SEQ ID NO: 113 - DNA, 4001 bp, Homo sapiens
tggcaaagaaattactacaatcactaagtgaaagaatcctggcgggggaggcgggggcgggattcaattttccaacccaagccaccaaaaagtattctaaacgtgtgcttgtgagagacagcttttaaagtttgattttggtttttttatttttttcctgaagcctctaagaataagctctagaaacttcaagttatctccgggatgaccctgatagcaagcaactgtttcctctccctggcccctgccaatttcagaaaacaggcacttaaaaaaaaaaaaaaaatcttagttgccactccacacgccggacgcgaaagcccagacagaccctgctcatcctctatgccgatctgcacagacaccaccccagttatatccttctatcgatcggtcgattcagctacagacaactcccttacgttccaattctaggcttatttcagcaagactgatgctttcctctgcgaggctccccgctggccaccagccctgctctcgcgacctgccgctccgactgacgggaaaccccacacggggcggggactccccaaggaaaaaacgggtcgcctcccaacccgcgttgtcctcgcgccttcgccctgggtaggtgaggccgagaaggcaaccgcgaaaaggaggcggaaacgcctcctacccgacccccgaaaagttgaccgcgaccccgcctcacatggcccctcccaaccccgtctctttaaggcgacagcagtgagagcgcatcatttagtttcggcgaacccatctttaaagcacgaaactactacgtcccttatgttgagttttgtgaaaccgtctccagggatcaaattcagagttgcggccacacgacgtgccacatatcgttacacggcgggggaagaagcggattacgcctcccgtcccctctccacctccggtcactgcgacgagtccccaaactcgcccgcggtcggagaacccgccgctgacccagattccgccgggcgaagggcagagggcggcgcgcgcggcttcccggaggagtgggcgccgccggagcagacagtgcgcggaccctgcaagcgaccccagcccgcgcccgtcgcgacgtcggacgcccagggcctcgaggccggggaagcccaccccctaaaaagatgagttggccgcactgcagaaaagttggactaacttctcaggcgcctatggctgcggcaggggctgagtgggactggggggtcgcgcccacgccgccggcccccaggaggaggagtgccgggagcgaagcggcggagcgcccccaccagcccgcttcccgcccccacgaggtcaggacgcccgactcgatgaaagccgaaaggagctaagcccccatgcacacacaaaaacgcccctagaaacttcaacccttcgccattttaagtagaagattttaatgatttaaaacttaaaattaaacatttccccaaccctaacccggggggatgggggctaacttattactccatccccgcacacccacccaggaccaccagaaatccgatcctcagaatactggactgatggggaagcggtgggggctgagtcatctcacctcctccggggatctgttccttaactccaggttaatcttcttcttcatctccatgtcctcctcttgctcttcagctactactctccttttccctttcctgccttccccaatacccccaacccaaaatttttaagagatttagaaatgaatgaaaaggaacgcaaatataaacgcccactaccaccaccagataggtgtgggggagaaagaagagaatagcaaatggagtccaagagttgggactctaactcagctgcccccacctccttgtccacacactagcgcgcgcacacacacgcacgcacgcgcgcacacacatacacacacacatacacacacacacccgcagttccttccccttcaatggctgctcagagactgagcctccatgacacggcaccgccaaccccctggcctacactccacccacctcccaaacgtgttggttgattcttcagcgtcacattacttcattgggctaggtaaaggtctatcagtcttcagggaggccctggaccagaaattccgtacctattggctacgatcaagcgcgcagttaattttgataggtccaggagggtgtacgtcccggagaaatgattttgaatcccagtaccccccctacttttctttatgtagttggcgcgctttccctaggcactcggacagtttcgttgtctgttggatttggtttttagtttttggttttttattctgttgttagtgttaaagagggagaaagcatccttccgtgcccaacttgcgatactgagaattcaccacacggcacgcactggctcttggccgttttaaaagcatagcctctgctttgcaaccaaggtgtacagcaacgtgcgcatcacattaaaaagatgccttcgtggcattgtcctgctggggtcaggctcttcacagagactgaccttccgtgatgcagagctagagccgagattttaaagatggtaggttaacaccataaaagacaacaattttgaaagcagttgggtgaaagcagtatgtaagttagtaatatttaaataaaactatcctggaggaattgttactgagttaattgttgctgtaataaacactaagaccttggaggaaaaacgacgctgtcctaatgaaaatcagacattaattagcatagaaatggcaccgcgatgccgctctaatttccctttggttggtttccatggaaatctgtaggtaaagtgtgcttttaaaagtgtttatcgcttctctgccttttggctaagatcaagtgtaggatctgttcttaacagtttaatatctgatatattttctatccgagtccaatatattaaatggatttggggagcaggaagacggaataggagcttgcttgttcacttcacgcatcgatctggtattgcagtacctccaggaacagtgcaccccctcaggggattaaaatttaatgttcaaaacagaagaaggaaaaaaaaacagtctgtctatgtgggatgggatacaaaagagtgggataagaattatcttttggccgggcgtggtggctcccacctgtaatcccagcactttggaaggccaaggcggttggatcacctgaggtcaggagttggagaccagcctgactaacatggtgaaacctcgtctctacaaaaaatacaaaatattagccgggtgtggtggcgtgcgcctgtaatcccagctactccagaggctgaaacaggagaattgcttgaacccgggaggcggaggttgcggtgaaccgaaatcgtgctattgcactccagcctagacagcaaaagcgaaaccctgtctcaaaaataaaaagaattatcttttaaaattttgtctcgacggtctaacttttttcttagctcttgcttaaattatatcattcttattcccttacaccattctcaggataaataaccaaataaattccaaatgatttggggaaggaagtggaaagtgggggaattagtcccatgcctcccagaactggttgctatttttcctgtttctcaggttagagatctttggctttccaacacagactcctcacaactccaccttccctactccaccccactcagagacacactgctcctcaaagaggattacatttaaaatgtaaatgctgacccggcgcggtggctaacgcctgtaatcccagcactttgggaggccaaggcgggtggtcacctgaggtcaggagttcgagaccatcctggccaacatcgtgacaccccatctctactaaacatacaaaaattagtgggacgcggtggcgcgcgcccgtaaccccggctagaatcgcttaaacccaggagcgggagattgcaatgagcctgagcgacagagtgagccgagatggcgccaccgcactccaacctgggcgacaaagtgagactctgtctcaaaataaataaataaa

SEQ ID NO: 114 - DNA, 4001 bp, Homo sapiens
tctctgctccggttggtcagcacgtccacaatggcactgcggtccacgcctgaaccgagatgagggctgtgctgtgagcagggtctttacatagtgggatgttcctactccttggaggagggaaggcgctccaggagagggctgggaaggaaaggagcaggggctatatcacccccacttccattttatctcaaaagaagttgcaaataaaatgtcaaaacagcatgcaaatctgacccagaccaaggcaaaggtggcctggtgtggtggttaaaaaaaaatacgacttggggggatcggctgacctagatgagaataccacctccgtcatgagctgagtgaccttgggcaagcctcttaatctccctgagccccagtttcctcatctggaaaatggaaataataagccttgcctcacaggggtgttgtgagaatgggtttgacacacctactgtggcgcctgacatacaagaatgaaggcattccacaaacatttctccaacatcactagttcctccttcctggctcctccttggtctacagattggctctaaaaggcagtctcaagtgccgggggaaaggggctcaccttggccagtaatggccctcagtagcctctgcgcatccttgtccacgctgaagttcaagaaggtcctgagggtgcccagggtcccccacgctgcagtctgtgggagcacagggtagttggcaagggccagggccaggctgcctacacctcctcagcataacctcagggcctgtcctccactttcctgcctcccatcctctcacagcccgagctgagatactaaaagtgatctctaaaatcccaacagcccctaccttgctggccaggcccaggtggctgaggatctcctgggtgagggacggtgccatcttcccgccagtcacagacatggtgctactggttgccctggggaaggaaacaggagcccacagagctgaatttcctggcccttcagggactccttatgacccccccgagaccctggaccctgggttccagtcacctgttcctttccttgctgcagaaaaaaagatcaacctgcttaggcttggagccagaaatggagctgaaatggtgaggtaagaggggagcccccaccttccccacctctccccactcctttaggaagtggggattgatgcggaatgctcctggaccaggcgccaaccctccctgatgccagggtcagcaccaaagctcctcaggccttggtccgcggtagatgcctcccttctgaggtctatggccctccttcctgggcctggctggggtctcctgggcagtgcaggggagctgaggtgaggtggcaggattaaccacgcagagtggaagacaactcgaaatagcatcttcccccaccggcagccccagctgacaagcaaccctcaattcctgcctgtacagctgcctacctgctcagcagcacaggagcacaggccggaatctctaggtcagcaggtgcaatctcttagctgatgtgagcaagagttcttgcaagtacgtggatgcctggacagaaaggaggcactctcatgttggaaaaggaaaactcatttttccctcccccaagcaatcaacaagccctcctggcatggggccgtgggcccagtacttactcagaggtgccagaggtgaggtgggtgtcgttgttgtggcctggtagcttgcctgtgtgagcactgcctccggtgtggcctggtagaggaaagtgggggtgtgtgcagcctaggctgaacagccagtcagatgacctctcttagggacgaacccagcagttgtctgactctggcccctcccagacgtgggagaggaccgggctgtacagagtcccacatgcagacaccttcctgcccagcatctcttctcccaggaactgggcctcaatccatgtgagtgaactccactcagcctctcagcggctcagcctcaaacacaggaggcttttatgcactgccttccctgtgggtccaggtgggaccacagagacctagtctcaaagtccagcttctgacctggctctgccccagcttctgacctggctctgcctctggctccagctccctggggggcaggtcagacaggctgcaggctgatttcaaggctgatagggaaaaacctgttggggcacataccagcagggcaccccagcctgcaccccagagggggtcccagcccagaaactcccttgactgctgccttactagagccagctgacctaggtggagagtgcccagggattgtgtatatctgtggagaaggaagggcacaagtatttgggagtggaagttgatgaacagagtcaagagagaaaaatgcaaagggtgttaccttcagagggaagctctatgctcccaaaaggcaacagggagatgggggaggctcccttgcctggtttcttagattgcttctgttgccttttggcagcctgggccctgtggctgttttagctgcaggtgatgcaaccccagcagctggacttgaggctgtctctgcacagagcagcaggtgaacagccctgtggagcccccgccccgccatgcagcaactgctccagcctcacagctggctccctcaggtctaaacacagcctctttcctgcctccctggagagcctgggtaggggcggggcacagaagctacagccctgcctccactcactcctctgcctctctcccaactcaggaaggccttcactggcattcctacatccctggaggagggacctgcagtggctccaccacactgagtagaccatgccggaggacacgccatgaaaggatatttctgtggcggtaatcactgctcctcacttttctctcctgttaaaaggaaaacatgcacctgtgtcagaactggagaatgagggttcaatatccagctctgccacctatgttctgtaagcttcgctagtcctttcagctctctaaatgggaggattgagagagacggaggctgtgggacatgctggggcctccgaggacaggtttcctgggatgattaaatgaagtaatgtgtccactaaagaacttatccatgtaaccaaacaccaccttgtccccaaaaactattgaactcataaaaataaataaataaataaataaataaataaggtaatgtggccaggcacggtggctcatgcctgtaatcccagcactttgtgaggccgaggcgggtggatcatgaggcaggagatcgagaccagccttggcttacacagtgaaaccccgtctctactaaaaatacaaaaaattagccgggcatggcggcgcatgcctgtaatcccagctactcgggaggctgaggcaggagaatcacttgaacctgggaggcagaggttgcagtgagctgagatggcgccactgcactccacagcctgggcgacagagtgagactccgtctcaaaaaaaaaaaaaaaaaaaaaaagtaatctgtgtaattgcatgtggcagagaaaagtgccctgtaaagtaggggtattagattaaataaataaatatacaggacatgcagcttaatcagaatttcacgtaaatgaggaatcatttgttggtacaagtatgacccaaatatttcattaaatatactaacatttttttttttgaggcggagtctctctctgttgcccaggctggagtgcagtggcattatgttggctcactgcaagctccacctcccgggttcaagcgattctcctgcctccgcctcccgagtagctgggattataggcgcctgccatcatgcctggctaattttttgtattcttagtagagatagggtttcaccatgttggccaggctggtctcgaactcctgacctcgtgatccacctgccttggactcccaaagtgctgggattacaggcgtgagccaccgcctgtaattattattttttgtttatctgaaattatagtttaacagtgtgtcctgtatttcacctgacaaccccaaaatggaactcagtctcagcgtggtgg

SEQ ID NO: 115 - DNA, 4001 bp, Homo sapiens
cagtggcacaatctcggctcattataagctccgcttcccaggttcaagcgattctcctgcctcagcctcccgagtagctgggactacaggtgcgtgccaccacgcccagctaatttttgtatttttagtagagacggggtttctccatgttggccaggctggtctcgaactcctgactgcaggtgatccacccgccttggcctcccaaagtgctgggattaccagcgtgagccaccgcacccagcctcaacaaacacttattgaatccctagtactttggtgaaattcaacttttacatccagggacatgctcttgggacataatcttgaagaaggtgtggtctcaaacctctaggaacttcaaatctattaatgagccagatgagaataccgttaattacagtatgatagataagtacttaaacagaagtattgtacaaggtgtagaggggattcagaggtctgacactggcaggaagtcagaaaatgtttcttcacagaggaagtaatactttagctgaatgagcaggagctcactaggcagatgtaatagcaaggtaaagatacatgctatgaggtaagtagacatgagcaggagcagcacacatttttttaagagtctgtaggtagttgaattaacagcttgttccttgggtgctgtgataagtttggactttattgtttctcagactggtctcctactggaaccaactgaaatgtttattaaaaatacagattcctgggttccctcccaccctactgaaatcagaatcagtccctggactggatgacaaaaagcaccccaagggatttttatgcatagtaaagtttgtgaaccatagctgtaggcaagagttatgtgttcaggtatgtataatggaaaaattctgtctcaaatgaggcaaagtggcctactagtaagctgctgcaattgctttattgatgaaggcctggaccagaacaacaatgctaataaacaagagaggatggatatttagaattatgaattcaaaccatctgacataagaagtgagagatcaggtgtcctcaaggttggctcccacgcatagtcggctgctggtggcattcatcaacacaaatgtaagctgaacaggtttgaggaagacggaagaatgtccgggctatttcggacatacttttgataaaccacgcacgtggaaatgccaagcaggcagtgggatacgtgggtctgaagctaaaaaaggaagtctgtactagctatattatagatccaagagtcaccagtaattgctcaagcccgtgatatggaggaaactacccagctgagtaaaagatgctgcagaggggagactgacatggtactccaaagcagcaggacgaagaccgaaccatataactgccacgtgtgaaagctaattcaccctttcagagagactggggctagtgagccctgatggggattgcaaagggagcagttagcacgcgaagggaggtaggtgatacctaatcactcgctggatgacattccggtagcgcagcctatcagcttgaatgtgaggattgcacagagccttcttcagctccttcaccacgtcctcggagccaaggtacggcatcttcctaagagtcacagggcagctcccacagctcccacggtaactcgagggctccttctcgtcctgatgtgggagcctgagtaaaggaaatatgagtcagtgaaaatacaaaaggcgagatctcgcctcaggctcggcttccgtagggccggcacgctggccctgacacacttccacgccctccgcgacaccgcgagccccaccctaggctcttcaggccctaccgtcggccggcaggccgttcgccccgcccacagatcgctcccgctacttctaggtcctccgccggatttccagcgccgcgtccgactgaccgcagacccctccctctccagttccagccttaattccccctccacgccgttctcatcgcggataggcccaatcttgctttctgcggaagtcccgcccccttgtcaagagaccaaacagaagaccgctgccggtctccccgcgagcgagcgctaagcgtagtcccgactccgaccttaggatgcccttcccccaacctctcactctccaggcgcagctgcgcggctccctctggtggagctgcggcgggcaatcggaaatcggctactttggcctgtctcctccctgcagcgcgcgctttgagtgcccggctcggcctccgctcccgcgcggttgggagtgtccagcgccctccgcgatttgggctccagcgggcagggtgacttcctttttctgcccactctggtaacttattgctctgctgggctctttcccttagggtctctggccctgttcttgccccagcatgacttttatcgggacgccgttgtggaagcctcacgcaggagccctgcccccgtggagaagatcccactggtgactccaaccctaccaccatgaatggggtcctgatcccccatacgcccatcgcagtggacttctggagcctgcgccgggctggcaccgcacgtctcttcttcttgtctcacatgcactcggaccacaccgtgggcctgtctagcacctgggcccggcccctctactgctccccaattacagcccacctcttgcatcgtcacctacaggtatggggctggagtcggtctccgagagctggtccaggcatctgggttgggacttcaacctgtcattcttggagtcatagaatgggggccacgaaaactgatttggaagttgtttgaacccaaaaatgcatctttaacccagaataggaacgtgttttcgaagtgaccaacttgagatagttagccataagttgaggagatattttaatccagccaaggaaactattcctacctttataagtaagctaggccgatgtttcccaaacttgccttttttttttttttttttttttttttttgagacggagtctcgctctgttgcccaggctggagtgcagtggcgcaatctcggctcactgcagcctccgcctcccgggttcaagcgattctcctgtctcggcctcctgagtagctgagattacaggcgcacgccaccacgcccagctaattttttgtattttttgtggagacggggtttcaccatgttggccaggctgttctctaactcctgaccttaagtgatccgcccgcctcagcctccccaagtgctgggattacaagcgtgagccaccacgccccgcctaaacttgcctcatcttaagaatccacctaatgtgctgggtggttctccagctctctccccaccccacccttaagtctccaagagattaagatcaggagtaagtttgggaattgctgactagactgtttgctgaactctttttttttttttgagatggagtctcgctctgtcgcccaggctggagtgcagtggcgcaaactcggctcactgcaagctccgcctcccgggttcacgccattctcctgcctcagcctcccgagtagctgggactacaggcgcccgccaccacgcctggctaattttttttgtattttttagtagagacggggtttcaccgtgttagccaggatggtctcgatctcctgacctcgtgatccacccgcctcagcctcccaaagtgctgggattacaggcgtgagccaccacgcccggccagctgaactcttaaattgtacaaagggtgggatgggaagtggaaggaggaagggcagattgcttgggaatccccattacagcttctgctcccggtggctcaggatttggtcagctttcctgattcatgtaagggatagtccctgacccggggaggtaacggagaggagtcagtggtcactgggatgactaactgttttctcaggtatctaagcaatggatccaagccctggaggttggtgagagccatgtattacccctagatgaaattggacaagagaccatgaccgtaaccctcctcgatgccaatcactgtcctggttctgtcat

SEQ ID NO: 116 - DNA, 4001 bp, Homo sapiens
cccaacttacaatggagggagttttacttacatatctcctgattacccaactagattgtgatctcttagagggtagcagccaggattaccttgtctattatatcacacagtacttcataccataggcctacaataaacattattcttctattcattcaacaaacacttattattatttttgagacagagtcttgctctgttacccaggctagagtgcagtggcacaatctcggctcattataagctccgcttcccaggttcaagcgattctcctgcctcagcctcccgagtagctgggactacaggtgcgtgccaccacgcccagctaatttttgtatttttagtagagacggggtttctccatgttggccaggctggtctcgaactcctgactgcaggtgatccacccgccttggcctcccaaagtgctgggattaccagcgtgagccaccgcacccagcctcaacaaacacttattgaatccctagtactttggtgaaattcaacttttacatccagggacatgctcttgggacataatcttgaagaaggtgtggtctcaaacctctaggaacttcaaatctattaatgagccagatgagaataccgttaattacagtatgatagataagtacttaaacagaagtattgtacaaggtgtagaggggattcagaggtctgacactggcaggaagtcagaaaatgtttcttcacagaggaagtaatactttagctgaatgagcaggagctcactaggcagatgtaatagcaaggtaaagatacatgctatgaggtaagtagacatgagcaggagcagcacacatttttttaagagtctgtaggtagttgaattaacagcttgttccttgggtgctgtgataagtttggactttattgtttctcagactggtctcctactggaaccaactgaaatgtttattaaaaatacagattcctgggttccctcccaccctactgaaatcagaatcagtccctggactggatgacaaaaagcaccccaagggatttttatgcatagtaaagtttgtgaaccatagctgtaggcaagagttatgtgttcaggtatgtataatggaaaaattctgtctcaaatgaggcaaagtggcctactagtaagctgctgcaattgctttattgatgaaggcctggaccagaacaacaatgctaataaacaagagaggatggatatttagaattatgaattcaaaccatctgacataagaagtgagagatcaggtgtcctcaaggttggctcccacgcatagtcggctgctggtggcattcatcaacacaaatgtaagctgaacaggtttgaggaagacggaagaatgtccgggctatttcggacatacttttgataaaccacgcacgtggaaatgccaagcaggcagtgggatacgtgggtctgaagctaaaaaaggaagtctgtactagctatattatagatccaagagtcaccagtaattgctcaagcccgtgatatggaggaaactacccagctgagtaaaagatgctgcagaggggagactgacatggtactccaaagcagcaggacgaagaccgaaccatataactgccacgtgtgaaagctaattcaccctttcagagagactggggctagtgagccctgatggggattgcaaagggagcagttagcacgcgaagggaggtaggtgatacctaatcactcgctggatgacattccggtagcgcagcctatcagcttgaatgtgaggattgcacagagccttcttcagctccttcaccacgtcctcggagccaaggtacggcatcttcctaagagtcacagggcagctcccacagctcccacggtaactcgagggctccttctcgtcctgatgtgggagcctgagtaaaggaaatatgagtcagtgaaaatacaaaaggcgagatctcgcctcaggctcggcttccgtagggccggcacgctggccctgacacacttccacgccctccgcgacaccgcgagccccaccctaggctcttcaggccctaccgtcggccggcaggccgttcgccccgcccacagatcgctcccgctacttctaggtcctccgccggatttccagcgccgcgtccgactgaccgcagacccctccctctccagttccagccttaattccccctccacgccgttctcatcgcggataggcccaatcttgctttctgcggaagtcccgcccccttgtcaagagaccaaacagaagaccgctgccggtctccccgcgagcgagcgctaagcgtagtcccgactccgaccttaggatgcccttcccccaacctctcactctccaggcgcagctgcgcggctccctctggtggagctgcggcgggcaatcggaaatcggctactttggcctgtctcctccctgcagcgcgcgctttgagtgcccggctcggcctccgctcccgcgcggttgggagtgtccagcgccctccgcgatttgggctccagcgggcagggtgacttcctttttctgcccactctggtaacttattgctctgctgggctctttcccttagggtctctggccctgttcttgccccagcatgacttttatcgggacgccgttgtggaagcctcacgcaggagccctgcccccgtggagaagatcccactggtgactccaaccctaccaccatgaatggggtcctgatcccccatacgcccatcgcagtggacttctggagcctgcgccgggctggcaccgcacgtctcttcttcttgtctcacatgcactcggaccacaccgtgggcctgtctagcacctgggcccggcccctctactgctccccaattacagcccacctcttgcatcgtcacctacaggtatggggctggagtcggtctccgagagctggtccaggcatctgggttgggacttcaacctgtcattcttggagtcatagaatgggggccacgaaaactgatttggaagttgtttgaacccaaaaatgcatctttaacccagaataggaacgtgttttcgaagtgaccaacttgagatagttagccataagttgaggagatattttaatccagccaaggaaactattcctacctttataagtaagctaggccgatgtttcccaaacttgccttttttttttttttttttttttttttttgagacggagtctcgctctgttgcccaggctggagtgcagtggcgcaatctcggctcactgcagcctccgcctcccgggttcaagcgattctcctgtctcggcctcctgagtagctgagattacaggcgcacgccaccacgcccagctaattttttgtattttttgtggagacggggtttcaccatgttggccaggctgttctctaactcctgaccttaagtgatccgcccgcctcagcctccccaagtgctgggattacaagcgtgagccaccacgccccgcctaaacttgcctcatcttaagaatccacctaatgtgctgggtggttctccagctctctccccaccccacccttaagtctccaagagattaagatcaggagtaagtttgggaattgctgactagactgtttgctgaactctttttttttttttgagatggagtctcgctctgtcgcccaggctggagtgcagtggcgcaaactcggctcactgcaagctccgcctcccgggttcacgccattctcctgcctcagcctcccgagtagctgggactacaggcgcccgccaccacgcctggctaattttttttgtattttttagtagagacggggtttcaccgtgttagccaggatggtctcgatctcctgacctcgtgatccacccgcctcagcctcccaaagtgctgggattacaggcgtgagccaccacgcccggccagctgaactcttaaattgtacaaagggtgggatgggaagtggaaggaggaagggcagattgcttgggaatccccattacagcttctgctcccggtggctcaggatttggtca

SEQ ID NO: 117 - DNA, 4001 bp, Homo sapiens
attatcagtgagaaaagcctgtcttatttcccatatatgtagctcaaactccctctgggatccttgcttctctgggaatgcaacttatatctgttgacgatgtgccaggcactgtgttccatgcttttcataaccataaaaataactactagtaatagcatctgacaattatttttcagtgtgatagttaggatgtggcttgctctgctaagagttgtatctgaaatgtacatggaaagtccatttcagagagtattctgtgtatactctctgtgtacatttcagagagagtaactgggaccaggttatagagggcaatgtcatatttagaggtttaaatcatgtcctgtaagaagtgtgaatccatggaagaattttagacagcatattcatgtgagcaatattcagagtataatattttttgatgacatcaagagaacattatgaaaatcaagcattgtacagtcctactgaggtttttgagacataaagttatgtttgtcttcatacaaaatgatcccagtctcatacttttttggttttcattctgacttcttctagttttattcttcctgtcttattacttgctgtcaggttctcaactattgcttacttatatcattatagttgtctacctgatgcaacctcagacccctttttgatcgatttgtagctggaaaaacaaataggagaattgtgattacaattccacacatattttgaatcgtcattaaaatgattgttagtagcttttaagtattgccactgttgtgctcattgagtgctctggctttgtgatatatctttctagttacttacaggttttcctccccgtacttggcaattggagttttcaggataatgaaacaccaattaccaatgaaacaccaattagtagatagataagtagtagacataagataaagatatgggactatgacaagcactaaacaaatgcaggtagcataatacaatatatatttttttaattaggcagacatacagataggaaattcaaagaagaaagagctgcagatgtaagatctagtatccagttgctttgaccagatctcttagacagtcatttcattttcaagtgctctcgttgagtcaagacctcagacccacaccaagggtttgatgatgacatatcctctgatttcatagttcagagcctgccagtccaggatattggcagggagaggggtaccctgataggcagacaggatattttctgggggcagcacagagtcccacatgtacaaatccccaatctctcccacaaaggactggctcctatcaaacttgcccccataggaatcctgttcctgccccaggacaatcttgggctgagcttctacaaagtaaccctgtcgcagaccctttttcaccaaaggtgtcccattgatccaaaattcagcaatacctgatgaggactcccagctcacacagatgtgcactggagccgggaacttttcgataactttggatgtaactttgtgtcttccaatgtatagactatactctccaactctttctttataaactagtagctcattatccctgccttgggtattgtaggagaagaggctgtaggcacgagagagatcactataggctcgaaaacacaaggtaaagttctgtagaggcttctccagcggtgtgatcaagtttacatgatcagtaacagattctctaggaaatacaaacaccttcccactgaggtctgcgggataaagaaagaaagataatgaccttcagtataaatgcagggaaaagatatctcagcttcaacctattttctcactttatgattcttgaccattccttcacctccttacctgtgtgagcaaaggcttccaggaggctggtgaggacagagatccaaagcagcggcttgttcatattcctggcctagggctgttatagcagaagcagtgaccaggatgagggtagcagacaacacagtggctgtccccctagcgtctgatattcatgcccttagacttcaggttattcagggtttatatgcaccttgggtgaggatgggggaggaagagcaccaataatatgtgagtgattttccaggtctgcctcctggcgcttacggtgaaggagtggtgagccctgagctggaaaatcaatgggagttatttattagagacaagtgatggctagagctccaactcctgtgacccagattttattgctgggaagagagtcattgcagggcagcagggttatggatgggatgaggcgctgggctggccatgtcagcagagcctctctctgctctctgggccccctctctgatggctctgtgctctgccagaagctcctgagccacacagagtgtatcgctgagctcagccctcttgtgggctatgggaacaaggccttttctttcttttatagttctcaagttgtcttgtatttgtaggatattctaggattctgctttctgctgaagaccctaaaaagtgccttcaactttgactaattcaacatcaagtaatacatccaggcaaagctaaggggaaagagggacttggagaataaactttctgtccccatgaagcttagtatttttctgctacttctactcagtgcttttttttcgtttgcatatcatggtgcttccttatcctagatctttccatttctcattacgacttgttttctggttacttcatgctacctgcagagatgtcagcatctccccaagtttttctctcctcttctttgagtccttggtcattgagtgtatatctaatccatctttggtgatgaccccactaatacatttattcactagctctcagttactacactaggtgctggggattcagtggtcactggctctctcacagccccagagatctccaccttcattctttctatgtctccttcattctctctctgtacagtttattaaccaccactcaaaccttctctgcctctgagatatcaaactgaagttcttctttctagccacattatttctttctctctcatccctgaattatatggtgtcttgtttctcatcctactgtttagcctcttgttcactctctcttctgttagctcaccacagacctaatcagccttttcaatgacacaatcactgccaccaagaatacactttctctatcattgttcaaagtatccttcctattctcatccctggggagtttccattctctactttttttctctaaatggaatcccaggttgtgaagccttatctggcttgttgcacagtataggttagtgataaagttgggattatgcatctattgactcctgaattaaatacagaccatttgcttggaagccaatgccatttgcaatctggctctaacctggctattatctcagaatctaatcctattctccagtcaaacacctctaattgttgttctttataccttcctggctttcttgatttcattacttctattcagtgccttcatactgtcttgaatttctctcttattttcttttcctgtttctaggaattccagccattcttccacattaatctcaagcttatttaggtgatggttatagtaaaagcccagacttcactattatgttattgctgtctatgtaataaaactaaacttgtatgccttgaatttatacaaaaatataaaaaataaaaaacaatctgcttcatgaagacttttctaatatcccaactatacattatttcccctctttcgtacttcccataaggttaagatcaaagactttgggatagaattccaatgttgccatttactagtggctgactattctgcaagtcactaaacccctctgaaccttagtttccttctctgtgaaacaaagataaaactatctacctcacagtgtttctctaaggataaatgagatactatgatatacataaagtacatggaacagtatctggatggttattattaccatcattttagagcctttatggctgttaccactatctgtctcatattatagat

SEQ ID NO: 118 - DNA, 4001 bp, Homo sapiens
gagggagatggggaggagatacatccctgatcttctcccaggctcctgagatgttgagccaaagaagtctctcagggaaggccaataaatcagatcagggacaaggatggatggggggtaaaggctagatagaaggtggatcttacctgaagtcaggaagtaatagggtgagtctccatggatcccaaccacacctggcccaagtgcatcagccaaaatattgataacagagaagacaccactgatgataccgaaggagagaccagaaactgggggaagggaggatctcatcaatgtcagagatcacactattgcctgttcaccactgacccctccccattcccggttacaattctttcacatctactctccctccagaccaactttctttggaagtgacggatgaaggaaagtaagaagccacttagaacatgtggatatttagagacttccctagaggagggggctgtccaactccctcctccagtccctctcccttggctcaccataggccatctggcggatggagatgggtgatcttccgtcctcactcagcgatgctaacccctcatctgccttcctggggtggggtggggtaggggaaacatgagggagggcagggatgctcctttccctctaatgtcctcccttagtgcctcctcttccaaaccagcacccaggggctgccccacttcccatagtgcagtcctttgcccctctcccctccagaccactccatcttcttacttaagcagcttgtagtaggcaaagcggaacacctcctgtagaaggacagagacagcagcaccaaaaatcaggaggccgtactggagccgggcatctgaccggtcggtcacatggaccaagatgaaccagaccacagaggccaggagcagggagaccagccagaaaaatgccctgagaaaagacaggggcagtgagacaagcaatagtagtgggagccagagaaatcaaggagggaaaccagccaaagctgcttgaaaagtggaagttagccttccggatggttagggagacatggaccaggtagggtaactgtctccaccaagagactcatctgtagaaaagtgaacgcactggaaaggggagaaatctaattaaagagtcttcagagcgatgacagccagagtgtgcgagcacggaagggcgaggtatccgttcctggatcctcccctaaggcacctgactcggcctgcctaggtcagcacagccccctcacgagtctcggccttgggccttctctgacgtcgctgggaggaatataggaggaatctgtgagatccttggaaggtggaaaccaactgcgggaaaggacaaatctcccagacccaacccctcacctccgcccaaacttcacctccgacttatcgtccccaattcaggctcccaggcttgccccagttcctccagccccttccgcacctctctcttcgacgctctcccgcgtctcccgggccctctactcaccctgcgaccaggatgataacgcgaagcgggtccccagccacagtgatcaagaaaagcgcgaaggccgggccgaacgcgacgaaagtgcagccgaaaaacaccgcagcccccatggctggtcaggtgggaaggggggtgggggcctgaccaggacaggcaaatgggaggggcgcgccagctggggagtccgcgtggggtggcaacgcgaccccacgaggggcgcggtgcaatgtcacccccagaccccggggaaggggaagggggggaaccgaaaccccaaatgaaggtccgcgccacttcctctacggaagccgaagaggggacaaatcccggccgcagccccacggccacctcccatctaatccccacccccggaaggccaatggagaatcagcgcgggcggagctgctcgacctgctgggagttgtagtcgccttccgaggccttgacttcgtcctgggagtggctcgagccggttaatgggggtgggccgggaatggaccagtcgagacaccaattccagggttcggttgcgcttccgtcgctgtttcctttcgtcactttgtggggaaaagtggtagcaatcatacctcttcttgaagggctgcagagggggtagatcctgtttgaatctaagggacaaatacaaagagagcacaggatggggcgcagggagatagggacgggtattgttcttacttgaatgagaggaaatgggctagagctgctgcctaagagatgaagattacattaaaaagtaggagctcttcggacagactagtataataaacatggaatacagtatatcgctaatgaagccttcatctgtaatgacaagagaatcggagagaagcaaaaggagcctggagagaaatgttaggaaggcattttgaaagagtccgggagtttaaaagcaattagagcgatggggttgaaggaaaacgacacccccaccccacccccgccataaattccttttatgtcatacttcctctatttattttctgaaaaatgaacctcagtggtgcgttttcctgaggctgagaggggttgtatattagagtgaatgaaagttaaagtaggctgagcgcggtggctcacccctgtaatcccagcactttgggaggccaggagtttgagaccagcctggccaacatggcgaaaccccatctctactaaaaatacaaaaattagccagatgtggtggcgcacgcctgtaatcccagctacctgggaggctgaggggcaaatatagcttgaacccaagaggcagaggtggcagtgagctgagattgcgctactgcactacagcctgggcaacggagtgaggttctgtctcaaaaaagaaaaagaaagttaagtaggagaggagggtattgtaatctcatttggatggggagaggttagtccttagggaagatgttaggcaaaggaatctgaggatggaaaagaggaaagaaatctggaatattgtttttgaaagcataatcaaagtaccaaaaaaaaccccacagaaattgtttaaagataaccaaacttcctttccttcctggaagtgatttattatttaatccatatgtgcacactcacatacatgttttacatgtcttccaggatattctggaaaggagctgaggaatagattgtatagatttacacggaggctggtcacagtggctcatgcctgtaatcccagcactttcggaggccaaggcggctggatcacttgaggtcaggagtttgagactagcctggccagtgtggtaaaaccccatctctactaaaaatacaaaaaattagccaggcatggtggtgcgcacctgtagtcccagctactcaggaggctgagccacgagaatagcttgaatctgagaggtggaggttacagtgagctgagatcccaccactgcactccaacctgggcgacagagcaagactctgtctctgaaaaaaaagaaagaaaatatttacatggaaagtcaccaggcaaattattccctaatgagactaagagggtagctgggcgcagtggctcacgcctgtaatcccagcactttgggaggtcgaggcaggcagatcacgaggtcaggagatcgagaccatcctggctaacacgatgaaaccccgtttctactaaaaatacaaaaaattagccaggcgtggtggcgggcgcctgtagtcccagctactcaggaggctgaggcaggagaatggcgtgaacccaggaggcggagcttgcagtgagccgagatcgtgccactgcactccagcctgggcaacagagtgagactccgtctcaaaaaaaaaaaaaaaaaaattaagagggtagcgttatcatgacctgtgttcaagactccagtatgtcctgcttctgagcccagcaggcagagtaaggtggataggaatgagacaattctcatgtcttttttttttgagatggagtctcactctgttgcctagactggagtacagtggtgctatctcggctcactgcaacctctgcctcccaggtt

SEQ ID NO: 119 - DNA, 4001 bp, Homo sapiens
aaaaaacaaaaaccaaccaaaaaaaaacagggtaggcaggaccaaagatgactaaatgcaatgcaccatccttaactgaatcctggatgaaggaaaaaagacagttaaaagaaacatctttaggacaagtgggggcacttgacaatgcacattcaatagagttttatcaaaattaattgtcccacttcctgagtgggacaatttattgaaatgatgtagtaggagaatgccttttttttttttttttctgagatggagtctcgctctgtcacccaggctggagtgcaatggtgcgatctcggctcactgcaacctccgcctcccgggttcaagcgattcccctgcctcaacgtcccgagtagctgggattacaggcacctgccaccacactcggctaatttttgtacttttagttgagagggggtttccatgttggccagtctggtctcgaactcctgacctcaagtgatctgcccacctcggcctcccaaagtgctggaattacaggcgtgagccaccgcgcccagccaatgccttgtttttgggagatgtgtactaaagaattaaaatgtaaaggcgaagtgtcaaaatatctgcaattaattctccaatcgcggggctgggagggaagcatgggagcaaacagagcaaaatgctaactagtggtgaatcaaggtgacgggcatctgggcattctgtaccgtgttcttgcaacttttctgaaggtttgaacttctcaaaagacaaggggcagggtagacagctgctgcagtgtaactttgtagagaggaaactcccgcgtctggagctcattcccgcgtttcttcagtccgtcctctttaaggtcgccactccgggtcttgcttttaagcctcttcacggcaacgttctcagcctctgacgccccatatgcccggcgctgatgaaaggaacgaatgggatgcccgcagctaccctgacaagtgattattcttatgacgattttgcagagaagaaaattgcgtctgggccgagtcgatacgatcacaagttggcggggcagagattcgaacccacatctaaggacgagctctgggcctgactggtccgcaccgcgtccctgcatcagtaacgaggggtcgacgcctccagggccagcgttccagagctccggcccgaaccgcccaccgcgtacgggcgtcacctggaatgtctaatgccgacgttgtaccctcacgaaaaccccatctgagaaggggaaaccgaggattcatcgcaaggccagaaggtggcctctcgccgccggaccccggcgcccgcacgctcccctagaaccgcttcctccccagccagcgcaggccagggtccagccgcgttgccgcggaaaccgcctcccagcaccacccgcggcagttaagccaacgcatgcgcagccgcggggggcgcccgggggcggggtgccgatgagaagccgccgggggctgccgggtacttttctgtccagaaactcgacgccgtcctgccccagcccagcccgacccccgttttcctgtacctgttggtaagagaatcgctgctgctcctcggtctccgcctcctcctccatcactgcgggccgaccctgggcaaacgcaggagggccgagaaggggcggtggtgcgcggccaggtcggattttcccgccgcggcgcgagcgacgggccgcgcgggcggacaaagtacgcagctccgccctgcctcgcgcgccccctggcggcgctccgttgaggggattccgccgtcggcctccagccagccccctgctcagcttgctctgcggaggtggccgggcgacgcggggacatgaccaccgaggtcactgctgcaccccagagcctgattcagcgcctggcacaacgctgagcaccactctccgcgaaacacgtgtgcgcataggtgcaaagcgtgttccagtcgggtgtagaggatgcgtagcccacgatttacagatcatgtaacgcagtacacattatcaggagctccatgcacctgtacctcaggtgtatcttgcaaaatcgaccatcaactttatcattctatcaccaacaatagcgtcacaaagactacaatgagtgaacgacccgtgacctcattcagcgagtggaacaggaactgcgttgttgccattggcaggagtatagttctgacacaagtgttactgtttttcctttatgttaacgatgaagtgagaccatcaaacccaattttggtttgtttttattgtagttttttgagaggcagggtctcactctgccgcccaggctggagtgcagtggcaccaccaagactcactgtaacctccacctcctgggctcaggtgatcctcccacttcagcctcccaagtagctgggaccacaagcctgcatcagcgcacctggctaatttttattttttgtagagaccaggtctcactatgttgcccaggctggtatcaaactcctggcttcaaacaatcatcccacctcagcctcccaaagtgctggaattacaggtgtgagccaccatgccctgcctgtatttctaggtttttgttttattattttttattgcctatatttctgtattctgcatttgtcacaagcaggtgctactttcagaacgaaggaaagcacataaagccactccttgtcttcctttcccagggacgtccctcaagttccctaagcttgccaggggctgaaacccagatcaaagctttttggaggaatcagccttctgaggactttcctctgcatctgctcagtgggtggcatctggaaatgacaggcacttctcgcctctgtccactgctctctgtgggcatcccagtctacctggacagtcctcctgcccaagcagggcaagcctctgacggattcccctaatgggcagcatggggctgggcagggcaggccatccagagtgagaccaagcctgcagcaggagagaaggccggtcgctggttggtgagcagccccatttagagcacactgtggctgcaaagcccagctccctcccttgagcctggtgaccccaagcaagtcacaggacgtggccaagcttcatgtcccttatttatcaactggggacagtagttccaacttcacagggcaggtgtcaggttttaaacaattgcctcacataagagctaaagaaattgtaacaattcgtcccaggaagttcctgtgctttgtacctgtgtgttccctcattttaaagcagttgcttcccaggattaaagaacagtattccagtgacatgtgtgcaatacagaggcacttaagagcctcagaggctaggagcagtggctcatacctgtaattcctgcactttgggaggccgaggcaggtagatcacttgaggtgaggagttcaagaccagcctggccaacatgatgaaaccctgtctctaccaaaaaatacaaaaattagccagacatggtggcacatgcttgtaatcctagcacttgggaggctaaggcaggaggattgcttgaacccgggaggtgaaggttgcagtgagctgagatcgcaccatagcactccagcctgggcaacagagcgagactctgtctcaaaaaaaaaggtctgagaaataggtcgagggttgaggtattcattacagaaaatggaactgggtgtggtggttcaagcctgtaatcccaacacttagggagaccaaggcaggaggatcacttgagcccagttcaaggctatggtgagccgtgattgccccactgttttccagccagggtgacagagggagacactgtctctaaaaaaaataatgaaaaaaggatatattaatatttggttgaaacttacttgatgaagaagtagccctataatctggccactagatgtcagtgttgcactacagcgtgaagcaaggccagggatgcccgctggcaatgttgccatgacactgagcactttgcacttgtcctcgctctaggcactcatttaatatctcatctgccctcaaaagtaggtgctgttagccc

SEQ ID NO: 120 - DNA, 4001 bp, Homo sapiens
caaggtcatcttttttaggtatgggtgggggtcagggtacaggacatgaattcttctgaatgctcttggctccaggaatttttctcagatcttcctcctcctcctcctcccctccccctggctgggctggggtatcactgcacttagaggctaaatcactaaactcctcaagggcaggaccctgtcaattttgttcactgctgcctaccaagtgcctagaacagttggttacatgaatggggggaaatcgtctacaagctaatcacagctgaggggcaaatttctcagcccatctttgcagcttcatcagtaagcatttgttggtctattgagagccaggctctgttctagggactaagaacaggccgggcacagtggttcacacctgtaatctcagcattttaggaggccaaggcgggcagatcacttgaggtcaggagttcaaaaccagcctggccaacatggtgaaactgtctctactaaacatacaaaattagctgggcgtggtggcaggggcctgtaatcccagctgctcaggaggctgaggcaggagaatctcctgaacctgggaggtggaggttgcagtgaggcgagatggagccactgcactccagcctggacaacaagagtgaaactacgtttcaaaaaaaacaaaaaccaaccaaaaaaaaacagggtaggcaggaccaaagatgactaaatgcaatgcaccatccttaactgaatcctggatgaaggaaaaaagacagttaaaagaaacatctttaggacaagtgggggcacttgacaatgcacattcaatagagttttatcaaaattaattgtcccacttcctgagtgggacaatttattgaaatgatgtagtaggagaatgccttttttttttttttttctgagatggagtctcgctctgtcacccaggctggagtgcaatggtgcgatctcggctcactgcaacctccgcctcccgggttcaagcgattcccctgcctcaacgtcccgagtagctgggattacaggcacctgccaccacactcggctaatttttgtacttttagttgagagggggtttccatgttggccagtctggtctcgaactcctgacctcaagtgatctgcccacctcggcctcccaaagtgctggaattacaggcgtgagccaccgcgcccagccaatgccttgtttttgggagatgtgtactaaagaattaaaatgtaaaggcgaagtgtcaaaatatctgcaattaattctccaatcgcggggctgggagggaagcatgggagcaaacagagcaaaatgctaactagtggtgaatcaaggtgacgggcatctgggcattctgtaccgtgttcttgcaacttttctgaaggtttgaacttctcaaaagacaaggggcagggtagacagctgctgcagtgtaactttgtagagaggaaactcccgcgtctggagctcattcccgcgtttcttcagtccgtcctctttaaggtcgccactccgggtcttgcttttaagcctcttcacggcaacgttctcagcctctgacgccccatatgcccggcgctgatgaaaggaacgaatgggatgcccgcagctaccctgacaagtgattattcttatgacgattttgcagagaagaaaattgcgtctgggccgagtcgatacgatcacaagttggcggggcagagattcgaacccacatctaaggacgagctctgggcctgactggtccgcaccgcgtccctgcatcagtaacgaggggtcgacgcctccagggccagcgttccagagctccggcccgaaccgcccaccgcgtacgggcgtcacctggaatgtctaatgccgacgttgtaccctcacgaaaaccccatctgagaaggggaaaccgaggattcatcgcaaggccagaaggtggcctctcgccgccggaccccggcgcccgcacgctcccctagaaccgcttcctccccagccagcgcaggccagggtccagccgcgttgccgcggaaaccgcctcccagcaccacccgcggcagttaagccaacgcatgcgcagccgcggggggcgcccgggggcggggtgccgatgagaagccgccgggggctgccgggtacttttctgtccagaaactcgacgccgtcctgccccagcccagcccgacccccgttttcctgtacctgttggtaagagaatcgctgctgctcctcggtctccgcctcctcctccatcactgcgggccgaccctgggcaaacgcaggagggccgagaaggggcggtggtgcgcggccaggtcggattttcccgccgcggcgcgagcgacgggccgcgcgggcggacaaagtacgcagctccgccctgcctcgcgcgccccctggcggcgctccgttgaggggattccgccgtcggcctccagccagccccctgctcagcttgctctgcggaggtggccgggcgacgcggggacatgaccaccgaggtcactgctgcaccccagagcctgattcagcgcctggcacaacgctgagcaccactctccgcgaaacacgtgtgcgcataggtgcaaagcgtgttccagtcgggtgtagaggatgcgtagcccacgatttacagatcatgtaacgcagtacacattatcaggagctccatgcacctgtacctcaggtgtatcttgcaaaatcgaccatcaactttatcattctatcaccaacaatagcgtcacaaagactacaatgagtgaacgacccgtgacctcattcagcgagtggaacaggaactgcgttgttgccattggcaggagtatagttctgacacaagtgttactgtttttcctttatgttaacgatgaagtgagaccatcaaacccaattttggtttgtttttattgtagttttttgagaggcagggtctcactctgccgcccaggctggagtgcagtggcaccaccaagactcactgtaacctccacctcctgggctcaggtgatcctcccacttcagcctcccaagtagctgggaccacaagcctgcatcagcgcacctggctaatttttattttttgtagagaccaggtctcactatgttgcccaggctggtatcaaactcctggcttcaaacaatcatcccacctcagcctcccaaagtgctggaattacaggtgtgagccaccatgccctgcctgtatttctaggtttttgttttattattttttattgcctatatttctgtattctgcatttgtcacaagcaggtgctactttcagaacgaaggaaagcacataaagccactccttgtcttcctttcccagggacgtccctcaagttccctaagcttgccaggggctgaaacccagatcaaagctttttggaggaatcagccttctgaggactttcctctgcatctgctcagtgggtggcatctggaaatgacaggcacttctcgcctctgtccactgctctctgtgggcatcccagtctacctggacagtcctcctgcccaagcagggcaagcctctgacggattcccctaatgggcagcatggggctgggcagggcaggccatccagagtgagaccaagcctgcagcaggagagaaggccggtcgctggttggtgagcagccccatttagagcacactgtggctgcaaagcccagctccctcccttgagcctggtgaccccaagcaagtcacaggacgtggccaagcttcatgtcccttatttatcaactggggacagtagttccaacttcacagggcaggtgtcaggttttaaacaattgcctcacataagagctaaagaaattgtaacaattcgtcccaggaagttcctgtgctttgtacctgtgtgttccctcattttaaagcagttgcttcccaggattaaagaacagtattccagtgacatgtgtgcaatacagaggcacttaagagcctcagaggctaggagcagtggctcatacctgtaattcctgcactttgggaggccgaggcaggtagatcact

SEQ ID NO: 121 - DNA, 4001 bp, Homo sapiens
cgtccaacgagctccacgtacccttgggccgtggtctcttcatggggccaacatgtaaaggggacttctgaacactgttccccagccctgatgggggtccagaaagctgtgttctgcccctctagactaaaattattttagacctggtgtgggcaagagtcaggagggtagggccccaatctcccccaccccaccttctggatcccagcacctgagggaatgtcgatgctggcaatgggcacagtgagtcccttcaggacactcaggatgctgtggaacggttcccgaacatcgcccttgaagctgaagccaaagatggcatccaccaccagctcatacagttcatcaatcgtcatgggctgtggtggagcaggaaaaggatgtcagagccagcagctgcacaaacagccttaactggagagggctgtcctctgcacctgcagaccattctcagaggcacaagtattgtgtctcattcagagggcagcctgaggcctagagaaagtgtgagttggtcactgattcaggccaaattgagaccagacagtttttgttctcggtgcctgcctgcctgcccaccactggggaggctacaggctgagatagcctgagacgagtcaggagagccagattctggtttcagctctgccatgatacaatttagtgactttaagcaaaccacttctctgcacctcagtatcttcatctgtaaaatgggttaaggaaaaaaattacccaatttcccatcccttaatccatgcatctgcaggaagggtttcagatagggcagccactccggcccctgaggggtagatcatgtgtttactgcatgctagggcaagaggatctgactacagagtggaaggagggaccagggagatgaaagggcaaggaagctttagagaaggtggtgtgtgggactcatggagcacactttatgaaggaggagaaggctcttgcacacttattcgaataccatccgttaggcaccttccgtaccaggcactaaaatgagctcagcctggaaacacgaaggaagagcagagcacaggcagtggttactgtaggatggaggtattcaactggagccacctacctctgcgggcatttccccaaggaaagggatgtccattttctgacactgggtcaccaatgcagtgaagaggggcttgttaggccttttggggtaatagatggttggctcgtagccctaggaagaaagtggtaattcaaccccagatcccagagccctcacgccctcctcccccacagcccctccccacatactcacaaagagtttgaggtgtcgagcacagaccagaccatctcctccattattccccgggccacagatgaccaggacagtaggggggctcctggacatggacgtggggggatatgcctgaaggcagagtcaagggtggttcggcggggtttcaggcggtaatagaccatattggcccagctgtctctcccacccctttgtgcctaggccagggggctgggacagtgactcctccctggctgctcccaaaggtcgagagttgtgccactgaccttggcgatggctgtagcacagctcagcccggccagttccataagttggtccacgctgaactggtattcgttaaatagctcctggtccacggcctgggcctcctcctggctgaggaaaacccgcggcctgagtcccgcccctcgtgttctctgtcgcgcaggtggcccggccgtcccaggccccgccccggggcagagcaggccacccgagacccgtgcctacctcaggtacttcaccaccgtgctcgccatgacctctgagtcccagcggccacccgagttcagccgctgcggtccccaccaggtgggtcccgagcgacaggcgatggtctggcttttgatccgcggcacgcgcgagcccgcaaccagcagcccgaggcccagcagcgcccgcagcctggacatccagctcgcagagcgcgcgcccccggcccggcccggccccggcgcatgtgcggcgctcgccccgcccccgaagaggccgggccagcacgcgcggattccggaagccgctcggggctggagtcttggggttctagcagcccttgggctggggagcagttcccacccggtccagcttcccttccacttgggattccagctctcctcaggagcgtttacagatcgccacacatttccagatacgccgaaatgccttgctcccaacggccctttgataataagtgctgattttgtaactctttcagaaaggtgtatggatggcatagcagttagccttgattcctgccccactgcttagtggctgagtgaatgtgggaactgctggtgtcagtttttcgcctatacaacagggaaacgagtacatacttccataggtgctaatgcctgcaaaccgtcgcagagggcgtggtatagaaattaagctactgttcttatttacaccaccaagcctatgtaacttaggccccctctacactacattagcttcccctacctctgttttaccagggtatcatgctgtacttcccgagtcatgcttaacccctttactgagataatagctatggaaatataaaattatccttaaatagtttgggtaagctatggtttaaaacgtaattgaaaccataggctccaggtcacgatgatgtttcactagaagtcttgagaggaggagtagagtttaggctagtggttttgagaatgcaaacacactctcttgcgtggttaggggaaaaggttggagagtaacaaaccagttaccatcaaggcactaagataaagataattatccagactgctatggattcaatgtttgtgttcccttcccttcctccctcacaaattcatatgttgaagccctaacccccagtgtaatggtattcggagacagggtggttgggattagcattagttgggatataagaggtagtccctgaactggtagaattagtgcccttataagactttcttcctctcactgcccctcctctctgtcaccatactggaaccctaatctgacttccagtccccataactgtcaggaaattaatttgttgcttgagcatccaatctatgatattttattatgatagcccaagctaagacacaggtaaagggaaggtttttttttgttttttagacagggtctcgctctgtcactcaggctgcagtgcagccgcctgatcatggctcactgcagcctggacctctgggatcaagtgatcctccagcctcagcctccccagtaactgggactacaggcacgtgccaccacacccgactaattttcatattttttgtagaagcgaggtcttggcagggcacagtggctcacgcctgtaatcccagcagtttgggaggccaaggtgagtggatcatttgaggtcaggagttcaagaccagcctggccaacatggtgaaacaccacctctactaaaaatacaaaaattagggctggatgcactggctcacacctgtaatcccaacactttgggaggccaaggcaggtggatcacctgatgtcaggagttcgagaccagcctggccaacatggtgaaacaccacctctactaaaaatacaaaaattagggctggatgcactggctcacacctgtaatcccaacactttgggaggccaaggcaggtggatcacctgatgtcaggagttcgagaccagcctggccaacatggtgaaaccccatctctactaaaaatacaaaaaaaattagcagggcgtgggtggcgagcgcctgtaaccccagctactcaggaggctgaggcaggagaatcgcttgaatctgggaagaggaggttgcagtgtgccaagatcatgccactgcactccagtctgggcgacagagccagactccatcccccccccccaaaaaaaaaagaaaagaaaaagaaaaacggtaagtataagaagagtgctctaacctccccttttcttcctgaaagcaggaaacaaaactcccatgtga

SEQ ID NO: 122 - DNA, 4001 bp, Homo sapiens
ggtaccctcattttctttttttctttactttcttttttttttttttttttttttttttttgagacggagtcttgctctgtcacctaggctggagtgcagtggcacgatgtcagctcactgcaacctccgcctccccggttcaaaagattctcatgcctcagtctcccgagtagctgggattacaggcacgtgccacaacacctggctaatttttgtatttttagtagagacggggttttaccatgttggctaggctggtctggaactcctgatctcaagtgatccacctaccttggcctcccaaagtgcagggattacaggtgtgagccactgcaccccaccagggtaccctcattttctatgacctccagaaatcgagggattcagtttgtgaatccttccttcctctcctagttccttgtgcaatgcaaagcctctttagtgttcacctgcagagtcgtgcccaggctgtaggagactctgggtttggagaatcatggcaccctcatcctgtcattttcatcagttgtgtcttcaatcctttcttcacccctccacactcaaacctctctccttctagaagcagatttttccttttccttcctcttctcctcccttactcccctacttttcccagtcccccaaacataccaggctcagagctggattcattcagcatttattgtagcaaagagtgggtagggacaggagctctaggactggccagtgggtgttctagaggccagctggggttggaagacaatggtctggacacttcactgggtggcaggctgtgttccaagttccacgaaatagctcaagaagttaaccagttccgttccagccttcttgatcaggggtgtcagctgctcctttgacttttcaaagtaagacctggataggtgaggggattagagtttaatctgagggaccctaggcactggcaggggccttggtggtggtgggaggtcagagcagactgactcaggtccccaaactctagtgcctggtccatcgcatggcaaagcccctaggtaggaatagagtcaagacctttgctaggtagagggacagactctagagactgaaattcaaggcccagttcttgctgttcctctctatctaagagacgtgtgggatctttgggtgatgaaatactttttctctgcaatttaagcctaatctgccctaatccccacccctgggttcagacttctgtgggacctctcatcttcccttctttctctccacagttccacagcccctgaaccccttgccctgagacttacttggcctcggcctgaagctctgggctcttgaccttctccatcaggtccttgccatagtcagtcacggtctggaagtactgagaaaccaggctctccacacatggctcctttgcctgtctccgaaccaaagctcctgcccacacacacacacacacacacacacacacacacacacactcttttcagctgggtccacagcagtgaatcctggcctcctgccatacctctgccagtacccaccccagctctctgccccctccccaaaaaggtatccagccagatctttggatgggctttctgggctttagagagggaatgatcttccttttgagccctttggttgccagacctggatataagagcacaggcagataggtagctataaccaccagcacattctcccttttggccccctctccatatcacacccaccttcaaggctgcagatggtgaggagtagcacagttgctgcgagcagcttcatgttggtaacagtggggagggcggcctaggaagagggtggtgggggtttgggggacactgaagccaaatgggcttcagctcctccccagggatctccctacctgctgcccattccaacctggctctctccctctccacaactgaagcccaggcctctttggatgctgctcacacatcttgcctccttatcttacctagccagcgtctctgtccttggtgtctgtgcctgccctggctggagaggaaggggctatatacctgtctgtttacccaccccctgtcaggtgacagggactatggatgggcccagtggggcagggattatgtgaggataaacaagttggagaaatgggggaggagaggacaagcacatggaagactcatggtgatggggtgagaggcagggggtacagctcttagtggaggctaagggggtacacttcaggtatatttgaggttcattcttttgagatctgaggtccttggacttgagtgcaacaggaagcaggattccaagttatttctctggaaagctctgacatatcaacccatggaataccatcaacccatcataccatggaaagctcatggtgtctttattccattatgggtagatctcatctctcaaccttatcccactttactgcaacttggcagagagatattggggagcagaagaaaggagaaaggaattgaaatcagggacagggttgagggctatgggggttaggggaatgagggtcgggtaagagggcaagtgtaaatgatcttgtccgtttttgagttaatgtgtaatgagacggggagaaaacaggagagcccagaatgacctggatgctgatcactgaacataccctacccccagtaaaacaaattcagaaaacagcttccgcccgtcccctcccaatggagggctctggcaggaaaagaggtgaataagaggcttctaccagggtaaaggttgaaggcacctggtcatttgatcaccttatcagttctaggcagtgattagccaatattgagtcagcaggggcaatagccctggcccttgtctcactcctgttgggggtgggggagggggagaggtacattcccaggttcaaagcatttgggtgaaatcagttaaatagatatcagaagcttttgtatctttcacccttttgccccccaagcatactcgctgagtatgtggaacattcctgagggtgacagtggaggcgcaaagctgatgagggaggtagtgaccagagaccaagaaatctttgttttttaacttttgttttaaattcagaagtatatgtgcaggtttttttgtttgttttcctgagacggagttttgctcttgttgctcaggctggagcgtaatggcatgatctcggctcactgcaacctccacctcccgggttcaaggattctcctgcctcagcatcccaagtagctgggattacagacatgcgccaccacgcccgggtaattttgtacttttagtagagacggggtttccccatgttggtcaggctggtcttgaactcccgacctcaggtgatctgcccgcctcggcctcccaaagtgctaggattacaggcatcagccaccgcccctggcctatatatgcaagtttgttacacacgtaaacttgtgtcatggggatttgttgtacagattatttcatcacccaggtattaagcctaatatccattagttatttttcctgatcttctccctcctcccacccttcaccctccaagaccaagaactcttactccattttcaattattcccctgtggagcgcttagtgcttgaggtcagccctttggcttgtccctggtcctgggatggagtgcctttgggggccaggctccatattcctagattttatttgccaactctgccttgggactcagggaaggaagggttaaatacagaaagcagctgtttcagcgaatagttctgctagaacttactcctctgcgccaaactctcacacccgtttccattccaccaagtggtcaagagcggggacttcgagagatgtagacctccagaagagaagggtgggtccctgttctagggagtgctgcgcttaatgagtagtactcatttggaggtgtgctgtggagggctgtgaggaggatttcccatgggttctttggagagaagggagcgatagaaatgaaccagggttccaaagaagtcttcataatcgttctttctgccacccttcacac

SEQ ID NO: 123 - DNA, 4001 bp, Homo sapiens
aatatatttttcacttttcaaaatctcacttatcatatcacaagtatgaatacttgtgctaataaataaattatggcctctcatatggaagtgctatgttcaccttctgtcttcctcagcccacatcagctcattcattgctgtatttgatacagcttgatctctagcctgaaacctgcagagttcctatgctaatcctatcctgggcagaaaatatgttaaaagcctcaatccagctgtaggtggaatgtagctttattcatgtcaccattatcttagtggctaatatcctgcagtaactctggcaccacatacccaccagattctagatttctcctagcctctgctgtgtcatcttaatccataggattggacattagctttgttttttccttagtactatattttcctgatgtaactgaattcctgccttgaggcttcctagaccttgtcatagctttccttctagagagctggatttaacccttggcagtggacgatctcttggaacctgacgccatttcctgcttactcccgagcattgtttcctctctggacctcctccttgcttagccttcatcaggctggatggatctctccatcagaacttgccaaaaccaagcccaaactttcatgctttttaatattgtgcccttgatgtggtcgacttatgggtggtacaccggacatccaggttactgctcagattacaatttcaactcacccatagacaatttacagattgatttggctaaatgttatggaaacagaaccaaaaggcacttttctgtctttattactatttcttaaggtgatgtgtatgtggagttaactatatataatggtcccataattacccttttgggaaacaaaagtctttgtgtgtttttagataaaggtagcaaaatggaaactccctattgcttttctaagcacgccttcctttgcacccccatcttctgtggctgttttagccagaaatgatacatcattactgtctttaaggagatggagaggactgtggctttaacacatagtggagggagctctgtagtctcattcttgctgacaacttttcagtgtcaaccaactatagtttcctattggtgaagttttcactttttcagagtctttctgggcttgttctttgatcaccctcatctgaagaggaagcaggaaagaactgttgccctctttgaactcttagagaattcatggtttattgtatcaatttgttatcgaccacagattatcttgttaacttttggtatctgtcattttattctccccaaccaggtggaaatgtaccctgtttaggcccaggacctaccttagcaaccttgattggctcacaagccaggttgcttaagacttgtttccccagcagctggtgtccctacttcctgcctagcccttttccttttgctttgtctgtgcttgggaaatacatgttatactctgtagagcagatttgctggcagtaagaacagagatgtgtagagcccagcgtgctggagggctctctgcatctggctgtgagtggcccctggactgggaccgtgggaggacagctttccatagtttaacataaatgaaccacaccataaggacaatctgctctcatttcactcaactaggatttagtgagtactgttaaagcacagtttgcactggagtaattggagaatggagtttgcccttcacaatctgtgcacaatctgttagcagctaaaaacaaatgttagcagttataattaccatcaatttgtctccaggcttggatcacattccaggtgttagaagagatggtccatttccttttttttctcctttaagtcccatgccctgtttcaagtagcttcagaaggcaattgtgctgtaaagattcaccttgtaatgggttcaggactctttcacagtttgtgtctattcgttcatttgaactttgctgttccaagttagaaagcccttgctgaggtgtggctacctctaagaacactgttgattgggtgccatggtaacgtttgcaaagtagctactgctaggatacagctctgacacttattactttatttgcatatcaagccacctgttccaaagatgaaaatatacaggactgcatatcccagtctgggtaaaaggataatagctgactgttgaagagaacatgttgcagtttttctcctgctagctgaagaatcaagttctgagggcctgctcctcagcacctttctcctggtctagagtaggtgccaggcctggcggttctgttgcctgcgtgggtgccagggcttctccttgggaggcttgccctctgtgagagggagcagagagttgacttcctccaagaggcccatagtccctgaagggggtgtttttgattctgtctaaacctaggctatgtgttagcggtttccctcctcttagaaattgcctggaagactcttgctattggtatgtatgtggttccctccagtttaagacaagatttgttccaggatcggttgtagccccttctctgtggctaacggaagagccacttgtccttctccattcttttccttagtctcccttgacccccacatcatctcctagacacaaggcacattgatagtcacaattcactgtcaatcactctggattattccctcattcccctttcccaggccacctgaaggagtgagtggggattgctattgtgtacattccagtaataactattggctgtaagcagacatactctaaaaataactcagggatactgagcacccagagggcaccttctgtcttctcgaagcttcgccacgcctgtttccactgtcagacttccagtctgcaccacagcacacatcctttctcatccagagtgctcctactagacgagatgtttttgtctcctaagggcctcaggtgtattcatgaactcctcagctggttattttcagtttcatcttccttggtgcttgctctggcacatggtcactgctgcatcctgtcccttccccacagtttgccatgggtcatcccttttttctcattgcttgcatcttctaactgaatgaacttgtaaatatggaactgaaagtcaatcctcatagctcatcttttatttaatcctaataaatgacaatctattgcaaacattactttaaaaatattacttatcaaaagctgggtgaaaggataatagctgactgttgaagagaacatgttggggtttttctcccgctagctgaagaatcaagttctgagggcctgctcagttctgtaagaaagtattagctgtctgacaggttccagtgaggggaggaaaagacaaaaaatatagtccccaaatctgcaccagcatcccatgtgcactgtgcaccttccatggtggattagatgctcagcaaatgatatacctatggaaggttaagcctaaagaaacaggaaaaatgagcctttgtccactagcacatttatcaattgcattttagggtgattttagggataggcaaccccaattagtcattattctttaaaggtagttgtctgttagatgtaggaagactccaaggaatgttaagttggcaacattccatttaggttgcacagaatgacttttaagactaaacttcatcaggaggaaatgaaaggcctttaccatggttcctgttcacagtgaaattgacatgtattggaaaggagatgcttggaagaaatgtctagcttccccaacagactcctttcttctcttttctgtcttcctttgttaatctgccatgtttcatcttcattcagatgagttatgatgtatattatttatgtagagatattatgagattataatgaagaagatttacaaagactaaactatcctgcaatgatctaaatttttaagagacatttactcagtttggcactccaaaaattattaatctatgttctgacaacccagtttggggtatatccaagatggcttgtgtgttgctagttactgcttataaggcaactttctc

SEQ ID NO: 124 - DNA, 4001 bp, Homo sapiens
ggtagagaacataggtggctcccgaagcacagaaagcagacagcaactgcaccaagatgtaaatggggagcttgacccaggggaggcgtccaacgatgcacatggccagggagaaggctggattcaggtgggccccttcaagtatcaaggaaagaaaaagagcatctattaagtgtcactgccaggcattgtcaccagacaacactactgctccttcctatagctcttaaggcagatagtgtaattctcatcacacagcttaggaaattgaggctccagatgttacagatgttaagtgacttagcaaagtcacactgtgggccaggcacagtggctcacgcctgtaatcccagcactttgggaggccgaggcagtggatcacttgaggtcaggaattccagaccagcctggccaacatggtgaaaccccgtttccactaaaaacacaaatattagccaggcgtggtagcaggtgcctgtaaaatcagctattcgggatgctgaggcaggagaatcgcgtgaacccaggggcagaggttgcagtgaacagacatcacaccactgctctccagcctgggcaacagagtgaaactccatctcaaaaaaaaagaaaaaaaaaaaaaaaaaagaagaagacactgtgaatccaaagttggaacctaggtctgtctgctttttccacagcaacacactatgtctcaaggctccacccaagcacaccgatgcagtgtgtatctggggtacaaacaggagaggtcctgagtggagatgagcccccagaggacttcaggtgggggatacaagaggatagcagctgcccttcgtgccctgccattgatttctgtctaggtgagccaagcattagtgtgaggaagcaggatggagagatacagaaagaggaggggctggtggggccaaaggcttatttcagtctgggacactgttcaaggggataatgtccacgagtcacagaaggatttgcgtttccaccatcaccagacagacaaactggcatgcacatcccacgtgctctgatgaccagaccccaccctcctcacctgagacgttaccacccacgtagatggctatcgtaacggccagagagccagccagaaacatggtgaagaagttgcctttggtttctccactggtgacagcctgggccacagctccttgggtgaggagctgctgagaagaggagagatgaggaacagggagcccaggagaccaacagggagaaaggttgggaaggccaggggagcagccaaggagatgaatgagcacagaagacaagcaagggaaggagaaaagcagaaggagggaagggaaaagaaatggggaaagtggaggaagaagaaagggaaagaatgtgggaaaaaagaaaagaatttacccaactcataggcatttgagggtacaaacccatggcagggctcagctttaaaaagtcttatctaagattctttctatggaagagttccatcaaagccaattttaaaagcctatgtgaaaaataattattcttgctgcactttatacaatcatcaggccaagtataataaagcacattggtcttaccatgaaaatggtctttcataaaaatgggaaactgaagagagaaaaattatgtttcaagaactatgatacacttgttattaaagaaagaataaaaatgacaagaataaaaatgatgaagtaggagaggaaaggagattaggagagacgagaggataaaaacgaaaagtgatagggagttgagaggaagggggacaccaagagaaagagataaggacaacagaaggagccaggaacttttgcccaacccccttctttccttcccgcagtgatcctacctaccatgagtacaaacacacccagaaactctgccaggcactgccgggccaggaggctgcgtatccggaggtggcccatgatttcagccggggcctgagtgaagaccatggtggaaacaccctattgctattcactgctccctctgtctgcataggcacactgtcactgcacagctactgcctgcctccagcaaagataaggaacagactttaaaaccattagctcagttcctgaacagcagctacgtgtctgtgcacgtgtgtaggctaggaaacagagagataacaagagaatgtctgggagcaggctatgaacacagagcctggagtttacccaacctctgtctcttttacccttcattcccagtcatcacaggactagcctcccccatcctgacaaatagaaggaagtaccccgcttcatagacattagatctcttggtcctgaagtcagctctgcaaagtagtactattgcttccattctacagatgaggctagtgggccttagaactccccaagatcaaactttttttttttttttttctgagagagagtcttgctctgtcccccaggctggagtgcagtggcaccatctcagcttactgcaacctccacctcccaggttcaagcaattctcctgcctcagcctcccaagtagatgggactacaggtccatcacacctggctaattttgatattttttagtaaagacttggtttctcgggaggccgaggcaggcagatcacgaggtcaggagatcaagactatcctggccaacatggtgaaactccatctctactaaaatacaaaaaaattagcgtggtggtgcacgcctgtagtcccagctactcgggaggctgaggcaggggaatcacttgaaccagggaggcggaggttgcagtgagccgagattgtgccactgcactccagcctggcaacagagcgagactttgtctcaaaaaaaaaaaaaaaaaaaaagacggggtttcaccatgttggccaggctggtctcaaactcctgacctctagtgattcaccttccttggcctcccaaagtgctgggattacaagcgtgagccaccgtgcccggcccaagatcacacaattatttcatggctgagtgaattcaaatccagattttctgactctccagctggtaacccacaaagcctctcatttagaacctgaagccttaccccaaaccatttggatgcttgaagaactcaataggcatctggaaagactgggctaaagaccacagactgtgggaatgaaactcacatattgagtgcttgtacttcccttatgccgagtgtcacataggttagagaatactccatctttgtgtcccctgacatggcttgacatgaggccttcacactcatgctgagctccacctggccttctctgggtgcatgccactcttgctctgcatgaagtaaccgcatcctacttcttcatatctcaaggctccaattaaatgcattcaaagaatctacgtctagacactggagaaacagtggtgaacaaaacatagtctctgccctcctagagcttatgttctagtaggtggaaacagacaatatgcaactttttaaaataccatatacagtttatgaagttcttgagggctaccattatgatttatgtaaccctgtgggctctaccactgtcctgggcacatctgtgtgactagtaaagaaataatatttctttactaggtttaatggatactatagtgctccacccagattcccccttgggagccaatatgcccattcgctacatgtaggaaataccagctgctgataccacatagctacctccctcattgggcaatgcccttcaagtcagaaagatgcctcaccgaaggttacatgccctcctatggggcccatgtcaaacactgattgatggagggatataaaagtctagcctctttgcctcactttgcgacaactctaaagggctgttccagctccagttcccccataggatccatttaggcatctgttatatcatccatgtgtgtcagtttctcctggtgcctaatcttgttacaggaaaggggtctgaatccagatcccaagagagggttcttggatctcacactagaaataattcaggctgagtgcggcggctcatgcc

SEQ ID NO: 125 - DNA, 4001 bp, Homo sapiens
cacagaaaacacaagttctcataatttaagatccccactgcgaggccttttcgtgtttctctcccaattatctttgacagtgcactctatttcctttcaccctcttgaatttacggaggtgaaaggtcaaggggagagaatgcctatgagagacagtatgggcccgccagcccaggctggctgcagcctcttgctcaggagaatggtcacagctcaggaagaagtgtgtaggaaagcttggtggagcctggcctgtgagtaacagcaggtttaaatacaccaaggagacatttaatttgaagaatctaaaaagaactgcttcagttctctgaaaccatggtcatatactactccacgtgtgaacttgcacaagtttttttctcttaggtctacttccatgatcaccgcagcggctgacagtccatattaaattctactgaactgaaaaatgaaaggtcaaatgcatcttcctatagtttcaagcctgtctggtccgtaggggcagatgagcagttgaagatgtctgaatgtcctctccatattgtgcaagaggtacagcccatagctagaccacatgatgtacaaaaccagaactgtgaggggcacagaaccagtttttgcttttcactcacagtcattgtgtgactcagctgttgtccaaaccaactgtttcaaatctttttcaactagcaaatccgaaaatctgcctcacaggcaacagcatattcctactgctgcagtgatttggatttattttcaacaagatacgcctgaagacaagtgacagctattctccagtctaccaacatgtgaaaacatggacaacacactctaacaatgtgtccaatgagatgtgtgactaacatttacactactcaattcttctcaattttggacccagctaatagtacggcatttcaggaccttatggttctggctacctaggcagtgctggtgaaaattcaaattaaatgaggacaccatccatgcggtcacacgtgttagacaatggctaacgcaacagcagagggccacaggggccgcacacaactgcaccgcggcatctcacactcctcccaacacactgcggaaaacgccagaaccaccagccttgcaacagccggcaaagaaaactgctgaccactagttctgaaacaagaactacaactgcccactccaacaggggcagtggcaccaactctacagctctcaactaggcggcgacttcggggaccatccaaagcctccgacctcccttcttttcctgcccgcgattccgagtgcatttctgctcaattcctgcaaagcagcaactggctgcctggactgaaagggagtgccaggaggtgccgtcggaatggttatttaacactctaggtgcgcacggctgtccagccccaatctcacacgccgtaaccacccaggctgtgctccgagagagcgctggggccggcctctgcggcctagagtctgcgagcaggtcgttccgcaggcaggttaaagattcaggtaggttaaagattcaccagctcagaagaggccttcttatctactgccgacaacgtcaaggaaaccaccctggagttaaagcgaagatcgaccggccctctggaggccaccggtgccctgagtgctgaccccaaattgcgtctcactggtgtgaagggaggcactctgggctcccccggaggtccacgcattccgttcagcagacagggaagggcacggggttcctgtccacctgcccgcccgctctcaccacccctgacccggtaccgtcttcacagcaaacacgaactggatggagtcgggaggcgaagatgcaagcccccaccacctacatgaccttgacggcgtctcaggccgcccgagcctcagtttcccggtccccgaggcgggggtccgcccggatgccgctcgctcgcctgtactcgggtgggggaggccccacgacccccaccggcccccgcggccgctaatcccaaccgtccacgcgcgggcggcctcgggaaacgagaaaggcagaggcgagggaagcaggaagcccaggtttcctggagaagagcccggcgtccaagcggacttccgggcgacgggcgggggcagggacaggcagaggaggacaagcggccgcgagcgacttcgggaacctgtgaggggtgcgaggagctcaccgacccgcccgtccgcccagccccgactccggccgggccccagcctcagcccggcccgtctgcgtccgcccccggcccggccctgtcgccgccgccgccgcgggggtcgacgtgcccttcgcgaacctcaagtcgccccgaggccagtccccagcccccgccggctccaacgtctctgcggcccacaccggcccgcgcccctcgccctcacctcagaggctgctgctccgagccaggcgttggttttgctcccacaagatggcggctctgacggcggccacgtcagcgcctccgggcgcggggcacgccgggtaaggggcggagacgccgggaactccgcccaccgtgcgcccgcgacgcaggcgcgctggctccggtagggctgcagggggcggggccggggacaccctgccccgggccgcggtcttagctcgcgcgcaccctaggggcgcgcacccgtctgcgcctgcgcctgtgagtcttccgcgaagacagcctgtggctcactcccgcccgtttggcgtatttggagactgaggcccggggggctcctgcagcaactggagctgcggggctggttgccaccttcctcctcccacacccggcagtcaccgggaggcctcggggactgcgtgaggacgggggtgcgaggcgcccctcgccggggttggggttcctggctcccaggctgcgcgggtccacgtgccccggccctgtggaaacctgtggcactcgcggggccacggcggaaggtccgaaggcgggaggcttgctgtgtccccgcactggcctcggcgccccggcggccgcagtgacgcgcgggctcatacctgggcccggagcagacgccggggagctggccgcagatgaagcaaaggaggaggtggcctggggaccccggggtgaggcgggggccgtgggggtggggcccagggttggggacggccgcccagaagggaggtcacagtggtctctaatgagctggcctttaagctgagatccagttgaggcggaggagatcccgctctcaggcacctgaacagaggaccgttgcagtccctctgtgttccgtgtgctggaggcctggctctgcccaccaccctcaggtcttcttgcctcttcccttgtgctgctgtgaggggttgggcttgtgggaaagtgtccctgcagcacagtgccctgggtattgtggaggtcgggaatcaacctgatttgtgcaggccgaggcccgggggcagggcctgaggggtgggatcactgggcctggcccaggcctcctgcgcccctttgctgcccccatcacctacgttgcttgccccttgggcagggcgtcctcactgcctctggaggctgcgatgggcagatctctcccccagggctgcacctgcgggggctacgaaggtccccaaaagcggtgaccctcctgcccccaaatttagtccctttttctgcctggggctcccttccgaaatctcacctctgtgaagctgtggcagggttgtctgtttaggggaaggacgtctcccaccctacaggcatctcagatactcttggaaagccccagggagggttgtggatgcctgtggaaccttctggttgtgctgcctctccctgctcagccagagcggggccatgtgcggacatttcacgggggttacatgtggttatggcctctttagggctgaagggacctggctttggttctctgctggcagagcgtggccaggggtggctccagggtcactgagcggggattgtgtgggaaccagagcctgcctccccttcctttaaaatactttttatttatttatttatttttgagatgga

SEQ ID NO: 126 - DNA, 4001 bp, Homo sapiens
ggtccgtaggggcagatgagcagttgaagatgtctgaatgtcctctccatattgtgcaagaggtacagcccatagctagaccacatgatgtacaaaaccagaactgtgaggggcacagaaccagtttttgcttttcactcacagtcattgtgtgactcagctgttgtccaaaccaactgtttcaaatctttttcaactagcaaatccgaaaatctgcctcacaggcaacagcatattcctactgctgcagtgatttggatttattttcaacaagatacgcctgaagacaagtgacagctattctccagtctaccaacatgtgaaaacatggacaacacactctaacaatgtgtccaatgagatgtgtgactaacatttacactactcaattcttctcaattttggacccagctaatagtacggcatttcaggaccttatggttctggctacctaggcagtgctggtgaaaattcaaattaaatgaggacaccatccatgcggtcacacgtgttagacaatggctaacgcaacagcagagggccacaggggccgcacacaactgcaccgcggcatctcacactcctcccaacacactgcggaaaacgccagaaccaccagccttgcaacagccggcaaagaaaactgctgaccactagttctgaaacaagaactacaactgcccactccaacaggggcagtggcaccaactctacagctctcaactaggcggcgacttcggggaccatccaaagcctccgacctcccttcttttcctgcccgcgattccgagtgcatttctgctcaattcctgcaaagcagcaactggctgcctggactgaaagggagtgccaggaggtgccgtcggaatggttatttaacactctaggtgcgcacggctgtccagccccaatctcacacgccgtaaccacccaggctgtgctccgagagagcgctggggccggcctctgcggcctagagtctgcgagcaggtcgttccgcaggcaggttaaagattcaggtaggttaaagattcaccagctcagaagaggccttcttatctactgccgacaacgtcaaggaaaccaccctggagttaaagcgaagatcgaccggccctctggaggccaccggtgccctgagtgctgaccccaaattgcgtctcactggtgtgaagggaggcactctgggctcccccggaggtccacgcattccgttcagcagacagggaagggcacggggttcctgtccacctgcccgcccgctctcaccacccctgacccggtaccgtcttcacagcaaacacgaactggatggagtcgggaggcgaagatgcaagcccccaccacctacatgaccttgacggcgtctcaggccgcccgagcctcagtttcccggtccccgaggcgggggtccgcccggatgccgctcgctcgcctgtactcgggtgggggaggccccacgacccccaccggcccccgcggccgctaatcccaaccgtccacgcgcgggcggcctcgggaaacgagaaaggcagaggcgagggaagcaggaagcccaggtttcctggagaagagcccggcgtccaagcggacttccgggcgacgggcgggggcagggacaggcagaggaggacaagcggccgcgagcgacttcgggaacctgtgaggggtgcgaggagctcaccgacccgcccgtccgcccagccccgactccggccgggccccagcctcagcccggcccgtctgcgtccgcccccggcccggccctgtcgccgccgccgccgcgggggtcgacgtgcccttcgcgaacctcaagtcgccccgaggccagtccccagcccccgccggctccaacgtctctgcggcccacaccggcccgcgcccctcgccctcacctcagaggctgctgctccgagccaggcgttggttttgctcccacaagatggcggctctgacggcggccacgtcagcgcctccgggcgcggggcacgccgggtaaggggcggagacgccgggaactccgcccaccgtgcgcccgcgacgcaggcgcgctggctccggtagggctgcagggggcggggccggggacaccctgccccgggccgcggtcttagctcgcgcgcaccctaggggcgcgcacccgtctgcgcctgcgcctgtgagtcttccgcgaagacagcctgtggctcactcccgcccgtttggcgtatttggagactgaggcccggggggctcctgcagcaactggagctgcggggctggttgccaccttcctcctcccacacccggcagtcaccgggaggcctcggggactgcgtgaggacgggggtgcgaggcgcccctcgccggggttggggttcctggctcccaggctgcgcgggtccacgtgccccggccctgtggaaacctgtggcactcgcggggccacggcggaaggtccgaaggcgggaggcttgctgtgtccccgcactggcctcggcgccccggcggccgcagtgacgcgcgggctcatacctgggcccggagcagacgccggggagctggccgcagatgaagcaaaggaggaggtggcctggggaccccggggtgaggcgggggccgtgggggtggggcccagggttggggacggccgcccagaagggaggtcacagtggtctctaatgagctggcctttaagctgagatccagttgaggcggaggagatcccgctctcaggcacctgaacagaggaccgttgcagtccctctgtgttccgtgtgctggaggcctggctctgcccaccaccctcaggtcttcttgcctcttcccttgtgctgctgtgaggggttgggcttgtgggaaagtgtccctgcagcacagtgccctgggtattgtggaggtcgggaatcaacctgatttgtgcaggccgaggcccgggggcagggcctgaggggtgggatcactgggcctggcccaggcctcctgcgcccctttgctgcccccatcacctacgttgcttgccccttgggcagggcgtcctcactgcctctggaggctgcgatgggcagatctctcccccagggctgcacctgcgggggctacgaaggtccccaaaagcggtgaccctcctgcccccaaatttagtccctttttctgcctggggctcccttccgaaatctcacctctgtgaagctgtggcagggttgtctgtttaggggaaggacgtctcccaccctacaggcatctcagatactcttggaaagccccagggagggttgtggatgcctgtggaaccttctggttgtgctgcctctccctgctcagccagagcggggccatgtgcggacatttcacgggggttacatgtggttatggcctctttagggctgaagggacctggctttggttctctgctggcagagcgtggccaggggtggctccagggtcactgagcggggattgtgtgggaaccagagcctgcctccccttcctttaaaatactttttatttatttatttatttttgagatggagtcttgctctgtcgcccatactggagtgcagtgacacaatcttggctcactgcaatctccgcctcccgggttcaagcaattctcctgcctcagcctcccaagtagctgggattacaggcgcctgcccctatgcccagctaatttttgtatttttagtggagacagggtttcaccatgttggccatggctggtctcgaactcctgacctcaggtgatccacccgcctcggcctcccaaggtgctgggattacaagtgtgagccaccgtgcctggcccctttaaaatatatattttttaatgtgaaaaaatgcagacaggaaagagtgtatgtcagatacatgcacagtttaaaaagtaataaaatggattcctgtatagccagccctagggttaagaaatgtaccttccccagcctgggcaacataatctctacaaaaattttacaaagatagccaggtgtggtggcacacacctgtagtcccagctactt

SEQ ID NO: 127 - DNA, 4001 bp, Homo sapiens
aagtagaaaattaccgtgcaaaaccacttccattgtatgttgtaaatctaagtgttgtgtgcattagaaatgtagacacaaacttcctatcccccacgactgcaggagcctgtgtcaatcaaatgtccgctgccccacgcatgccccctgccaaatgcacattacggcagtagtttcattttaggctctctaattgaagtgtaaaactgcccccaaacatctatacttactatttcccattctaccatttcttcttgaggaaaaattgccagatatttcagaaatctgctatttcagcacaatttcagatttggcaagaatctactttgagatgctaaaaagattagatgagctcatcctaaaacgatgattaaatctttatggttttaaaaagcactctccacaaaaacagaatagggacatgtgagaaagagttttatcaatactatgcaaacaatttttaaaggaaggcatgcaatacacatgcacttcatttctgtacagtttgaacctagcacgctttaaaaagaggaagctgcccagcatcccacccctccagaatgtctagcattcctggcaggcagtactctcctttgaccagccaaaactactctttgccaaagagcaagttcctcatccaagaatttaaacaaagagggaagaatggagcaaccaaaatggacagccgacggtggtaacgacggacaaaagataaactatagacaagagatacagtcacagagacagatggagagaagggaaggagagctcagctcctgccattagcaggtaatatcctgccctccgaaaacatttggggccaataccctctgagaaagttttaaaaagataaacatagagacaagaggctcgtcagtcacgagggttccaccttgaaacgtccaactccagctcacccgccccccaaaaaatttttttttttaattaaaactgtcaaaccccaaaacacgtccacaattgaactgggacaaacctctgagactgaggaaaactctcaacgaaacccaaaaaacacagaccaggagaaaatgcaccacggaaatcctaaaatatctcaggaatgagagcccaactggagtgagggctgcagtcagggcaggtgggagcgggaatagaatccaggcaagaacacagacccatagtgatcaggagcacggattccggagcaaaagcgcctgggtttaggtcctgacgctgccaaccactagtctgtgtgcttgggcaggtttttaacctcggtttccccgtgtgaaccgagtcgaacaatcatggagtgttctgaacattaaaagagttaaaatgtgcaaaggcttcagaacagcaggcggacccgttgtacgcgctgtgtgctaactttaattacgatcgtcaccgtctgctcccggccaccgctggcgtcctccccagctcgtccgcgcctccctcgccgggcgcgcccctagccccggccggacccttcccgtggactccagtcctggctcgaggacacccgtccctagcgcagcctgccaccgcttccactcggggccgccccgcgggcctcccggaccctggacggcaattcgcgggcgctcgcgcgggcaaccccagcccggagccacgaccgccgcggccggagcaagcgccacctcctcacactcaccacggcgctccatctcgcgtgccggacgcggacgcccgccccacacctacggccgccgccaccgccgagggctggagctcgctgcccccatcccccacggcctgcggacgcccggccaaatctcagccgcagccgcagccgcagccacagccacaggcaccaccaccactgcagccgccaccgcccctgcagctaccgccacggccgcaccgcccgcccgccagccccgccccctggagcccagcccattggcccgcgctcccgggggcggggccggcgaccgcggcaggtacgggaggcaactagctcgcgcgcagaacgcgaccgtcagttgcgcgcggccggacgctgtcccagcatcacgggctgcgtcggctgcccttttggcttgcaggggacaggcagagcgactcagagaaaagtcacctgaggactagatgcggctaatggccagatgagcagctacatttcttatgagacacttctgtggatcgcctttttcctccctcttccaggggttagggcctggggaagggcgccacacgtctgaatgaagaatgaactacctcaaaaccagccatctactctgcccctctgccctctatggagggtaatagtttccacttaggcctatctgtattttttttttttttttttttttttttggagacggagtctcgctctgtcgcccagacgagtctaatggcgtgatctcggctcactgcaacctccgcctcccgggctcaattgattctcccacctcagccacctgagtagctgcgattataggcacccattaccacgccaagctaattttagtatttttagtagaggcagggtttcgctatgttggccaagctggtctcgaattcccgacctcccgacctcaggtgatccacccgcctcagcctcccaaagtactgggattacaagcatgagccactgtgcccggtcctttctttcttagctgcactttcaaactcacttcataatgagaagaaaaaaaaaagtctgagaaagatggaataattatagcaagcagggctagaaagcacatagtccctatatcacaccactcgctggaacaagcgatggcacttacctcagtgctggaacattcagaaagaactcatagagaaacagaggaaaaaacacagggagggagactgtgggtagcgctggggtctgcgagaaaaatgaccacacacgggagaaacagaaaaagacacaggagaatgtgctgaggaaaactggaaagaaaatgaggtgcagacacaggaaaagggaagaaaaccaaggaaggcagaaataagtgaaggcaaaaagagaaaataaggaagaaaaataaaaggagagactacccacttaacaaacagaaaagtaagtgagcatgacagaaccaaaagtagggtagcggggcaagagaaaaactcattgacaaagaaagagaagagggacatcttacatagacatatctttgaacccttacaggaaaaacaatgctaagaaaatacaacaaatttggctcctcaggtgctacttagaaaagataaataagaaaactcagctccttggttactttggcaccatactggattttttggactcaacttacacagattttcccctcaaatccccaaaataatagtaacaaggtcctgccacaaataggaaacctcaaaaaccaaaattccttctaatcgtgctgaaaaagaaaaatgcgccaaggactctcaccatggaagccaatgatgcctgaactgaagcaaactaataagaggagacaaaggagtccccaggccaaggggaggctgaacagtgcaactacgattcaatcataagtaaggtttttggaaggaaatttttgaggaagtccctcaacctcaaacaccctcttaagtctattttaaaatatattattttgcacttatacaccatttcccttaataaagaggactgtgttgctgactaaaatggaactggaagcatcactgacaaaatcatgaacaagttcctgatggagagagagggtgtatggatggaggtgggggtgtgacaaagagaaaggagctcacaaggaggagagaaaagcagggaaagagagacaaagggagagacaaatatgtgagaaggaaagagagacaacaataaaggagaaagaaagacaagagggaaagaagaaagaaatatgcagagataaggggaagcagagaaagaaaatgagatggagagagataaggaagataaaagagacaaacagaggtgatagagactacccaccgatagagaaaggaaagagggtcatttctcacatgcaaacagttctgggggaaatgaa

SEQ ID NO: 128 - DNA, 4001 bp, Homo sapiens
tcacctaggatcaggattcagcaatcagatctgtctgtcccctctagagagtgtgccccttccctgctaggaatccaggaagaggccgggagggttataggagcagggtctgggctggctgtgggttcagtgtttcaagataaaattggttggtggaccacaaaaaagggcagtaccaggaaaggctgaactgagggtttgcattgagctgggaggagcacatcatccccaattaaatctcataatccttggctaagaatcatagctcttgagaggagtcccttagaaaggagtaagccctgcactgatggctgtgccacctccactctgcccagtgagaagaggaaggctcaaataagctcgcttcagctgtttaacactcttccttggggtctgggctttcccttaaccaagggcaatggggataggggtcctctcactggaggagaaaaggggaaggaggtgtctggggacgcaggggcggggctaagagcaggaaatgatctgggaaccaccatcaccctccctccgctgcaagcaccacagcccagagcagaggaggggacaaagaggaaatgacagattggggtggggtggaatggggtggagtggggaaagaattatgcctttctctaggaggagcttgaagtgccaaaaacaagctgggctgggcagccagggtgcctgggttcaatttcaaattgaatcaagaaatgattttgagtggctgctccatgccaggccccgttgtgaacctgatattgtccctggtccttctggcttcaaagcccactctaaggtaacccagggagggagctgggtgagctccacagacagctccacacccaccctcctttgcaccctccacctccagcttcaagccaggcctcacaccctctctttcattcttccccatttcagcagcttctccccttgccccccactttgaacctgtttctcttttgcacagggacaacaagagaatcacaaagactaggggcagaggttgtttccagcccgacatcatcccctgcggcccagcaaggctgcagtgggaacagagcccatgaccttgtccttgggtgttctccagccaggaaaccacccgcctcaagggccatcttgagacccttctggggccatttccctgtctcctttcattcagacctaaggataatcatttccccttcagccactcctctcctgaccctgtcgcctcaccctccctctcctgttcccagtcacctgcccgctgtttcatccactcctcctcggtttccagtctctccatcctccccctcactgctacctgggtactcacattctcatcccctcagccaccccatccccagaaagttacacaagggagccgccctgccttcttcactgagccacatttcctgtcttgcccacttacagttctcttgaatggtgaccccaggccactgccccttccccaggagcaccggaaactgcttctgcccttcaggctggatcgggctgcagatgcccagtgcctccccacccaccctgcagaagctgagccggcctccttaccctcctggcctgagtgctgcaggtgctcctgcaagtcgcacccaaaaacccgctcctttgcgctgcccttcttctttcctttctgccgagacttcatggccagagccccagggcactggcccggtcacctctatcccccaagacctgtgccctaccagtcccccatgggatcccagccagctgctgggcttggcccggccccaggggggcagggctcccaattgggggtggagggtggcctgggcaacgggcagcagctcctgcccctggggccccggccacacggaagtggctgttgaagaggaagctaccaggaccctggcaagaaattgtgtcctgtgtctcgtggcccagcctggcactcgccctcctcgccccgctcagctttagggggcaggaagcagtgcagctccttaacccacttcctgttagagcatctttgcaaccacagggcctagggtgggggaggtagctgacattcacatcctcaccctttgcttggacttcattcattggtcaggggaggtgatgtcagagccctggggtggggtgatggcgtctgtggtgtgagcaggtgaccaactcccttagagaccagaattcttgggtccaaggtagagacctggggcttgcctgggagcaagttgacacagggctgtaaaaagcacactcacaagggaggatgcctgggttctgcctctgatggatctagcacctcagtcaaatcgcattacttcactgagcctcagtttccaaacctaggaaaatgaagggagcagactagaggacctttaaatcctcccacctctaagagtctgtaaaactcatttaacttgagtttcagtttctttacctgtaaaaaagggtacactgctgcctatttcacatagctgttgttgagtctccagtacaataaggaattcaggctgggcgcagtggctcacgcctgtaatcccagcactttgggaggctgaggcgggtgaatcacctgaggtcaggagttcgagaccagcttggccaacatggtgaaaccctgtctctactaaaaatacaaaaactaactgagcatggtgacgggtgcctgtaatcccagctatacgggaggctgaggtgagagaatcgcttgaacctgggagtcggaggttgcagtgagctgagatagtgccactgcactccagcctgggtgacaaagtgagacttcatctcaaaaaaaaaaaaaaaaggaatttaaaacactttgcaaactaaggtactggccatcctcgaaagggttcttagcttcactttcctaccaggggactctcagagatggccaaaggccttgtggaggccaattctttcccttccctcccagctacaggcatcctaagtcttcccctacttgggactacaggaaggatggtaccgagacagagagtatgtgactcagagcttacacagttcaaggggcaagacaggagccagacagaacaagttttgtctgtttatttaaaaacagaatatcattttatgtacaaatatgcacatatttacataaaatgtacatgttaggatcttagatcttcaggctccacattcgaagtcctaggctggctggggaacgaaggatgggagcctctcccttaggccagaaatccagcagatttcagactaagaagagtttgggtactaaatctaggtattctggctgagtgtatctgggtgggccagctaaaaataaacctcattgaactccagccccaacccagagaaacatccagaagagccttgaattagtgatccaaaacccagggggaaaggcgacattctcacccccagcacctccttcacctcacctcaactcctactctctcggtctataatcactgctctctctctccccaacaccactattgaacaggagcccttgtcaccaggtccaagcaattccctaaggtatcacaaacaatggtggatgcaattttaccttactcagtaaccacgaggctcacatccctaatttcagactctaccagctctcaggtgccctcccaaggggctgcctgcatgaagatgccttggaagtagcccctttcacaatcacaggaattaaccccctggtgttggaggggcctcactttaagcaatcccagtagtaaacattggataaatctaaaggctttctttaattttttttttctcttcgtaaaggattcaaagcaggcacagtggtgtacacttaaagtcccagctactagggaggctgaggcaggaggattgcttgagcccaggagttcaaggccagcctgagcaacatagtgagactccatctctaaaaaaaaataaaaataaaaataaataaaaaatacaactaatggaaagggcaagaaaaaaaaaagaaaaaaattaaaagtgattcggagcagtattcctgcaagaagctcccggcgcatgtatatttacag

SEQ ID NO: 129 - DNA, 4001 bp, Homo sapiens
ctgaagacacgcgcaggaatgaaggtcattagacagttgacaaggtgcgtggggaatcccctactcaggaatttgaatttaatttgggaaggtaatgggaagctctcagagaatgagaaaatggcaaagagctgggttcacccagatgatactagccagcaatattagaaagagctggaacaacaaatatttgtcaaatgtttgctgaacagaacagaattgacttagtcataaatttttttttctcactccccatgttcaggttcaggcctcttggtggggagaggaaagggaacaggtgcccatggcagcaggggcgggatggggcaaggccaggcatgctgggacccaaatcccagtcatgaattgggaggtgagatgtgcttgtctccaaggccgccttctatcctccccccggcaatcaggcattgctccttatcagaaggaaaactcaggaggcccatcccagcacagctgagagctgaaggaagcccttcctaatagcctgcaaaggtggcacagccagagctggtcactcatgcctctgatgttcctggacagacccggtccttgtgagaaaatacaagcgagtccaggaggcgagggaccctaggaagccacccattgccacagggaagacaggtctgctgtgctgctccccaccccccgcccaagaagaaccccgaggctcagggaggaggagatgcatcatttggctctcccaggggtgcagggcatggcacacgctgtctgtcctgctgacacccacgatgataagcactcccgtcagtgagcaattgattaccccatgcccacgcctgacatatatttaaaccttgcaacagcccaggagagggtatcattgtccccatgtttactgatgatgaaactaagccacagagacaacatgtcacttaaccagccccacagtctaagtggcagggtcaggattcaaactcagatggggctgaggacaaagccctcactcattaccatctgcaattctgcctctctcatagtgatacaagaggacaggaagctgctgcctgggtgaaacagccctgggcccatttcctcccaggcggggcctggattccacctgcagtgtctgaggccccagtgccagggttgccaaataacatacaggacacagacttgaatttcagataaacgacgaataattttgttagtataagtatgtatttttctttttctcttttctttttttttttttttttttttttgagacagtcttgctctgtcacccaggctggagtgcagtggtgtgatcttggctcactgcaacctccatctcccaggttcaagcaattctcctgcctcagcctctcaagtagctgagattacaagtgccacaccatacccagctaatttttgtatttttgtagagatgggatttcaccatgttggccaggctggtcccgaactcgtgacctcaagtgatctgcccgcctcggcctcccaaagtgctgggattacaggcatgagacaccatgcctggctgtatttttcttttactttctctttttttcactaaatgcggcaatgctaccactgttcaacggcctgaccctatggcgcaaccctctcctccaacctcagttcctcacccctgatttataagcttcagcctgagacccccgtgtgttcacctctccggcggatctcagggagacaggaaaaggattgacccttgctcagagcctcctccgtgagcagaaagttacttctattttgtagacaaggaacgtgagatagaggatgcggcccaggcagggccagcagccagcagagcagacttcccacccggcgccatgctgctccagagcaaggccctccgccggcccccagcggcccccttctaagaaaggatgagagggacaggaagccctgggtacggtacctatggcaggctgtggaggagggttggaggaagccatcagacaaggtccagctcagaccagcaccgtcccagctacacacctgtggaaagaagaccagaaatcgcattagctggagtcagggctgcagtttcagctactgagacaagtcactggctcacaacctgtgcttcagcccagtggctctcagagcacagggcagccccagaaaggccccagcctccagccttcataaatcattaacccatagaaacatcagcagctgtgcagcccaaatccttcttcccagaaaaccctgcagccacagaccttcctgttgccagtgccaagggacctgcagggacctgctgggtgtccgtcctcatcccctctggcttacaggtgaaatctggccccagagtccaggatcatgctcagcccccaaccttccaggaatcagatcacacctgactgtcacaaatggggctggatacttcctcctcctggctgcccaggaagcatgggctcccttaggtctgcccactcctgtcagtcccttccggtagccctgctgaaggccactctgactctgcctcttcctgtcctgccccatgggttgaccagcaggcaggaggtaacctggccttggcacatgggtgtgaggaaagcaatggctccagaggccaatggcataagacagggacagaatcccaaatgctcagcgtgggggcacagttcctcctggcccaaggtggcaccgccctcccctcacagtgggagctcacataagcaaaaggctgatgcctccggtgggcttcctgggccctggagccaaccctgcccccgctccctactgtcaccttcaattgtgcactgggggctgtcctcctagacatcttgtggaggagagaatgcaccctggagggaaagcacccagccccctggtctaatctgcccaggccacaaaccggctgtgttcctgttttcctttccattcctaaaggctttatttttattaaactggcttactaaacaaaaatgaaatgcaggttaatggcaatattagtaacagtagacattcttgcattgccaacgatacctcagacataattttaagcactttacaaatattaacgtctattattccaaattataaatgagaaaatgagaccaagaatggttaagtaacttgcccaagatcacacagctaggaagagccagggttcgaacccaggccatggggctctggagtctgtgcttagaagcagctactacactctagcacctttcaagactcaaacgatacaacaggtagacaatgaaaagttagtctccgagccgggcacagtgtctcacgcctgtatctcagcactttgggaggctgaggtgggcggatcacttcaggtcaggagttcgagaccagcctggccaacgtggtgaaactccatctctactaaaaatacaaaaattagctgggcatggtggcacatgcctttaatcccagctactcagtaggctgaggcaggagaatcacttgaacgtgggaggcggaggttgcagtgagccaagaccgtgccaccgcactccagtctgggaaacagagcaagactctgtctcaaaaaattaaaaaaaaaaaagttagtcaacctcccaccctggttgccctaatcccccagtcccccagaagagatgactgttactgacttctcaagaatccttccagaactctcccatgcatgggccaacttgcatatctgcagatatgccttgtttcatacagaaggagcacacagcactcacagtgctgcaactgcctttttaacctaaatctcagtgatgatttcagaatagtactaatacatagaaatcaaccccactttttttaacagctgcatagtaggtttggttttgttttgaggtaggtgttttttgtgggggtataatttatatagcccccatcgataggtactgaggctgctttggtctcgatttcccaggttggagtgcagtggcacaatcatggctcactgtagcctggaactcctgggtcaagtgatcctctcgcctcagcctccccagtagctgggactacaggcacacacc

SEQ ID NO: 130 - DNA, 4001 bp, Homo sapiens
gccactatgcccagctaattttatatttttagtagagatggggtttcaccatgttggccaggctagtcctgaactcctgacctcaggtaatccgcccacctcagcctcccaaagtgctgggattacagacatgagctactgagcctggccataatttttgcatttttagtaaagacagggtttcaccatgttggccaagctgatcccgaactcctgacctcaagtgatccacccaacttggcctcccaaagtgctgggattacaagggtgagccaccacacccaacctcctcttatactaacctggtacctgggccccagagcagtacaccagctttcgcccctccccagactactccagagttaaaacttgaaacagaatttgggaaccattagttattggacattcatttattcagcaactatgtgtagagcacccactatgcaccaggcactgttctgagctgtgatcaaggacagacatggcccctgttccactggaagactgaaaaaagccccccgcccccacaactggggcaggaaccctcagagcactgtggctaccctggctcactggagaggaagtagctcccgagtgagaaatgaaagaggtgaaggatgggacccacttcctggatagagagaacagcccacagaggctctttggtggaaggggaagggacagggggcctcaggaaggcaagcgcctggggacagagcgagcatcagattcgggcaccccaggaagccttccttacaggagggttctgagcttcagcctgagggcccgatgaaggggaagggcagtccccagcccacagtcacagggagcttggagatttccggaggctgacctgctttctagtctgtgtgtccagggcctgaacaccgtggggggcacagtgctgggcggatgctgggaagagctatgcattctaatgagcccgcacaacctgccctctctccccagaacccgaggaggagcagatggggctcccggcaggtggggcgtggcttcccagtagcatccttaagggaggccaaggactctggggcagaaactgagctccaaagccagtgggaaagtgcagcccaccagccaccacctctctacttggcactgatgcaacgcagggcctcctggctttcagggccaaaggaagattcgagacccccgccccagggccccgctttggcagagggaggaagaattgtccccatgccccctacagtcaggcctgctctccctctcggaggccatcccagcgactccaggggggctggtcttcatctagggccctccctgacatatatccctgttccagggaggatccgggactggcggctccgcagccacggcctccggctgacccggcatcctctcctcccacagtctcctcctgcaggaggccgtcccgttccgcctctgggcgggggtccagggtgggagaggctgactcaccacagaggcgacaggggcactccctgacttcacccgatcccagggacccccaaggtcagcgcaggaagaagtggaccacaggggaaagtgaggcacagggtgggggtgggggttcccaaactgtcctgactccagccggctggaggccacacacacacacaagctgaagcacaaaggccactcgccctagtaacaccagaactccagtgacacaaggagagacccacacagaggggagacgcgggctcggggctctcacacccagacacagggacacagcggcggacacggcccccgcccgcccacggcgacacgcccaggacacccggaggaccctggcgcctggagcgcctcccgcgcactcgcagactccggcacacgcgaggatcccgcggaggcagggcccccgcgctcactcacccacctcggctgcccgggcccgcgcctttgtcgtccgcgccgctcacaaaggcgcctggcggccggcgccgcgcctccagctccgcaggccgccgcgggcgcccatggccgggacggcgcccccaccgccgcagccgccgccacccgagccaatggccgcgccgcccgcccgcccgcgaggtccgggcccgccgggactgcgcccgcgcccgccgcgctccgaggcctggtcccgccgccgccgccgtgcgcgacgcggcgccgcccccgcccgcccggtcccggggcgccgcggctgaggtcaccgcttaacccctggtggccggggcagcggccgccgcgccccctccctgctcccagcgcgccgcgagggagacgtggcctcccccgacccgctgcgagcccccagcggtcccggcagcccaccggccccccacagtacaggggggaaactgaggcccgcggggatggggcccggccccggccacacggcgacctcctcgctccttcacctaccccggggtccccacttcccgcctcccggttctccttccccggttctccgcggggagaccccgcaggcgcgcagggtgctggcttctcctcccccacttcaacattttgccctgaggttcccccaaaagggtgagaatcctggaccggccccaggggaaaccctagacttatgacctgcccctcaaccagtcttggcggccccgtattgccccccacccccgccatggcaacatggggaaccttgcagccatgcagccaaacctccaagaacaaccctggcgggttcaggcattgacggctttgagaccggcaacaccccagtgatgtagccccattttccctaggagaaaactgaggctcagaactgagagtaacttggcaaagctcactgagcagcaaagtgctgagactgagatcctagcattcccctgcctttgcagctccaaagctgccaaacactaggtactccctcctgaaattccaaagagggcctctggatatgatgcaattaattacagttatcaggtcattaattaagattatccgcgttgttgttaaacactcccccgctacccctctatttgcaaggaaattcacacgcgggcttatcagcaattactcctgggttgataatgataagttctgcagcctccaaagggtacaggtgcacgtaggttgaaatcattttcagcttgtgttccttacagcccacagccagcaaaaacttttttttttttttttttttaactactccctatttgtcaggcaccagcctcaggggctaccagtgagacaaagaaccagacagaccccagccccgccccctcggagctcataggcttaggagaagacgcaaataaacaaacggctacagtgcagtgagacaagccacacaggccacgcactgaaatcatcttattcaccgacttgttggtttgtttattgtccctctcgacacaagaacataagcaccacagagttgtcctgagccccaggctagggcaacactggctcatagtttaagtaggcaggagatattctttgagcatttttgctctgttccagacatcgttctaggcacgcaggagacaccagtgaacacaacaggcacggcccctgccctgctgtgaataaatgatggcaggacagcagacaggagaggtttggggatgctagcaaagcaggaagaagacttcagatgtccattgagtgacctcaggctcatggcattaagctttggaccagaaatggacttttgagtcctgccgtcatagccagagccaagtacacatcccagaccagcatcgcggtctttcacagtgtactccaaccccttccttggctatgttttttttctttctttgtttttttttaagagactgggtcttgccctgtggctcaggctggcacaatcagctcaccgtaacctcaaactcctaggctcaagcaatcctcctgcctcagcctgcaagtagctggcactacaggtgcgggcatggtggtgcctgtagtgcctatattgccaggtagccatgcctggctcattttttttttcttttctttcttttttttttttttttttttgtagagatggtggtcttact

SEQ ID NO: 131 - DNA, 4001 bp, Homo sapiens
gaggaggggtaggggagggaaggaaaaggcagacaccttacaaagttgtaccaatcatttggaggtaagaattgcaaccacacagtaacattaccagtgatagaggtggctgggcagactcttggggcaaggggtgtcatgtgttcagactctgagggccagtgctgctgcccagcaggcctacgagcccaaaacaatttcttctggctccaggcagagggaaggcccattttgcagagtcaagcttattaagaacagcttggaagattaaacctagagcatcagccggttggcaggtctcaattcaaactctaagcttggaggagaggaaattctaatgtgatctatgcattttgggaccatgtcagctactggtaaaaatccagacttgcatgggtgcaaaggatgtttctgtcccatcattcaggccaagaacatcctcttcatttctagaaatgggatccaccccgtcaccaagccccaccattccataccaaccagcctggtggaggcccacgcctctgccagggcccttctcccagcagctccaacacctaaagccagtccccctagtgcaaccctaggagctcacaagactggcttgcccccacctgagactagcaagttgggtggactcaaattcagcctctaccctggcaaaagtcaaaagccactggaagcacatcctcctcctttccctctcctggcttcactgtttattgcttatattcaaaagacgctgaatcaagagctatgtttttgcacataaccacataggctgacagtccccagagactaatgctcctagcccaccaattcccatagcccacccagacccctattttcaaccatttattaaaatgcaacaccacccctcccagtctttcctttagtcaatgttgaaaaatcaaattattagcaaacctacctgtctatactctggggtaaccttacactcatggtttctcggtgtctccacggttccagaatcctgtagctttggtgtcttgatcaggattgaatcgcttgcaatttttgagcaaggtgagaggagggcctcccaacttgaagatagaatcctttctcctccagctctcaggaccctggtaactgatgctccactctacttctaccagtgaacatgatttcctttctcagcccctcttcccctcccccgctttaaaaaaaaagaaaagaaaagaaaaaagaaaaaaaaaggaaaagaggaaaaactacgaccttctcagaaaccaaaaacccagccacgaatctcttcaaggttagcactatggccaaaaaaaaatgaatcacagaaaaatgtgccttcaaaatatcactgttaactgcaaagtacagataaaaccatcctttaaatccagctttctcagctgtccttctgttggcaagagaccctctagctcaaagggggaaagtaattttctagtctccaatgcttaatatgacaacagcaaatatctttgaggaaaggaaaaaaaaaaggattaataaatccgaaatggcacttggaaaaattctttcggctgatttgtacagtaaaataataaataaaaccatacaatagtatgtacacaacagcactccttccaagtccagtgcaaccctgggaaccaaaatttatggacttccttaaaaaaaaaaaagcttttacattaaatgttttgaaattcttaaatgagccaattgcaccaaaaaaaaaaataaaataaaaatcaaagaacacctgaaatgcaatgctttttacctttaagatggtagtaatgataacaaaccagagataatctctgaaaatattctctccttttctttttcctttaaacttgcaggttcctccacctaccccagcctgattctcagacccagcctacgttcggcctttttctgaaagacaatttcctgagttagttctgctgttgggctcctccacatccaggctccgaaattttctcttgcctcagcctccatgaaacggagatttcgcttcctcccgttcccccttctctctccctctctctcgcccggccagaaagacggctcccttattattcgttcggattattattgtggatttgagttcgaggtgggtttttcttccacaccagactcctggaaaatccgatcgcctgtctcctctcggcctctccttgcctccctttccgcccctcgcctaatctcgcaggcaggagcccgcagtgcctcgcgcaggacgcccggccgggcctcgggctcccggcgccgctcgccccgcgcccgaccgccgtgttccggccttcgcggccgctcgggacgccaggctcggcgcacagggaaggctgcggcggctgcggcaggccggcacgagcgggcgtccgactgccggcgtcgcggccgcgctcgcctccttccgggccccttccccctcggttcgccgctcgctcgggcgcaggcccggccggccgccccccttccctccctccttccctgcgagcctttctccttccctcgctcccgcggggcggggccgcaggctcctcctcctcgctgcgctgcccgccgcccgccggcctttcccctcacgccgcggcggccgggggcgggggcgggaagctgaccgcctttccctgcctcggttcccgcggccgcgactcccgccgaccggcccgcccctgtcccggcctccctgcgcgccctgccccccacaaccctttgccgtcgctcctcggccggtcccctctgcggcccctcagtcgccggccctgcccctcggcgcggcctagcgggttcccatctcagccggatccccggcccggcccgcgggcgaccccggccctgaccccgccaggcaccgcgcgccgtccccgccgccgccaccgccaccgccacccctgccgccttttcgccgcttttcctcggctgcttttcccccttttattgacttctgctcgggagccgacctttgtttcctaccccctgcccgcccagccaccgtgcccgcgccccgtgcccctgcccacgggtgcaggtttacctctttgcgtccaccggcattaccccggcgcccgcagctgcggctcaccctctctccacctctcttctgatcttatttttcaaacatttgttgcggcctccttcgtggtgtcagttcttttaactgtttcctcccgtttctgtggtccttcccacttctaataccaccgacttagggggaagacccttcgctgtttcctctcgggttgggttgggcatcttaatagcaggctgtgtgaagtgtctttgaactctatggaagagcctttccagagcaattctattttcataaccccctctcatagaatcacagtttctaaatctttacaagtaacgtgacatttgtcagaaggtgccgagcgttatgattaaaaatcattaaggccgaggcggggcctgaggtcaggagttcgagaccatcctgggccaacatggtgaaaccccccccctctactaaaaatacaaaactagccgtacgtggtggcgcgtgcctgtaatcccagctactcggtaggctagggcacgagaatcgcttgaacccgggaggcggagcttgcagtgagccgagattgcgccactgcactccagtctgggcaacagagcgagactccgtctcaaaaaactaataataataaaattttttttaaaaaattattaaaataaaaaaactctcactaggattggggagtggactttgccttcttgcctaggtaaatgccattgtaaaatactctgcaggcagtggggtgtttgcataagttctctcctttcacactacctggattgttctgggagggggtggatatgtatatgtaaattatctatacacattcgtgagctctggagtgacctcaccagtgttagaagtggtagatatgcaaattgcaagaggaaaaagaaacgaataagcatcagttgaagacctactatgaaccaggaactttccctttaatgtatatcaggtataggttggcaaa

SEQ ID NO: 132 - DNA, 4001 bp, Homo sapiens
tgcagagggaatgtggcctgcgggggtgggactgctggccaggccctgtcctgacctggatggctgtccccaaatggggaccggggggagtgggggttctggcctcagccagggagtcactagaaataaggacgctgctccagacggatggtcccctgtgctaaggacaggagcagcccagatccatctggaaaccaaaactaaaactcagacccaaactcgcggggagcgcctgcgcctggatcacaacgtgaacacagatggccatcctcaggatggggacctgcgcgtcacatgtgagctgtggggaccctggcacgccgcttctcactgcttcacctctgtgcctcagtttcctcatgtgtaggtggaaagtgcttcccacatagggtggtcctgtgggtcagagatggcccccgaagagccagcgacctcagggaggccccccaacaagggtttctccccagtgtccaggtggagggagggcccatcccaccctccaggtgactttggtccaggtgacttacttcttccaggaagcccccaagacacctcccttccagcaagactggggtgggtgaggagtgcctaccttcagcccatggctcctgctctggacagtacctttcatctcaccctgttcccctctgctggctgtgggcatcgcacagcagggtccacgtctgcctggcacacttgtgggtcaacatcttctaactcaacactcctactagtcccattttacggatgaggaaaccgaggccccaagagctgcttagttcacaaagagccaggatgtgagcctgaaacccacacacctgggaactatgccacggaggggtcaggacctgcagccaggcacagcacctggaccctcttgctggacccccagccaggcccacacgcaccccctaggcccccatgttaggtggtgcacagactgttcccctcaaggacacagagaagattcaggccttgattcaggtcagaagcagaggtcaccaagacctgccatcgctgccactccctcagtccccccacctgctcaaatctcaaaagggatactgttcccatttcacagacgcagaaagaggctgagcggccaagacaagcggccacggctccctggtaggtgggacgcacccctccccctccccatctcccttctcaggggagacaaagcaggtccctccctgccaccgcccaccaaggtcaagggtgggggaggggcgtatggtttgggtttgtcttgggtgtggggttcttccttctcggggcttttctgaaattttggggccaaagcaggtttgggtgtcagattccccaaagagctcccgggagggtcgttctgttccgccccccaccccatgctctttcaaactccctggggcttccagagtcctcggcgctcaagtctgaacccaggttccggttgcatggaagttttcctttaggaagaggaagcggccactcggggtcaagagagggcagcgagcgagcgggcgggggcaagcagggggctgcctggtgtgtgtgggggggcgggtccaaagtcgcatccggctcagcccgcgagccccgcctctcccgccccggcggagccccaggagggtcgcgaagttgttgcggctgccggggcggggcttgcgggaaaagcgagggggaggagaagcgccccgggttcccggcgcctcccccgggctaatccccccacccggctcccccgagccccgactcacctgtcccccggctcacctgtcccccaggctcacctgcgccgcggggcggagggacggaggggcggcgcgctggcggtgcagcttccagcgccgggtcctgtcctgtcctgcagccgcttcgctcctgcggcagcgcggtccggcccggggcgcctcctccgcttcctgcgcggtctggctggagggcggcggctgcggccccgcaggtgggcgctgggcgggcggggctgctccgggtccgagggcccgggcggggagggccggggagggggcggggcgcgtcccgggcacctgtggcggcgccgcctgcgtcacaggtcacagccccacctgggccggctggagcccacgtgatcgcccggactggatcgcgcctctcgattcccgccgagccgccgccgcccggtgcctgcgccttccctccccgcgcccacgccccctcgaggccggcccgggagtcgcctgccaggcgtggggccagagcggctcggctccctcctgcgtcactgtccttccaggccccgctccactgcctcctccaggaagccttcggggaaggagaccagccctgcggggaccgatgtttgctgtagaaaggcccggccctctggattcttggaagccaggcggccaaagacagccaagagggcgcaaagcactctggccacctttttggtgtggttgagtcgcggtcatccccatttcacagagaaggaccgagtcctggaaaggaaggcgctcgccctcgtgcacaaggctgagcctggactccgagcctggcctttccttgctccgcctgctgggaacccgtgtgaaagtgagggagggccccgggcagaggctgcagcagccccccagctgggggttcaggaatcaggccacctggtgctgtgggaggggctgggggctgagccaagcctcccaagcttgggcctggccattcaggaatgtgacctgaggtcccagggctcagacccacttctgacctgcctccatcatccccttttcaggaaaggcctgttgccaaaggcctccatgtgaacatccacactgggctttgggtcagcttctaccagcgtcccctcactgaccccaggccttggggtcgtgggccgggcaccggtgtgccagccagaggcactgaccaccctcctcccaggacctgcctccctggcctgggcggccgtgagatcccgttgcgggttgaggagacaccacaggctctggggctgtcacttggcattttctcaggtgtcataggtagaggggcggcctgccctgcccctcctgctctggtcgccccacccactagtcccccaatgtctgccctgtggctggggctgcctgggtgtcaggtgccatctgggcagggcacaggctggcctcagggatgggtcccgtgggccatccatcccctgggagggagggtggatgagggaggagctaagagttgacccctgtgggctgcagcctccacctggagccgcctgtggggaggttccacttccaggcagctcttgggaaaggcaggtggctgctgccctcctgagtccatgatgggtactgcaccgacgaggcccggcctgccggagggagctggggtgtcccggagccttgacccgtgaggggactgaggtgcggtggggtcactgaggcccagtgaggggacagaagccttgccccaggccagtcagcaggacccaggttcctgattcccactgagtgctttcctgtaaaaccctctttcagtagctgcctccaagttacccccaaccccacaccttctgtccagcccctgctgggcccgttcagccaccctgggtctggcttcgtctccccatgtcctgctggcttccagaggccactcagcgtgtgcttgggatggtccctttgctggggatgtcacctgagctggcgtcaggacctctctgtgcctctgtcacctctgctgtaaatgagggcctgatgctggcgcaggagatcgccctggcatgaggcctaagggagaggttggaaggaaccagcttggagacctaaggggctcgcaaggagagagagactccggggaggcctgccagtgggaggcctgccagtggggtcggcccgtggcacttcctgcacctctgtggtgggatcccgagcctgtggctcagcctgccctgggggccttcccctcccacattactggcaggggagaagatgtggatcccccaagcttaacagccactgtgcattgctgtagggtgggcagcgctctggccg

SEQ ID NO: 133 - DNA, 4001 bp, Homo sapiens
aaacccagggagacagatggacaaacatttcatgcccgtgggctgccagtctagtgggagagccaaaaatgaaaacagttacaatccaggttggcaagagccaagccagaggaaccatcagaggagggtgctcggctcaactcaacctgggtattccaggaagacttcctggaggaggtgatagttaactgctccacggctgaaatacatagtgcacttagagggaaagccttggcctgaacagtgacagtgtcagtcactattggagacagggagggagaagaggacccagcgagagatggctgggtctatggcaggccccagtctctctgcacagcttctcaactgcttccccctgctcccttcaccctgctgtctgggagggtgggaagaaggggactggctgctccaaaggggtcctctctacggtggccactctggcttgtaccatcagcctctgtccctctagcctgaaaagtacccatctgagcgagtctccctaagcctcggtctcctcatccggcaaataggatagtatttttattatcatcagtctttctctagacagaaggcagctcaggccttcacacagatggggaagatgaaggagtgaggctgagacacacattatatcgcaggagtgtgcacaaggaggcccctgcccacagacgggtctctttctctgcaggaatcagaagtcctcgacacagaagtcccacttgcttctgggggcacacatgtgcaggcatgtacacatgccccctgcccctttgtatgctgggagattctagcacttgggttctggaagctcctggagggcagggagggaccctctctcccatggctcacagggataagtaggcaaaacattgaggctttgcagcaggagcacccccagttaaggctgcagaggagaaggctaggtgaatgtggggagaggggacatagaaggcttcccggggagatgaagctggaggcaggtccctagcagggaagaagtcaggagtgtgtcagcctccacctatgctcaagccaaggggtaataagaatgacccatctagctgggatgccagccctgtggccctccaggggtttggcccacccaacctcaatgctggggagctaagagggacaagctgtgttcatattgtgtgtagctcatctctgttagaaaaaaacaaacaaaaacctcagaaagagaactggccccagacagcagggacattaccttcccaaggcacgatcacaggatagagactcttgtgtctactaggcaagggccactctggagcccaaaaagaataacctccgcccaagctttgaggcccagtgttgacactgaccagctgtgtggccttaggcaattcacagcccatcccttggcctcagtattcccatctgtaaagtggctcctaagggaccgcaccaccgcccaatgccctctctaagaaacatgtctcatcataaatgtctctgggccaagaaggatgggcaggggccgaggaaagtacccttggtgggtgctgctaattacagaagacgatgggcccacttagcaaggctgccagagagtccctggacactaccatgatcagaaaaagtgtttctggcctcctgtacctagcttttccctgccccctcccgggtgccccttgccttgctgcccaggagagctggtaccctgccagagcctctctgccctttaaggaataaagccaggtgggaagtcatggctggaaagtggatccaggccaagtggttcacagagccccagaaggccatagtgggtcagagccaggatcagagaccaggcgggcagcacaaagggctcactcagcggggaaaactggcgggaagagaatgggactgctggcacccaggtggggccctacctcagccagggagctccgtccagctgccagcacggtccagggctccgggacaccctgggggctctggggttgcagccaagtcctcagggggcgatgtcagcatgtcagcatggccccagagccgagcaaggcaagctcctgggtattgtgtggggcagggagggggaggtgaaggaggagggaaccttgcagagagaggcaggcggctgtctcaacgtgcctgctccccgccccccttccccagaaccggtttggctagtctggggtacaagaggggggctggaacaatgggagtcctatgcccaagtgaggctctgaaggaccctacacccaggtcctaaagacgggggaggcagtgcttctgctcctaggagacaggtcaccactcttctggagcttcccaaacatgagcatgctcaggggacttcttggagctggggagcatcctgggagcttcacagagagcctcccaagccctgcactccttagggaccctgagaaccctgatgaccctctctgatcctattactacatctatcaaattggaacactcatccctatgattgggagacagaaatcagtcctgaaagttgatgatgtgacatgtggcatcatcctggacagcctctcctcatctagtacagccactgcttgcaaatccccatcctttcccacggcctggaatgacctgccccaccatctccagtggccgcctccaccatgaagccttcccagactataccaattgagccctcaataaaccaagccaaatagccaagtcaaactgcctccaataagaagggcatgctctatgcccggcatgcaatcttcccaaccctgtggaatgggaagctgcattttcccctaattctacctgccatctgtttgagctaccagcaattgccaggcacctaatattaatatgcagatgtgtacacagactaatagtcatgaagctaacttattgttcacctactaggtgccaggcactgtcctgagcacttcacatgtatttactcatttaatctccaccatgaccctgtcaggtagatactgctaccacttatcaggtgagtacagttgtcccttggtacccagaatctgtggggaattggttctagaaccctcccatacgaaaatccatggctgctccagtcccttatacaaaatgtcatagtgtttgctataacctttgtacatcctccagtaaattttattttattttattttatttatttatttatttatttatttatttatttatttatttatttttaagatggagtcttgctctgtcacccaggctggagcaagtggtgggatctcagctcaccgcaacctttgcctcccaggttcaagcaattcttctgcctcagcctccccagtagctgggattacaggcgcatgccaccacaccctactaattttttttgtttctagtcaagacagggtttcaccatgttggccaggctggtttttgaactcctgaccttaagtgatccacccgcctcaacctcccgaagtgctgggattatagacgtgagccaccgcacccagtctattttatgtatttattgtcaaaaaataaaataaaatgtcctcaagtgagagggtctcactctgtcatccaggctggagtacagtggtgcaattacagggctcacttgcagtctcgtcgacctcctgggctcaggtgattctcccacctaagcctcctgagtaactgggaccactggtgtgcacccccacacctgactaatttttgtattttttgtagagatgggatctcaccaggttgcccagcctagtctcaaactcctgggctcaggcgatccaccagccttggcctcccaaagtactggatttatagacatgagccaccacgcccggcactccagtacagtttaaatcaattctagattacttataacacgttaatacagtgtaagtgctatgtaaatagttgttatcctgtaatgttttttatttgcattattttttattgtcattatttttgttattttttgtttttattttcattttccatgcattgttggttgaacccaaggatgcagaacctgaggatatggggggccaacttaacaagtt

SEQ ID NO: 134 - DNA, 4001 bp, Homo sapiens
gatgtctgacgtcccagctccccacaataatggaaaagggatcccagtagctacctgcccccacagaaccgctctctataccccctagccaggtcttcccccaaccagctcccccatggctttcctttttagggtggaaccaaatttctgcggtttcaaaaaacctcccccgccccccttggctctactccagggtctcagctcaaacggttgaaaaaataaacagacttttggagctggggcctgggctggcgcaggctgtgaagagcctgtctgccaccccactgttccaccacacttcagccacctcaccccggccctctgtttgtcttaggccctactcgaatccccagttgctttccagatagcaaaatctaatcccaaccccctaaggaaagtccttttaaagctgctttccctggccctccacccccaacccaggatggaacctctgtctctcccagtttagcatcaagacaggtagcctggctaggaactaccagggaggtggaggggagggctttccatcacccttaaggactcctaaggggtactgctcccttggctgaagttggtgatcagcataggctggcaccagggtagtagggcactcaggttggagagaagccagagattaaaccaactctgggctgggacctgtcctttctgataatgggtacagtgcgggggccccaaaggagctgggaggtgctgtctgcaggcaccaccttcctttcagctctgacttattcacctgcaagtcagcttcatcatttcctggggtctgggtgtggaaaggtcagggcacttgggaatggggctgggtacaaaggcagggataaagggtacttggagaggagtggccaagaggtcatgatgggggaggcgtgtggataattatacacccagactcatgaaatgctaggtgaagggaccccaagacgagcagataagagaatgagagcgctgggggaggaggaggaagggcagggaacacaatgcatagtgccaggtgtgtcagcctaagggtttcaggttgggagaaggaagagctaggaggctggcggggcagatagggatggaggccctatgttccaggcagaagggctcaggatggaggaaaggagcccagctacacaaagacctctgctcccttcacctagaggtgatggtttgggggaagtaagccgtccctcggccgtcccgaccccagccacccgcccacccagaggggagaactgaatcacagctggaaagtccatttgcgaggagaggaggagctgacttttgtcttggaggggtggtggtggtggtgggaggaagccgggaaaccaccccctcccgtcccctccgccggatggcggggacaaagggggaacgaccaagccagcgattggggagtgatggggggtcgccacgccaagcccaagccggtggggcccggggtgagaggaggtgccggagcttccaccgcccccacccgcgagacacacacctccctcttcccgctccgtcccttaccggagcaactttctttcaagcggcctaaagcactcggtcccgccggcttggaggcgaccaagcccaggtccgctccgctccctcccgggatcccagcaccgtcgcgtctgccgctccccccacccctacccactcgctcgcagtccccacccaccccgtcccgccgctcgccgatccaccgctccgcccgattttggcgcccagaaagcaggcggggagacaggagatgcaccgcgggtgccggggttcggggagcacccgaggaccgcggcgaaaggagaggggtttccgagcccaccttgctcgccagctctctgctccggtcgatccgcgcccgcgtgagggattcgatccgagacataatcggacggggggaccagggaggacgcggcgcggaccccggcgtcctgtattgttgggggaaggcggggggaggggttcggcccgcacgcgttggtctcggggacaggaagtctgactcccctcgcccggcacccagcaccagttcctcaaacccgagtctcctcccccgcccaagctcaggaagggggtaggcggagcggagggagggcggggtgcccgcgcgcaggacgggacgccagggtttgtgtgggggcagctcggagaggtacgagggtcctaggacaggtttgagaggcccctctgcctatttcccctccagcgcctgggggcgccctctagccccagagacccgcctcttagctcttcttttcctaaaacccagccccgcagccctcgccggacccaggttggccctttcccctctgccctccccttcttcccttctcccctcgccctccctttttccctcccctactgcgttacctcagtctttaaagacccgcaggcaggagaattccatccgcccccagctcttagaaaacccaggaccagttccttcctggccttcggggtcccatcaaagcaggcctgagcagactgaccccttttacgattgggggcaggggtggccagagggagaggaaatcaaaggagaactaaacgctggatcttcagtacacgggaagggtaggattcactcccagaggtcgaagaacagagaggagagaattctcccacatgccccacccttctggggccttcctgaccccactctgccctcctcctagctccgcctctgccagctactttgggggactaggttgggattctccacttttaccgaaggccttccatgtgtctaactgcagttctctctgttgcaagttaagccggaactgaaagaccagaaaccagcctgccctagtcaaagaaagttagggcccaaccagcctctccccaagaagcagggtaaggtggggcattcatctctctggacccttttccccagcctgagccagcctttgggtgagtttcctgctattgggaaaattcctcctccagtctaactatgatcacttacagtgaagttcatttctgcctctcagggtctcccatttctctggagaaaccagaagcacagagaggcctgggacagagccttcggttagcagggtcctgcctgattctggccccaaagggcgtgggagaagaagggagggaggggagacccaacccagatccagcagttctctgccctggctcagcagtggggccaggctgcaggtttcaagcccaactcagcactcttgtaggtgccaattttagcctctgccactatttttgggctccactacctcaccactggctgagctggttgggctcctcacccccagcactacccccacactgcccctccggcttcccctccttcctagcaactccttcacctccttcttcacccattcccctgtttagaatccttaaatagcaaagaccaggaaaaaggaagaggaaataaaccgtgcccagttcaggctggatggacattagaaagcaggaaggacttccccagggccacagcttgttcttcctggcttgcacctgccaagtatacctacggggagggtgtaggaactcccccaaaccaagaggcctgaggctcctggccccagaactccagactcacctcccctgaggtgggcagccaagactcaggaatgtactaaatttaaaaacagacagccagaggctagaatcttggcctcaaggttccacccactggaggcccagagacaagatctggggtgggacctcagcttctctcccaggcctggggcaggagggtgctgcaagctatggatagaatcttaaagggccacactccagcctgggtacccaggaaacatagaatttgaaccctggggtttttcaagcgacctcatggtccctcaactcaactaagaaggtctctatgaaagaagaggacccgaccctccaactcttttctgtctcccaccccaaccttcagtctactttccatcccacctgctgttaccctacccctcaccctatgccctcttcttccccttaggagatgaataacaaggaaagggact

SEQ ID NO: 135 - DNA, 4001 bp, Homo sapiens
tcttcttcaaataatgtcttttccagcgggtgcccctctacttcccaccacagtataaaaagaaaggagacagctggtgtgctggggggagggggagaggggatccagggtttgttggctaagaaccaactcccccttctgtaaccacagttttccggaggtggccctccccttccgaccggcccaaactgacaaccacccttctccggtggcctctttgccctctcagatccacccactcagcccccgactccctgctgccagccagattcccaaattacctgccccacacagccagcccccatagtagaaagaagagccagtccccccaccaccaaaaacaaaaacaaaaacagagcatgaacacccagatgtctgacgtcccagctccccacaataatggaaaagggatcccagtagctacctgcccccacagaaccgctctctataccccctagccaggtcttcccccaaccagctcccccatggctttcctttttagggtggaaccaaatttctgcggtttcaaaaaacctcccccgccccccttggctctactccagggtctcagctcaaacggttgaaaaaataaacagacttttggagctggggcctgggctggcgcaggctgtgaagagcctgtctgccaccccactgttccaccacacttcagccacctcaccccggccctctgtttgtcttaggccctactcgaatccccagttgctttccagatagcaaaatctaatcccaaccccctaaggaaagtccttttaaagctgctttccctggccctccacccccaacccaggatggaacctctgtctctcccagtttagcatcaagacaggtagcctggctaggaactaccagggaggtggaggggagggctttccatcacccttaaggactcctaaggggtactgctcccttggctgaagttggtgatcagcataggctggcaccagggtagtagggcactcaggttggagagaagccagagattaaaccaactctgggctgggacctgtcctttctgataatgggtacagtgcgggggccccaaaggagctgggaggtgctgtctgcaggcaccaccttcctttcagctctgacttattcacctgcaagtcagcttcatcatttcctggggtctgggtgtggaaaggtcagggcacttgggaatggggctgggtacaaaggcagggataaagggtacttggagaggagtggccaagaggtcatgatgggggaggcgtgtggataattatacacccagactcatgaaatgctaggtgaagggaccccaagacgagcagataagagaatgagagcgctgggggaggaggaggaagggcagggaacacaatgcatagtgccaggtgtgtcagcctaagggtttcaggttgggagaaggaagagctaggaggctggcggggcagatagggatggaggccctatgttccaggcagaagggctcaggatggaggaaaggagcccagctacacaaagacctctgctcccttcacctagaggtgatggtttgggggaagtaagccgtccctcggccgtcccgaccccagccacccgcccacccagaggggagaactgaatcacagctggaaagtccatttgcgaggagaggaggagctgacttttgtcttggaggggtggtggtggtggtgggaggaagccgggaaaccaccccctcccgtcccctccgccggatggcggggacaaagggggaacgaccaagccagcgattggggagtgatggggggtcgccacgccaagcccaagccggtggggcccggggtgagaggaggtgccggagcttccaccgcccccacccgcgagacacacacctccctcttcccgctccgtcccttaccggagcaactttctttcaagcggcctaaagcactcggtcccgccggcttggaggcgaccaagcccaggtccgctccgctccctcccgggatcccagcaccgtcgcgtctgccgctccccccacccctacccactcgctcgcagtccccacccaccccgtcccgccgctcgccgatccaccgctccgcccgattttggcgcccagaaagcaggcggggagacaggagatgcaccgcgggtgccggggttcggggagcacccgaggaccgcggcgaaaggagaggggtttccgagcccaccttgctcgccagctctctgctccggtcgatccgcgcccgcgtgagggattcgatccgagacataatcggacggggggaccagggaggacgcggcgcggaccccggcgtcctgtattgttgggggaaggcggggggaggggttcggcccgcacgcgttggtctcggggacaggaagtctgactcccctcgcccggcacccagcaccagttcctcaaacccgagtctcctcccccgcccaagctcaggaagggggtaggcggagcggagggagggcggggtgcccgcgcgcaggacgggacgccagggtttgtgtgggggcagctcggagaggtacgagggtcctaggacaggtttgagaggcccctctgcctatttcccctccagcgcctgggggcgccctctagccccagagacccgcctcttagctcttcttttcctaaaacccagccccgcagccctcgccggacccaggttggccctttcccctctgccctccccttcttcccttctcccctcgccctccctttttccctcccctactgcgttacctcagtctttaaagacccgcaggcaggagaattccatccgcccccagctcttagaaaacccaggaccagttccttcctggccttcggggtcccatcaaagcaggcctgagcagactgaccccttttacgattgggggcaggggtggccagagggagaggaaatcaaaggagaactaaacgctggatcttcagtacacgggaagggtaggattcactcccagaggtcgaagaacagagaggagagaattctcccacatgccccacccttctggggccttcctgaccccactctgccctcctcctagctccgcctctgccagctactttgggggactaggttgggattctccacttttaccgaaggccttccatgtgtctaactgcagttctctctgttgcaagttaagccggaactgaaagaccagaaaccagcctgccctagtcaaagaaagttagggcccaaccagcctctccccaagaagcagggtaaggtggggcattcatctctctggacccttttccccagcctgagccagcctttgggtgagtttcctgctattgggaaaattcctcctccagtctaactatgatcacttacagtgaagttcatttctgcctctcagggtctcccatttctctggagaaaccagaagcacagagaggcctgggacagagccttcggttagcagggtcctgcctgattctggccccaaagggcgtgggagaagaagggagggaggggagacccaacccagatccagcagttctctgccctggctcagcagtggggccaggctgcaggtttcaagcccaactcagcactcttgtaggtgccaattttagcctctgccactatttttgggctccactacctcaccactggctgagctggttgggctcctcacccccagcactacccccacactgcccctccggcttcccctccttcctagcaactccttcacctccttcttcacccattcccctgtttagaatccttaaatagcaaagaccaggaaaaaggaagaggaaataaaccgtgcccagttcaggctggatggacattagaaagcaggaaggacttccccagggccacagcttgttcttcctggcttgcacctgccaagtatacctacggggagggtgtaggaactcccccaaaccaagaggcctgaggctcctggccccagaactccagactcacctcccctgaggtgggcagccaagactcaggaatgtactaaatttaaaaacagacagccag

SEQ ID NO: 136 - DNA, 4001 bp, Homo sapiens
ccctcgaggtcccctcgagctctaggggccctctttgaaagcacagatggggggcggcccagaggaaggccgggggacggagaggagcggcaggtgagcaaagaaacgttcattcaactcctgggctcctaccactgcctacactcctaacctgagcccccagcgccccctcaccccctcacccccggccaggcccttccccgcacactctgccccgcacccccatcaagacccctggagttcgaagggaccaggggagaggaaaaagaggagcagacacctctggaaaaacccaacacaaaggctgaaggagggaaggagaggaaggcagacaggcagccattttaagagagaagagccagacaatggcagctccccagcagtgggggcccgggactgaggggagcccaaggctgtggcccgctcaccgcagccgccacccacccccaggaccacgctcgccccagccccctccccactcagctgtgtacctgaggggtccgggcgagcggctgccccccgccgccgctgctcccggggctcatgggcgcgtggtggctcctttgttgggcccctcccgaggcggccgccgccgcagctgccgccgccgcagccccccaacactgcgaggccatgtccgccgggcccttgccggcgcccccgtcctggggcccgccactgtagtcgcccccggggtagccctggtagccccgggccgagctgggcgacgtgagcagttggttgagggtgggggtggcggtgggctggggagttcccccgccggccgcggaggggccgcctccccccatggccccgaagcgctgctgagcgaaggacgaagacgacgaggaggcggaggcgctggaggagggaggcggcttggagccggcagccgccgccgcgccggagcccggagtgccacctctcggggagctcagcgcgtaggccggggcgggcggggggtaggcgctgcggttggggtagtaggagttgtactggtggttggggaagccgtggtcgtgagagttctgctggggccccgcgtagggctccaggcccccgccgccgccgctctgcagcgctgccaggccagggctttgttgtccgccatgttgttggtggaagacggcggccgcggcggcggcgacggcagacgggctccggccgtagggttgcccgaagccgtaggctgggggcggcaaggcggccgcggctgagtgaggaggcgcccccaccccatcgctgctgccgccaccgccgccgccgggcggctccgtgaggttattgttcagggcgggcctagggcccgcgttcccgttcgagttcttcaggtccggctccgcgccgggcccgccgccgctgccggctccgccgccgccgccacccccattgctctcggccccgtcctgcagctcctttcccagcggctgcggcggccccacggcggggccctcgctttcctgcccggcggctgccttcatttccccgcgctcggccgctgccgccgccgccgcctcgccccccgcctcctcccgctgctgctgctcggctttcttcagctccgagggcggcggcggcggcgggttgcccaggctgctggcggcggcgggggcgacctgcgcggccatgatccccgctgtctcgtccgcggagagacccggccctgtcttcgtcttctccccccctcccaccccgccccggggcccagtcccccgggctgccctccccacccgcccgggcgggcctcgcggggctccgctgctgcgctgcgctcgctcctctcccccccgccccgccggctcaggctccgggctggcggcggcggaggaggaggaggcggcggcggcggccgaggcgccggcggctcagctgctcccggctctgtaggctcgggacccggctctcccggctcattccccccaagcccttgcctgggaatgaggggggcggtggaggctccgctccccagggcctggccccgctgtgactctccgctttctgctgccggagaaaggaggagggagggagggagggaggcgagggggagggggcggggagggagggagggagcggggggagggggacccgggacgggcgggctggagggcgcgcggcagcagccggggcgccgggagccagagtcagagcgcgggccgagcccggcgccctgcctcccctcgccagctgcggcttgggtcgaggctgctgcgcggcagcgggcgggcgagcaagcggtcggccggactgagcggctagagcgccccactctcctccgagtccccctcactccgacacgaggctcagcactgccattttacccagcgccgtcgcggccgcctggcaaacccggagtggagagcggagcgggcgcaggccgtggaacggactcgctcccttcccttcacaaaggaggaggggagagaacaagccgcggcggcggcaggccctcagccgctttcgctaggcagcgccgccgccgaaggcttcggagaaaacccggcccggagcccgcgcatctctggagcctgcgccgcctccctcccggcgtccctatccaggtctgtcccctcccggccgtaccgaggggagcgggcagcgtgaactttacccgcggctgcaaaattggccagagcctgagaccgcggccgcctcggcccagccctgaccccctggcagcgggcccggtccgttggctgctgcttagcacctctacagcacttttcgtcttcaaagccttctacggaccccgctaaagacccaaccttttttaccctctttgcaagcccgaaagaatgactgatcattgttcagacgattcgtttcccactcgcctgccctcattagccggtccttacaaggctctgggggcatgaggtccggattatccccattttacagaattgaaagagaggggagggaactgcctgtcacttaaagtcagagggcagaggagggtgactttaaaaagaagtggagtcaccaaagctgccttcggtctacttgcctttaaaaaaaaaaaaatcaagttgtgagcacattcaacaatgggatcagaatatcaaaatggatttgaagtcaaaactgatcatctcaccactaacttaaaatggaggccactgaagttgctttaggagcatagaacagttacccagcaggaaaacctaaacaccgtttctcactccctcttaagaaaacttagcctaccatgacaagtagccccagtctccaaagacagtaccttctaatactgaaaacccacagaagaggctccagggactgcaggaacctgagtgttcaaaccattacagaagagagatgcagaaaatggaaaccattttctccttgaagaaaaggcacagtccaacaagtcacttagaaaatggatgcttgtcagatttgttttctatcctgtagcgtaaagattgtttaaagtttaccattacattctaagagaccccgattgagctggagttgggtagaaggccaggtttatctgaaaagatcgacatacacagaaagctccagtgttctcctgatctacaggccccaccaaatcccagcagcagccttttcttcctcaggctgacttggaatgttctgatatgacaggctacaaaagccagaggggattccagctcctcaccagacccaaggctgccttgggaaaggcccaggccagtgttcctagacaccaggatctcttttccccctcagattttgtaaagggagacttcatggccacaggagcattatcttagattatgcaggacccgggagtgctggcaatgtccctggtcactatgaataattccaaagcctgaactcatttctctccccaagaaaacttactgcatcctacaccagaaaggcaaaaccttcctgttaatctaagagtgatgagatttaaaaaaaaaaaaaatcccacagttttattcttctcccctcccccggcctcaagccaagaaccaaaccagcctaccaagaagatccgactgactggt

SEQ ID NO: 137 - DNA, 4001 bp, Homo sapiens
gggaaatgtgacacattacatttactccaaactaaaccttttatttattcggcttctgaacttattatttcttactcaaaccaaaacttttcttaagaaattctcacccaacatcaaggtacatatacgagttacctaataaatgcactttcaccactgttttacacaggtgatgagagttatagctaggatttgtgactaacaaaagggattcattcctgaaacatgtctatgcttcatgaaatgagataggaataaactgtttcaggtagtttacagcatcccaaactcaaagagaaaaccttaaaaaaattagactaaacttaattactctgtatagtagaccaagatttaagtagccacagcttttaccttctacaaccacaagtattacaaattttaatttggatgcaaaattgtcaaagcagtcttgattctgaggacaagtgaaatatttttttaaatagttcaaaggaactgtcaaaagtagacaacgttgatattctaacatgctatctgttgcatttctacacttgtgaacactctacccttttcaagcacttctgaatttgtaatggatgaaaaaatacaagctagtgtctaagttccaccagttgaatccagacttttcaaaaatctaaggttttattctagcatgtgtttaaaaaaaaaaaagacagcattcatatacatattctctcaagtaacaaaaatacctgtatttttatcgttatcatttcttccaacaattaagcaaattttttgaccctattctccactcagttaacatattgacatctaagaggaacctggccatcagttttccacacatcataatgcaacagagcctctgacttatttacagaccaaccagatcaataaagaaaaataaaccatataaccccaagtcactggaaatacaagaaacaactggtatctctgaattgtgtaaaaaatcacaaaaattctctttttaaatctttcaattaaattatttttgtgacgagtcaaagagttttctgctaaaattttacagtactgttcacacaataaataagattctctttcatcagtgtaactgatagaaccacaatacagttcagtttctagggtcagattacctgacttgctttttattttaccttttaaaacactttaattcatgccgttattcctctcattccctacaaaaagagatgttcaatatgggagaatcatcttcagttgagacatcctataactgcctccaactccacagcaaagcccgccagctgaccccggtctctctggggaagggctcggtcaccaagtcaccaaacacaccttcctctgcaaaactcggaagccccacacgacgacctcgtcgaaacctcctacttcctgaattcgataaccccagagattcgttttccgcaggcaatcttaccttcatgatgactctgggaccaaggtatcctctaaaacaccaggttcagctgcacctggaggggaaacaaaagacacccagtcaacaccacaggagcccctctgcactggcggaggcggagggaaagaagcgagcgacgtccgaaccccgaagaaagagccgcaaccaggcgccagcccccgaaccatcacacgccgactcggggctccctccggccccgccatccccgcaaacccaaccacctacacagctcggcagcttcccgtccccattgtcgagacccgacggagtttcccgtctacgacaatgacgccatttctgtcagagaagaaactcacaacaagcccggcgtccggcgcagggccggccgctctcccctagggcctcggcgcccggccgagcgaatccgcgcccccacgcgccgcgtccgagcgagaggccggccgggggccaccgaggggccaggagggcctgtgggccgcgggcaggaccggcccgccacagagcccctgcccacgtcccgttccgggctcagacccgacaagtgggagcgagatcaacatctggccccgccgcggggacaacgtgagggccgagggccccggaggcggaacggcccccaccctgcccgggcccccgaccgcggccgctaaaccgctgagtgtgcggccgcccagccagggggcggctcggacacagcggctgcggggggtgggggttcccgggaggccgaggccccgaattcgggcgccgcagggaccaccaccgcgatcttcctctgctccttggccgggcccagcgactcccaaaagaacccccttaggagaccacgaaagccccagaaaatatccctaccttcctcggaggcgagatctgaccctggcacgtccagagtcccctctctccttctcccccccaaaaccagcaggcccgggggagagatggggaagaagggcggcgggtccagcggctgctgaggcagaggctccggctcctcctcctcccgcggcggcgactggtacctttgtttggcggccgctcgggctccctggttggggggagggggacgacgaaaaatcccccccggactggaggtccgggcccccaatcgcgctgccctccagaggacggcggcgatggaccctctgcagctccctccgggcaaaggtccaggcggtggccgtggcggcggcaagatgaagctcaagagtctccctccgcttcggcgaccgagctcctcactccggactcgactgacgggcaaacatcgcttcccccccaccgactctaggttccccccctttctcccctcccctagattttttttccccccctcccctacctctttcccggatggcctcttagacgaccttggattggttaaagttctttagaacccgcctatacactgttcctattggtccctggatacaaacaacgacgccattttcccaccagttctatggaaacagaaagttacgcctcaaggctttctgggaaataaagtccatactctggggccaacgcgcaaatcctcgtccgcgagaactgcaaggcccgcaatgccctgcgcctgcgtggaccggtgcgggggcgggggggaggtgaaaggggcggggcaacaaagcagtagggaggcggcaacgacgcctgcgcagtgtgaccgggatggcgcattttcttgcaccaactaatgcggtgtcgctggcggctgaggagggcggagagttctgtggtgaaatagtgggaaggattcatgtaggcatcgggaagagcctaagtccacattataaaataggaagttgatgcggggtacagttactcccggaccggcggcgtgaaagtcgtgatatcatcgttgaactgtgagcggcagtggcggcggctggggggaacccggatgggaagaagggcgggggaggctgggaggcggggcagaggaaagaaagaaaggagagtgaggacccggatgctgaaccggattgtgtatgaattttccatcccctagctttaagcgaggagggagaggaagggttggccaagtggggcggaagggagcatctgagcgaggaggaagcagaaacctcaccgtttcttcccctccggactctgtgctagcactgtatacgtttgcagttctctgcccagccgctgtggaaaatcggcctcgaagtgattgaaattccctgtttatatcaggcggcttctttcagatccatcgtctttctcccggagtatgaatggaaggattcagtatgcgcttcacatttgtatgtctctggccattctcaaaccaggcccttccctttgaaaagtcttttgcatgggatgttcacttcttagacgcaaggttgtgtgccctggtttcatcgtctaacgcgttagaaggcgctttcatttcttcatgggtgttgagcgccgaccactggggtggcctctgccttcgtagacctgcgcctggtgagacggacagatgctgaacaaaacgatgtgaaattaccgcagtggcagtgccccagaggagagttccacggtgataggagaatgagggaatttggcttctttagggagggaa

SEQ ID NO: 138 - DNA, 4001 bp, Homo sapiens
ttatcatttcttccaacaattaagcaaattttttgaccctattctccactcagttaacatattgacatctaagaggaacctggccatcagttttccacacatcataatgcaacagagcctctgacttatttacagaccaaccagatcaataaagaaaaataaaccatataaccccaagtcactggaaatacaagaaacaactggtatctctgaattgtgtaaaaaatcacaaaaattctctttttaaatctttcaattaaattatttttgtgacgagtcaaagagttttctgctaaaattttacagtactgttcacacaataaataagattctctttcatcagtgtaactgatagaaccacaatacagttcagtttctagggtcagattacctgacttgctttttattttaccttttaaaacactttaattcatgccgttattcctctcattccctacaaaaagagatgttcaatatgggagaatcatcttcagttgagacatcctataactgcctccaactccacagcaaagcccgccagctgaccccggtctctctggggaagggctcggtcaccaagtcaccaaacacaccttcctctgcaaaactcggaagccccacacgacgacctcgtcgaaacctcctacttcctgaattcgataaccccagagattcgttttccgcaggcaatcttaccttcatgatgactctgggaccaaggtatcctctaaaacaccaggttcagctgcacctggaggggaaacaaaagacacccagtcaacaccacaggagcccctctgcactggcggaggcggagggaaagaagcgagcgacgtccgaaccccgaagaaagagccgcaaccaggcgccagcccccgaaccatcacacgccgactcggggctccctccggccccgccatccccgcaaacccaaccacctacacagctcggcagcttcccgtccccattgtcgagacccgacggagtttcccgtctacgacaatgacgccatttctgtcagagaagaaactcacaacaagcccggcgtccggcgcagggccggccgctctcccctagggcctcggcgcccggccgagcgaatccgcgcccccacgcgccgcgtccgagcgagaggccggccgggggccaccgaggggccaggagggcctgtgggccgcgggcaggaccggcccgccacagagcccctgcccacgtcccgttccgggctcagacccgacaagtgggagcgagatcaacatctggccccgccgcggggacaacgtgagggccgagggccccggaggcggaacggcccccaccctgcccgggcccccgaccgcggccgctaaaccgctgagtgtgcggccgcccagccagggggcggctcggacacagcggctgcggggggtgggggttcccgggaggccgaggccccgaattcgggcgccgcagggaccaccaccgcgatcttcctctgctccttggccgggcccagcgactcccaaaagaacccccttaggagaccacgaaagccccagaaaatatccctaccttcctcggaggcgagatctgaccctggcacgtccagagtcccctctctccttctcccccccaaaaccagcaggcccgggggagagatggggaagaagggcggcgggtccagcggctgctgaggcagaggctccggctcctcctcctcccgcggcggcgactggtacctttgtttggcggccgctcgggctccctggttggggggagggggacgacgaaaaatcccccccggactggaggtccgggcccccaatcgcgctgccctccagaggacggcggcgatggaccctctgcagctccctccgggcaaaggtccaggcggtggccgtggcggcggcaagatgaagctcaagagtctccctccgcttcggcgaccgagctcctcactccggactcgactgacgggcaaacatcgcttcccccccaccgactctaggttccccccctttctcccctcccctagattttttttccccccctcccctacctctttcccggatggcctcttagacgaccttggattggttaaagttctttagaacccgcctatacactgttcctattggtccctggatacaaacaacgacgccattttcccaccagttctatggaaacagaaagttacgcctcaaggctttctgggaaataaagtccatactctggggccaacgcgcaaatcctcgtccgcgagaactgcaaggcccgcaatgccctgcgcctgcgtggaccggtgcgggggcgggggggaggtgaaaggggcggggcaacaaagcagtagggaggcggcaacgacgcctgcgcagtgtgaccgggatggcgcattttcttgcaccaactaatgcggtgtcgctggcggctgaggagggcggagagttctgtggtgaaatagtgggaaggattcatgtaggcatcgggaagagcctaagtccacattataaaataggaagttgatgcggggtacagttactcccggaccggcggcgtgaaagtcgtgatatcatcgttgaactgtgagcggcagtggcggcggctggggggaacccggatgggaagaagggcgggggaggctgggaggcggggcagaggaaagaaagaaaggagagtgaggacccggatgctgaaccggattgtgtatgaattttccatcccctagctttaagcgaggagggagaggaagggttggccaagtggggcggaagggagcatctgagcgaggaggaagcagaaacctcaccgtttcttcccctccggactctgtgctagcactgtatacgtttgcagttctctgcccagccgctgtggaaaatcggcctcgaagtgattgaaattccctgtttatatcaggcggcttctttcagatccatcgtctttctcccggagtatgaatggaaggattcagtatgcgcttcacatttgtatgtctctggccattctcaaaccaggcccttccctttgaaaagtcttttgcatgggatgttcacttcttagacgcaaggttgtgtgccctggtttcatcgtctaacgcgttagaaggcgctttcatttcttcatgggtgttgagcgccgaccactggggtggcctctgccttcgtagacctgcgcctggtgagacggacagatgctgaacaaaacgatgtgaaattaccgcagtggcagtgccccagaggagagttccacggtgataggagaatgagggaatttggcttctttagggagggaaaggaagggtttctgagcaagtgaggatcgagctgagagctgaagggctagcaggagttaactaaggaaagagaaaaggaaaagacattccagacaaaaagactaacttgtcagaaagccctgtggcggaagggagcttttccaatatgaagaactgagcctggagagatgggatgagggggagtgtcgaaccttttaggctttgtaaaggagttttggttttctcctaatagcaatgggatatcttccaaggaatctcaatcaaaagggagagatggctccgattggaatgtcatccctggctgaagagtagaggaagcgaaaaaaagaagagttaaagaggcaaatgcagggaacccgacgaggaggctattgccgtagtagttcacatggtgaaaagaatggagcgtttgtattaatgattatggattcactctttgaacaaatttctggcagctttttagttttgaaagtgagaagtttcagactctcactgaggtattctgtagttttttcactctaaaaggaaactagtagagttcatgtaacacacactaatgcctctttacatttaactttagtatgtgatagctgaaatttccagctgtgataaattgggaaatcctttgatttaaaagaaaaacaaaggcgggtgagggtgagagtatatgccacggtgtgtagaatcctttagactcttaagaagacacaaggcggctgggcgtggtggc

SEQ ID NO: 139 - DNA, 4001 bp, Homo sapiens
ctggatatgatgctggtctagagggggccctcctgtcaaaggctcaactgcagacccagaaaccgaacccacccgggtacctgtggatccctgtcccagagcacagctatagtaacaccctggggaacgaggagatacctaggcccagctgcatttctcagacctaaacgcctagaacccaagccacctaggcctgcagagtcaggtcagagtccaggtgttatgtgcctgctctgggaatccaagagcctaagtcaatgccaagtttaaccagagggtctctgaccccaagggcagagcctaggcagacagagcccaggggtgttagctccgaaaattactgtgccaaaaccgcagcattggcctgaagatcctgccctgtcaggtcaggagacaggagacactgggtcgagaaagggcagaggtcatttgcagagcatgtttgggaaaggaagccagtgttcaattgtgtaaccacaggatgcccgcccctcgagctttccatctgccttcatgcctcaggtccaatgaagtgacgtcccctgccttctaggacgctgagaactgtcgaggaggcccatcttctgcaaggtggggcaacaacacggacaggtagaggtacctaggccggctggatacattcctctgctgacctatctcatcagtatctttggttactatctggccaactcacagttgtgggaaacctcagctttgggactggggccaggtccctggacaaccccagcccctgtcccatgcttcctcgacccacaagccctgtctagcctggctctgacaggcaggccgcagccattacggcagcctcagctcacacccatggagctcatcttccccttttttgagagagattttaactccttccccaccactcccctggcgctgaaagacttacaatcacccacttcagtgttgacgacccaaagcccttagagccactctcccaaggccccagtgggccgtgcccctacacctcatcctctcttgtcgggagcacctgctcctgcaaacttctgagccagacggagtctccaaactcccgttaccatgcgatcctccctggacccccggctagacactgcgggtcggggagaagttggggaggagtctgggcttgagccaagggcctcagctgactcctctaccccgggggatacctcccctccccctcaatagggccggggcttcctcttccggcaaggaggggttaagccctctgggtggggctgggcttgcccaaaccccctcctcaagcctctcggccgccccgtcccgtgaccctctacccgcgggacaggaaggcccgtgcactttcgccccgtcatgcccccttgcgcgggggccagagggggcccgtctcagccggcagcgggtccctcctgcttcgagagcccctcggtgccgcctgccccgtggcaccggccctgtctgttcgtcccccttcccctgcccccagccgtgcagtaccggcccgggtgagagagcgggtcgcgcgccgccccggtcccccacggcacgggccgtactaggccccaagcgctcggggccggctcctcccccgcccggcgcccggccgtgcccggctatgccaggcggcgaccccggctcagcagggcgcggcgcgggcggggacaggcccgacccgcggcccgcgcccggggaccccgcgcccgacgccctcgtaccgcgatcacgttgacgaaggtggtcttgcccgagtactgaagcccgaccagcgtgagctccatctcctccttccagaatagggccttgaaccagtccagcagcttgttgaacaaagcgatcatggtcgctgccgccggccccgcccggtgccaggtccccgccgcccctcgctgccctcgcgctgcggcccggagcggcccctccccggtacggcccgggtcccgcggctcggtgcgggcggaggctcgagcgcggctgccgacgactcgctgccccggaatcggctcgccgatgggtgtggcttccgcgccctcctcctccgccgccgccgccgccctccctcgcggccgggccgtgtcctgctcgcacccgagcgcgcgctcctccctcgctggagccggggggccaggggccgcacccgcaggtggggtgagcagggaatccgcaggtggggtgagcagggaatccgcaggcttcagcggcgggggttgaccggcagctggcgtcgagaggcgcttgggaaatggggtctaatttattttagaccctgtccccgactgccgcgccctgactggcaccccctttcttaaagggtggtgggctcgaggtgggtgaggttccggttaagcaggagccttttcaggttgaaggagagtgggtcacccacttcccaggacacggagatgagatctctacgacagggaggcagatggaggcttttttgtccctgaacccttgcctctgagcattcctgggtacagtcccatcctctcaaaatgcacccagtgcagagggacaaccgtattcgggtcttttaatactccatcttgttttgttcaccacaatttaccccgaccacttgttaggaagcctctggccccaagtgaaacggacgcttgaacttgctccggatttttaccagcatccccaagatacccaaacagatacagtcctggcagggggttttcagtgaggaacgtctgtgacaaaggaaaatgttgccctgttttggtgaaaagcagagtattcttcaggaggagaagtgatagttctcctcttgaagtgggtctggagtgcctgcaaagatgccttactcctgcccctctccttgcaagacccacccataggacctgctcaggcaggctgacaacctcagctggcagtcccgggtaggctcaggcttcgggcagtccccagcctatgctggctgcccgttggggtttggttttcaaatgtagtcatatgtagtctattgttttagtcaaaagtgggtaaactatcaatatcaaccatatctgtccaatcaactggagttagatgaccccaaatagtcaaacagttaccaaagtagaagaatcacaaggtttcggctagcataatattgtttttttttttttttttgatggggtctcactgtgtggcccaggctggagtgcagcggtgggatctcgactcactgcagcctccacctcctcgggctcaggtgattcttctacctcagcctcccgagtagctgggactacaggcatgcgccaccatgccagcctaatttttgtatatttggtagagacggggttttgccatgttgtccaggctggtctcgaagccctgagctcaagccatctgcctgcctcagcctcccaaagtgctgggattacaggcatgagcctggccaatattctggtttattaagcaccatctttctaacctctgccctttataagtcctcctctagctcctaagataaaggctatggactgaatgtttgtgtccccccaaattcataggttgaagtcctaatccctaaagtgatggtattaggaggtgattaagtcatgagggtagagccttataaagggggccggtgggattagggggaagaataccagcccacaaccttttcaccatgcaaggacagaaagaaggctctgcctaatagccagacactgagtctgcaagggtcttgatcctagacttcccagcttccagaactgtgagcaacacatttctttttttcttttttcttttttttttgagatggagtcttgctctgtcatccaggctggagtgcagtggcatgatagctcactgcaccctccacctccagggttcaaacaattcttctgcctcagcctcccgaatagctgactacaggtgtgtgctaccacgtccggctaattttttgtatttttagtagagacagcgtttcactgtgttagctggatctcctgacctcgtgatccgcctgcctcggcctcccaaagtgctgggattacaggcatgagccaccacgc

SEQ ID NO: 140 - DNA, 4001 bp, Homo sapiens
tctaaaaattgcagaagcaagcagccaaagcatagtaaacaaagctgtttcattaacaaggattctgcacacacacatacacactaacatatgctattttctgctaagatttaagctgatattgatcagcttatgaaaatatggtcaagaggctgtcattctggttgctgttgttcaaaaaacaaaacaaaataaagcaaccccacccacacagctggaaaaaagcttctgacatatgaactaaaacttgtttacccaggccacttcttaataagagaaatgctttgcaatttaactagggttatataagtattttgcaatgtgtgatcagttaaaaatcttgtttatttattccatagttcacagataggttatattactacaaggtcaggtttgacataacggcatttttcctgttttatagttttattctatcactcagcacttcctgcaatgtaatttttgcgattaattttacctccctttccttcaaaaaaaatttaaaagattaaaaaaaaatgacgtgacaaattaaccatttcttaaaatagctattcccagaaacacggtagaaaagaaatttcagtgattcaactgtcctatcaaaatctggatattgcaaaatcatactgcctttcagtaacatgaaaaaaaatctaatttaaatttcaacgtggggatgggggtaatcactcctactgttttattttcaagaaattctccgccccacgcaacacacacacatatctcaaggccctttttaaggctatcaaatatattggtttttggaaaaggatagactttatttggcaagaataaccaaggtctccaagataaactagacccctaaaatgaaatgccttctaaagaggaataactgtaacatagaggaaagagggctgggactagtaatttgaagatctgatctctctagaactgcactacaccctactccatctcttagacaaaacagaccaaacctttttgatatttgattattttttgaaattgagaaatggtgtggaatcaaacttttctgaaagagtttggaaattgcctcgacgtaggcctaacaagatttaaacctggggctgtggaactaaagacctgtccggaaccataaccattacacaaacccctgccctcagcaggcaaagacctacaggccctcttaacacaagatctaagtttcaaagtatagtccggggacggagacggggacgggggttgcgggtgggaggtaacagcctaaagaaacgtcgtatatatcaaagaatgtccattttttattttttaaattaaaatctaaacctttaaatgtttggaagcaacgcctcaactaaagagcagtgtggtccagggtttatgaatccaaactactcttaaagtaaaccgagacactctgcctacagttttcggcatcaagcggctccagcgggcagagggttaaaagaggaccacatcacagaccagacgccgaccgaggagtgagggcgggccagccccgcactggctgccgctccaacggaggtcaggacagggagcccccctcaactcccacctgccccctcgctcccttgggtatactcgagtctacccaagtccccgggatcgggcccctccccaggtcaccgctcccccaccgtctctcgcggcccccgccccgccccggcgccttcagctccagctgcgtcccctcagccctgggtctccttagttgtcagccccttcggcccctcccctttagaggcgccccagtcctccgtctcctcaccggggttggcagtagtcgccgccatggccgcagatgccaccgccgccgcgccacccccccccccagtgggaggagccgccgccaccgaaccgggagggaggggaaaagaaaggccactccccagaagcggcgcctgaccgccgcctccgctaccgcggaatccaagatggcggcttcagcagcccccagcatcccagcccctgcggcggggagaccccgcctatatagtaggcggagtcaacacacggccagcctcctaagaaaaattgaccaatgaaaatgccaaatcgtccaagggcagggctactcactgcgccagccagtccagtgaagggagggcgaggaagaagtccagctgtctccctaatctcgccctccttgcgtaagaggtcaatgaccgagtaacgtcattgaaatgcaattaaaatgggtattttaggctgggcgcggtggctcgcgtctgtaatcccagcactttgggaggccgaggcggccggatcacctgtggccaggggttcgaaaccagcctggccaacatggcgaaaccccgtctctactaaaaatacaaaattagccgggcgtggtggcgcatgcctgtaatcccagcttcttgggaggctgaggcaggagaatcgcttgaacctgggaggcagaggttgcagtgagccgagatagcgccactgcacgccagtctgggcaacaagagcgaaactccgtctcaaaaaaaaaaaaaaggatattttactaaaaaccttcgcttggtggtggattcgtctgagtggttgccgtgcagacaatgtatcttgtaaatcctctttaggtgctaaagagcacctaaacatcacatggtgatttgtaatcctttccagtttttttcctcttttaaggacttttgtccctggtgaaaaagttaaatgactaacttttgaatgcctgctatggaaccggtagtctaaaaggatccaggtgttaacggtttggtatgggagatattgccagccaaaattggaggcaatagatgaagaaagtaatttgagaatgggtaacttctttggtcagtgacagggacagagtgaggagttttgtttgtctgtttttgagacagagtctctctctgtcgcccaggctggagtgcagtggcgcaatctcggctcactgcaacctccacctccccggttcaagcaattcccctgcctcagtctcctgagtagctgggattacaggcgcacgccacacgcctggctaatgttttttgtatttttagtagagatggagtttcacgacgttggccaggctggtctcgaactcctgacatcaggcaatctgcccgcctcggtctcacaaactgttgggattacaggcgtgagccaccacacctggccagtgaggagtttttaatagggaatcaataagatgatggctgtgcagatttattttcttttttctttatttttttctgagacggagtcttgctccatcacccaggctggagtgcagtggtgcgatcttggctcactgcaacctctccctcccgggttcaagcagttatcctgcctcagcctcctgagtagctgggattacaggcgcgcaccaccacgcccggctaatttttgtttcctggtaataggaagcattgagctattcgaggtaggcactgtccaaaatgctttatatgtatttactcatttaatcctcacaacaacgatgaggtaggttctactgctatttccattttgcaattaaggaaacagaaacaaagagggtaagcaagggacatccagcaggtaagtaatgtgggaggcaaactaaaggagtctgacactggaaacctgttccacccatccccctattttagcactacaattttagcactacaaagtacttccattttcatgtatcgctcacaaaatgtttaatacaaatttaattaaaattttaacaaaaatcccattatgctattgaacagctttgcattcttagaagttgtatatgtactgcgcagattacattgatccacttatttagtttactgcaaaggtattttaacataatttacatattattgtttacatctgttaaaatttcatttttctttcattttgttgttatatttataagtcaccaaaaagaaaaaaatcatccacccaaaagaaatacattggctgggctgggcggggtggctgtaatcccagcactttgggaggccaaggagggcggatcacaaagt

SEQ ID NO: 141 - DNA, 4001 bp, Homo sapiens
cactagggctgtctttcctggctgtatgtaacggtaagaagagacagtatctttatattttaagatgaactgatcaaaaagcagatccactgatatggatacagcagtaccatttaaaagtcaccacaaattacctaaaatacactggggtttcataaaacaccatctatccatcacaaataatgtttttaggaagcatgttcaccatttattttctaaagaaaaagttcttacacaaaatctctggttgacaagctgttattttcaaggctgcagggatttctagagaagcatgcctgatgtagattagctcattttttataactccaagcacttaagtatttaaataatgcaaaagagcaacagctaattaattgtgaaagttgtggcaaagcactatctatatattgataaatgtctaatgctctatttaggtgcctttaaaaaaggatattgttgccattaaatattttcactctcatatttccccactataacaggacattgttgagagtcttccttatgaatacacccaagaattagaaatgcatacaaattcagtgtctgagattttctaaaactacagcttcggtttttttgcaacatttacatttttctaaaaaagatgtaatgcaaatgcgaagccaaagttatgaatattcaaatatgcaaaaacagaaaccgggaactgactgccatattttaactaaaatggaaacaattttaggattacaaaaatgattctgctttatacgaatgactcatcttctatcttattcattggggtttattttaaatatttccaaggattctccacacgcattccccgttgttttttctattgtccttttcttagcaggtaaaaggctccaagcttccttctaggagttttgtattttttgtattcattcccctcccccagttaacaaattctgtacaatgtatattttgccaaatccccttcttcttcttcttttttttttttttttaaaaaggccaatgggctgaaagcacagggaccctcaattttcgaacagtcccatctccccccgccccccggtaaggaataaactaccttaacgctaccaataacaaaaacacaacaaaaaacaaaaccactaaggaaagatgcaggttccccacaatcagaaatttctggagctaatgtgaccccaggaaatcagagttctaggaagaaaaactaaggcgctcggcaccagccttccccaccagccggggccgccttccccagcgccgcgagggcgcggccggcgggaccagttcccgaggcaggcaggcactcgggtgcaacctgaggaatctgggggcgtggaaggcgcgcgggggagggcaggcttccaagagtgggaccctcgcgtctcctgccgactgggtaggaaacgggggcttcccccttgccctctcagagcgggcgatcccaaagagacaggttaagccgcaggttgagagggcagctccgcgccggtgccccgcggatcctgcaggctcccgggtcccaggagaagggcgggctgggctgggctggggtggggagggcggtgaatgcaaggatattgccgcaggcaggagtccacctcgccctcgtcgggcccggcctggccgtcgcccccatcttcttcgtccacgaacttgttctcgtcatattcatccacgtccaccttccggaagcgggccgacgacactgtgttcttcgacatcccaatcccgaccagcggcaaaggcctcttcttggcgctgcctctacctcagcaagcccagcccagcaacccactacccggcgcctgattcacttccctcttccgctctgaggcgtcgccgactgccgcggctcggaccgttctgggcctgcgcgctagccccgtttcttcctcctcaggttcgcgctcccttggcgcctcccacgctgcccctgctcttccacggagagcgcgcgcgagggaaggagcgcgcaggacacagcgcgcaggcgcgggctctccgcaggcaaggggcggggctgggcgaaggaggcgggggcgagagggagggccaaaagctggaccgcgggcagaggtaagaagcgattggtcgtccgattgcgtcacgtgattctcggtgggggggttcccatagaaacgcttttctgcggtccagtctagggggtctcagattggcggggatgggcagcagcggcaggtggccttggcttttgctgcagccgtcaacgacctatcatcggggtcctgcgtaaggtccggctggctgggacttggctgtgggtgggatggactggctgccggaccgagtgccctgcagttggtaggagtatgaggcagagtgatgcacacccgggcgcccagcatcgttctaattgccggagacattgcctcagactgtgcgctgctagaggctgcgttcctgagcaggaagcccgtttcctgggattggaactacccttcttggccagcgggaagtccccaaggacggagtcgaaaggtcaaatcttatctgtcagtgctgtgtgacagcatcgcaacgggatctgcagaacctgaactcggtatcaaatctattgggagggaggggaacgtgtccgggcaggcgctggggtcgggtggcaaaactggggtgaatttgtagaatttgggaaagggtcattgacatcttaaaataggtggtcgtttggagcaagaatgctcgaaaggggtgagggtaggttaggctctctagtgctgggggaaaacaaaatgtggaaggattggtggaaaccagacctttaagatttatattatgatttgagatttatatgattccatctaggccagatttaaaaaaatatttgacatccccatttctggaatgtaggagataaaggcactaagacgaaggaaatggtagttgtgctgtgtgtattacactgaagaacaaatatttgcaggataaaattaatttggacatttggctggacactgctcggtatgggtccagtttagttggacctcgagcagaagactggctgttgccctgttgtgtaccacaatctttggtttccagtgctgtgttgaaaagagcactaggcttagaatcagaaaactcaggcttaagtgttgactcttccactcataatgtttgaacgagacatgtcacttaaaattctgtctcagattcctcatcactgaaatggagctaataatgtgcactttacaagattgttcttaggattatatatcacgaaagtgtttccaagctctaaaattctacataaatgtaaaatgcatgttgcttgtaccattggttttgggactagtcttataaatttcttaatgatatatggtgttttatctccttcctagaagagatggaaagattctgaagggcagaaacagtttttcttttgtatcttccttccatatgacaaaaagctaagcatgcagaagggactcgatacatgcttgatgaatgaatgaaatgtgaaagaccgtacagtttgagaatcatactgagaataataaatcagaagagggagagagatctcaaaattaaatatttgttggatatatacatgtaaatacatatgtccagtcttctttaagttcaaaaaaatacatatataatgtgtgtatatttatctatgcagtatattatatataaatagagagtgggagagagacctcgagaatggaatacatccctttttcttgggaagaagcaatgtggtgtttttctgttcccaattaaaccactcttctataagtatatcatttaggtgatagaagtaacattgtttaaattaacattcaagttatgaacacacactggtaaaaattctcttaggaatgccttaagacagcaaaggaaaaatttttacctgttggcaatatttattttaaaaagccatataccaaagtataaaatcattactatggtgaatggcgttatataacttagaataaagattttacaattttttttcagtttcagtctttgctaactttagtaga

SEQ ID NO: 142 - DNA, 4001 bp, Homo sapiens
agaggggtcctcttttcccagaaccttcctgctctgcgttgtaggtctggagatgccagaagtggctggaaggagttatagctggacacacttggtcctacagaggccttcaccccaggctgccggagaggaagctgagggctggagaagaattagggtgctagctggtcactctaagagttatctaatgatagtgagccccaagcctcagcctgtgctgcccacccagagctgcttcacctcgcccctctgtgaactgtgttctggacccagagccacctgagttctctcctctgactataggtgtccctcgatgaccacagagccgggggatggtgggagctaatgggccctctgaaaacatggggcctgggtcatggcttcctgtggccacaagggggcagagtctgccaagcctgcagattccaagcagggtgggcttttccatcccctcagctacactcaggcctgagccactcccaggagggccagctaggcttccataccagcctggtctctgagagctgagccaccctgggagctggtctaggtctgtccccctcccagcctcctatggatctggcagcctagtcatgctcctagaagtttcccccttgagccatcgttcctgatcccagccagccttcctgagctcccactgctagcactcccaaacacccttttggggccctagagccttcgtaagtcctcattagccagcctcctcttgggtcccagctaccaccctcatccccatcctttagcacacagaatgcctgcacacctgtggaacagacccccaggccttcccggggttgtcctccaggtcctggtgtgtgcctcttggctaagtggaatcaaggcctccgagccaggccagtgactgttgtccgtgatggagggaaaggcaggcagggcagccttaggagccctctgcgctagggggagcccgggagcaggtctcttgagggcagctcaggccctgcctcctacctccttgtggtctagggccatttggttctctggcccttgcctccccatccaccagcccgctactcaccacggggtcctgcaccttgttcttctaggcacctttccggggaccagtgctgggctctcccccgaagctcaaacagcgcatgcccaggactgtacacctggcagtgcctcttttagccaaaagtgtggccttggcagccagtctgcaccctgtagcggcagcgggagcctcacattacagtgggccggcaaggccagcacagtccaacaagcgacaagagggactgaggggctgggaggggcggagaactgtgccgagggcccaagagagggaggatgcaagaaaggagaggaggggggtggtcctgtcctctcccccagcccaagagcgtccatccagggctgggaccagaaacaggcaagtgggctggcttacctcgggtgtggggctccaggcccgggtggcagcgagggctggggcccgagggacctgctgctggcggagcccccgggccttgtctgggggccgggcccaactccatccctcagcagcctcctgcccgccgccgcagccgtccggtgtcaaattccagccccagcgtcaccagatcccggggtggggctgggagcgcccctgccccgccccacctttcggggctcacctggctgctccacccgtcggatccagtcccccctagcttggctaggtcccccgaggttgggaggggggtagatgctgggaggggcccctcggatatggagagtagagaactcgagcggtggagaggcacggaaaccgggagttgagtttgtagactcgcgaagtagagagctgggaggccgggccgagggcgggagaaagtgagtgagggcggggagcgaggggtaagccggtccctgcgtggggcggctgactgctggtacgtgcagatttgggggtccggctgtctgccctgcagcagctgctctctgctccacccgattcttctctcagcggccagttcacctgccttgttgggttgcttagcctctgcgcagctttcaggatctgactctgctctagtctccccacagctcacctcctgtgctgcttagggcttggagtacggacacacttgcaaacacgggagtcactggggcacagcaggggcagtgttggcagaagtgggtactgagggctgaaggcaggggtcacagaggaggaacatctgagctgagtcttgaagtaggtagctggagggcagcatttcagatgcctaattatggcaatttggcaggtgggttgagggctgggtgagtaacatggatggaaagatcctaacactggggaccatgggagggttttgagcagaatggtgtaatcagacaggcattttttgtggatgactctggctgtagtaaagaggatggggttggagagaaaggtggaggctgctgtggaaagaggatgaggtctgatgcagggcatgaggggagcgtggggctgccaggccccaatctggaacacgcaattttgaaaattcattagtgcctgactggatagggtgaggaggtaggtagaccctgcaaaagtgtgcctttggcggggtgacctgggggaggggtacatcccggctcctgggaggaaaggcaggggctcatgagttcggtgttggacatgttgagttggaagggcctgtggattatccaagtggaaatgttcaggaagccggtgaatttgtagcctggaaggaagcagagagagctgcgctggcaaaggcaatttgggaattgtcaaccaactggcaattggaagctgtggtcagggatgagagtgctggggatgtgtgtggaccagctgtaccctggctatgcttctgaaccactagggacctttaaaaactacccacatccgggcctcaacccagacccaaatcagactttcagggtggacatgtgcagttttcaaattgcacaggtgattctggtgcatggccagggctcagaaccatagctggtgtgaaagtagttttccgcggtggtgaggactagaagtcagaccacagagaactgctgctggaggtggtggggctgctgcaggcgtgccaggagccccctgggataggaggccaagcagggagcagtctgctctgtcacctcccacaaccggctgctcagttggggcacctgccttggggctttttcagccagggacaccacttatggccattcagcctatgccctgtacaactccacggggcaccatccaggcaggaacatgtgcatggtagtggccttatttccggtagaaatggagggggtttctgggttgacctgtccctcagtcagggcctcccttacccccctagcccaggaggcttctgcctaaggccggccacagtgggaaggagcatgtgggaggctgctggtccctgggatggccgggactccagccttagggctcaccagtgggagggcagcccagggctgcctggagtcttggattggggtgggcaggagagaggagcaggagccggccaccccacttactgcctgccacagtggcagtgtgtgacagaaagctcacttcatggcctcaagtgcaggcgacagtctggtctgtccattctcaggcctgcctggggatgctggggaagagagggatcagactctaggactcttaagaaggcgacgtgatatcttttctaaagtatgacagaggatacctagagcagggctgaagggagagggtgtgcctctgtgctaatgattggggctggggcatgtccttcccagagggacgggagtgtcagtagtagggtaggtctgtgagcctctgcttgctgcaggggctcagcagtatatctttcctgtgcttgcaggaatatctgtccttccagaggtggggctgtggcaccccaaggcaatgtcctagggctccagtcctgtgcctctgtctcctctaagagtgtgccctgaaacctctggtctcaaagcaaagaggatacaggagatgctccaga

SEQ ID NO: 143 - DNA, 4001 bp, Homo sapiens
actgaatcctgggaagcgcacacagcatttcaaggaggaggaagtaatgaggtaaaatgctgctgatcattaactgagaatcgactactggatttagcaaagtggaagtggtgatcttaacaagaacagtttctaatgaaatgcgggtgggaatgtgactaaagcaggttcaagagaaactaggaaaggaaatagacagtacaaacatatcttagaaggtctgctttctaattaagaagaaaaagagcagaagctaaagggggaagtggcagcaagtgtattttgttggtggtgttggttttttttttttttttgatggaagaagtaacagtatgcatgctggtgggaatgatccagcagaaggcagaagaagacagtacagtaaagaaataacaaatgctagtattgggtttatgttgttgcaaacctggtggaagttctcttctgttttcgcagtggctcatgcctgtaaccccagcactttgggaggccgaggtgggtggatcatttgaggtcagttcaagaccagcctggtcaacatggtgaaacctggtctctactaaaaatacaaaaattagcccggcgtggtggtgcaggcctgtaatcccagctacttgggaggctgaggcaggagaattgcttgaacttgggaggcagaggttttagtgagctgagagtgccccactgcactccagcctgggtgacagagggaaactctatctcaaaaagaaagaaagaaagaaaaaaaaaaccgaaataagattgccagaaatcatgaaaggcctatatgaggttaatcgtcacaaatttgtttttccccagcaacgtactgctgcatgggtacagggacaagaccaggcaatatgttggatttaacaagggttgacattttgacaaaagagggaaagtacttgagagaggaacaggaaattgaggttgtatgcatcagaacgttatgtggttggcagattatacaggtatacactcagtttgtcaattctcttgtatattactacagaccataatttactaaagagattagaaaatcacaagatctgaaatgggacaaaaatgtactgtctattctgtgacaggttctttgctaattaatacccccaaagaacctccaactttgtagactctttaaacataagattattctctctgccgtaaaataaagaagggaaagagtagcaggagactccatagggccttataagccagttcagggattcgggccttaactctgagatggaaaatcatcagaaagttcaaggtattctacgaacaccttgaaatgagaatttttacttcctcacttttgggttttgtaccaccaacgtctagcatagtgctttgtacaccgtagacatccaataacgacaattgatgaaacctttaaaaagcatcgtaggtgaattcaacatgggttgtggagggtaaggatggtaccatctctctgtcaaagggagaagagctagaaggaagtagctttggcatgaaccaaaatgtcaacctaattgatctttaaatttctctgcaaaatgcccacatctacctctgtctgtcggtccggtccgttcgccggcttaggtcatatcacccaaatatgccccagtatgagaaaagcgctgtcgggtagctgagttctctatcagtacagatattcatgcaaagatcccgggcgggaatgtcaactaccgaactaaagactgtatcagaggaccctgctcctcgcggtccccaaatcccgccgcgccattttcttctcaagggcaccccacacctgacaactcacacagatggttatcttcagcacaccgtggttatagtctcggtacaactctttggcctcctggttgcattcgatgcacctgtactggcaggaggccgaggcagcagtaggagtcgctgccaccccatccacgttccccttcccctgctgcaggccgctccgcccgccgttgcccatttccactcaactgcagtccagaacttccgattctgtggagggtaagacgtcagacgccagaccggaagacttgcgccgcgcgggcttattgggattcgtagtcccggcaccggcaaggcggccccgggctggccgagctgggactaccattcccagcacacaatgcttctccccttgtcccgcccccttgccacggtccacctgcccgccgtaggttagaggcggggaggcctgagagccgggcaagggctgtcgcgcatgcgccttgagggaagatggcacctgccggctgctgctgctgctgctgcttctggggcggcgctgtggccgccgcgggcgccgcccggcgtgtcctgctgctgctgctgctgggggtcctgtccgccgggctgcggccaggcgccctggccaccgagcactactcgccgctctccctgctcaagcaggagctgcagcaccggcagcagcaggaggccccggcgggcggcggcggctgcagcccgcagtccggggactggggggaccagtactctgccgagtgcggcggtgagtgggcggcggcgggcgtccgagtcggccggggcggcggggcagcggggctggggtcccgggccggggtacgggtcgcccgggcctcacgcctccggctgcggcgcgcgatccgcgggagccggctcggccaggggtcctggcgggcagcttcccgccgctgccacccacgccgccgcgcgccctcctgcagccgcctttgggcagggcggcgagtcgagaaatgagctgacagcatgctcctggggccagggcggcctctctcctgagtctgaagcaactgttggaagggtggcggaggagatggcaggtggcccggggcagccctgttcccgccgccggcctcccgaggatgccgaaggggcgagggaggggcgggcggacgagcaaccagcccggcggcttgcggagcccgcccccggagggagacgcctggcacatcttaggcctggaaatcaggcttcctgacctcccgggttaatgtctcgtatacaacagttcctaaaaattggatccctggaatggaaaaaaagagcaagcccatcttatctgctcgttgacatcttgcttccagttgtttaagatcaacctgcgatctgtcaggtgtctcccagagggaaaaaaggcccctgcaggccttgagcctgtgtgtcagtgccgtgtgtgtattggagctacgccagctcattcattaagaatgggcgctattggcttcagtttaataaatcatagcagatgcctctgggacaaaatacgtgtgtacatttttttgttttgaagttctgtcgtgggtctttttacccatcaatctcctccctttctctttcccccttctctatgtgagttcccttatggcttgctttgggaaggaccggggtctaccgaacccactgggagatggttgcttttaagacttggcagtggttttcttcggcattgtgtacctgggaaaacaataccttttttttttagttgagatgagacgtcaagattagcacaatctgatttccttttagtacagtctgacttccttgaggaagtgtcactcactgagaggtttgtgacttttttattttgcggtaggccttagctggtaacggcgtaagtaacacggccagccttgcacggtggagaaagaatggcatttacttacctctgtcactttctgtatctctgagcaagtgaattacctgtctttgtaaaatgcctcctctgtaagtggaaaacactgttcacctaattgtggggttttattttcctcacgagggtgctgtgagggaaatgagaagtagccgacatatattgagtgcttgctgtatgccaggtgctgttataagtgctttaggtctatgagcctagtatattagtctatcagaaaaacaataaccacctcattagatggtggctcattttctcagatgaacaaactgaaacatagtgaaattgtcatcttcttgagatcccacagctgccaaaggag

SEQ ID NO: 144 - DNA, 4001 bp, Homo sapiens
acacctataatcctagtactttgagaggccaaggcggatagactgcctgagctcaggagttcaagaacagcctgaccaacatggtgaaaccctgtctctactaaaaatacaaatattagccgggtgtggtggagcatgcctgtaattccagctgcttgggaggctgaggaatgagaattgcttgaacccgggaggcagagattgcagtcagctgagatcgcaccactgtactccagcctgggagacagagcaagactctgtctccaaaaaaaagatgcatgctttatatgcattgtctcatgtgaggtacacattattacccccattccacagatgacaggacaggtcacatgcccacgttcacccaaatggcaaactgcagagccagcgtttgaaaaaaggtctgccttggccggcgcggtggctcacgcctgtaatcccagcactttgggaggccgagacgggcggatcatgaggtcaggagatcgagaccatcctggctaacacggtgaaaccccgtctctactaaaaatacaaaaaaaaaattagccaggcgtagtggcgggagcctgtagtcccagctactcgggaggctgaggcaggagaatggtgtgaacctgggaggcggagtttgcattgagccaagatcgcgtcactgcactccagcctgggcgacacagcgagactccgtctcaaaaaaaaaaaaggaaagaaaaaaggtctgccttccccaaagtcgatgctccttccacaatcctctatcacccttacaaagtgatacaaacagactccgagatggagggtcaccctgacaagagagaagaggacagatttcctgacactggcgcagggtgttatgaactactgagctttgtatctgccacgcagtgggtgcctagtacacttaaggtgaagggtggaaggctagagccgttgctgaggtccaaaatgccacccaaattgagggcatcctttggatggggagctgcaaaaacacattattctccgttggaccaaggccacggggtgtctgtcctagaatattctttgcagaggagctgcggaaagctgcagcaggttcagagaagaggaatggaaggaactccgaagagcatgggaatggggtggggcagcctgcaagaccgaaagaaaaggcctgggacgctttgctgggaaagacaaagaggagaggggaggggagaggagacgataaacttgccaacagcccggccaaggtgaaccccggctcctggcgccttcccatccgcattcattccacaaacgcgggccaaatctccgaaccagccgcaagcgggagggggcctctctgcagccggggggaagaaagttcaggactgaggcgggaagcctgcctctcagaaggggagtgactcggggggcacacttgtggggctccgaagatgaaaacgcaaactgaggctggaaggcgctaggcaaacacatatgtgatgaggcggtcacgcggggcacttggggtacgtcccccgacctgtggagtttgtcatcgaagagacctcgaggccccccaaaacggtccctcgggccttcccccgcctcgacggtgaggacgcagctgttggagatgcgctcggtcctcccagacctagggagggggcaggtttcggggcgcggtgaagggccatcgcagctcgggtgcgacacgcctgtggaggtcaaggccaggcccggcgccgacccccgacccctcccgcctcggccccctcacctcctcccgcgccagcgccgcccctcggtaccggggcatcttggcggcgaaggcggcggccccagccggggagctgaggtcctccgcggtgacggccaggaactcggcgacgctgaactgctccggcatggcgggcgcgagcgtggagctgccggagcggggcgcggggggcactgagctgctccgcgctgagccggcctcaccgccggccgggggcgccgtcccggcctccacacgccccgcccctccgcacgccccgcccccgaccctccagccgctctccgctcctcagctgggacggccccgcccccggctcctcgccttcctccaccgccaaggtccaggctccggccccggtcccggccccgcaccgcgtcaggccgcttccccggcccctcgccggccccctaggccacgcccccagcccctcaccgcctcagaccccgccccctggcgcgatgccccacccctggcctcagtagaaactcctccgccttcccccatccctgccccttcagggctctgtcccgtttcatcccgctctgggtcttccaaatcctcctcccttgcacggcccaggctgttccatctccgcgtcgagtcttagagccccctccctcttcctccctcctctgctgattcgttccgagttccccatgacctcgccccttctgccctaccacccccccgccacccttccctcctctctccccagtcccgcccaatctccttgcctcgctccgccccgaatcgccccacccctcctttgctgcgtacgcccagctctcagcctcagctttgcaggcatccggagactccctcctgataacccccgccgccccggggatgtgtggatcggggcccctggctagctgtgtgacttggggaaaattacttctcttctggaacctcagtttccttatctgtacaatgggaagcctgatgcccgcttgattgtgatgttgcgaagaaccgaacacgtgcgtgtactagttccctcttacccgaccatagatcgcacccacgcctttactcttcctgctcctgcctttcaccccttaatctggctcaccatcctttggggcggatgagggatggggttcaggatagaaatccacttaggtttagttctgaagcctgaggtcctctggggaaaagttctccaagtaaaaagctaggaaagcaccgcagcaaggaacattggttttggagtcagaggaacctagattccaatcttggttactttggataaattgcttgcttctctaagcctgcatttccccctcttaaaatggcctcatggtattttaccccacagggcggcgattgagagaatcttttcttttctcgcacagaaaagaaaagaaaagaaaaaatccggaaagatatgcactaaaatgttgcaccagcaacattttatgcactagctgaagacagatatgcactagctgaagacattatgagtaactttcttttcttttggtgaatctgtatatcctaacttttatacaatgaccatatactactgtgtaatagaattaaaagttgacgggagcgatggctcatgcctgtaatcttagcactttgggaagccgaggtgagcggattgttcaggagttcaaggccaacctgagcaacatggcgaaaccttgtctctacaaaatatacaaaaattagcccggcgtggtggctcttgcctgtagtcccagctacttggtgggctgaggcaggaaaatggcttaaacctgggaggtcaagtttgcagtgagctgagatcctgccattgcactccagcctgggtgacaaagtgagaccctgtctcaaaaaaaaaaaaaaagaaaaagaaaaagaaaagaaagaaaaaagaattaaaagttgaaaaaaatgtgtaccatctgatagagacgacaactattccaagagttctttcaaggtcaacttctcctgttgaaaccaaataggcacttttcttgttatttatttttagagacaaggtctcactctgtcgcccaggctgaagtgcagtgcaatgatcatagctcaaggcagcctcaaactcctgagcttaggcacttttcttgcttgacttttaggagcatctgacaatgttaaccactcccttctccttgaaacacccttgcccctgaatcctaggagaactattttctttggtggccctctccctctggctgttccaagagccctttctgagatgcacttcctccgcagggatcttaaatgctggagttgttgg

SEQ ID NO: 145 - DNA, 4001 bp, Homo sapiens
agttaactcactacttctagaattgtttaagaagagaccagtgagcatcgaccagttgctgtccagggtaaaggtctgctaatgaattctcaggctccatacaaatataaaattctatgattctgagaggtctaagtgatgttgcgatcagtagaactggcctgtaatgggttttaccttgtggatgcatctaagttgaaattgattaattttaaacctgtcttaagacagttgttaatggcaccctatcatgttccactgtgtttctctttgtttcattttctgtccagctttctcctctctgcttccatttttaatttttaaaaatttattctctctccctctgtttgcctcaatttttctttcccgtggaccttccagggctgtagacaggcactatttagcccagctagtgacagtcagctttagaagatttgctgatctctgctgtagttacaaatataatggttacttaaaacacaaagtaccatttggtagttttgtttattgttgtttccaaactacagctatcagttcatgtactttagtaatcattaagtaatgaaatccagtggttctccgataccataggatgcacaatcaagaaaaaactctgctttaggcagaatctaaattggtttagtctttaactgatcttgtccattttgtttttcattgcatacatgcatttatattgcacctagtacagacttgcatacatagtaatgtgattaataaatattttgctgaatgaatgaacacatgaatgttttattcagatgaatatctaaaacgaaagaataaattaaagttagtgcaaactaggtaactttaaattctatattatggactctaaaaagaggatacattggagatttgattttcataagatcctcagtagtatgcattaggtagattgacatgtgaacactataaaaatttggttctattatcgatagcatcaggtacttgaccttcattgtgctcaaatttggagaatttggagtctaatttataaatgtttaacacacaaatagggaactattgtgtttaataagtattactatgtgaagatgtgtgcatgttcccaattgtactttgaaagtcagcttataaacatatataaatataaaaccataggattcgcagaaataggagatcatagtattacacaacatagtgtctttgtttagttagagaaacatgttgtttagcactaacatgtaagctgtgtagagcagaatcactaatgatttattggtacataataatttacatataaataaaaatggaatacataataaaagagtgaaggagtgaacacgtggtcaagcaattaggtgagaattccttacttcacatatagccactatacatgtgagttttagaaaaaagaagcactctactctcgtaaagataaattttcttgttctatagtgaaaacatatgaaattattacctccatatcagtgccaggttacaacttctgtcttgaacatagtcttttgtcttcttgagaagcaattccacaaagtcaggattaccttttctggcaaaaacccagtacagaattgtattcacacatatttcagtgaagtcgaggttaaaacttacttcaaaacggtatcctgatttttccacaaatgcaatgtaatctgtgagtagtgcgtcaaaaccatccaagtccacatacctcagaatttttgccagtgatctgtaaatccttggttcgtaacagtgatatccccactgacccaaaaactgtagggagggtcttttaacaattttgtcaaggagattgcagaatatattgcttcttggacaagaagtcttaccacataatttagtagatttactcattgttacttatagcagcactgtagaaataaaatcagaggtaagcatactgtaatcctccagttacatattttgacaatgtggcaggctttactccacaaacagaagtgccctttaaactgtaaccagaaaaaataaatattaccataaagtactggatgacatcacaataggtggagattcctccacaataggtagaggtcaccagcataggtcagaggggatattgtatgtaactggtgacatttgaaagagacatattggacagaaatgacatacgtgaaagctaagatacaatatatttaattttctaagaattcagttcaaggtagtctgcctggtttctcaagttctgcatgtttcttcagtagactaaataatggtaataaatacattgattatcctttgtaggctattatgtaagcagacaatgattgctagagtgaataaattcaagtgttgttctcatgttctgcatgaatactgtatgctctcacttaatcctcattgattatttcccctatcttgtagttgaggaaattgaggcttacacagataatttttttgttgtttgagacagggtctcaccctgtcacccaggctggagtgcagtggtacgatcatggctcactgcggccttgacctcctgggctcaagctttctctcacctcaacttcccaaacaactgggactacaggcatgcaccgccatgcctggctaatttttgtattttttatagaaacagagttatgccatgttggccaggctggtcttgaactcccgagctcaagtgatctccctgcctcagcctcccaaagtgctaggattacaggcttgaggcactgtgcctgactgaagcttacataggttaagtaacctgccaatatattcattcccaaagagaaagaatgtcatacaatattaaccaaaatttaaagactttgttttagatttttgttgttgagacagtgtcttactcttttgccttggctggagtgcaatggtgcgatctcggcttactacaacctccacctcccaggttcaagcaattctcctgcctcagcctcctgagtagctgggattacaggtgcacaccaccacgcccggataatttttgtattttagtagagacagggtttcaccatgttggccaggctggcctcgaactcctgacctcatgatccgcctgccttgacctcccaaagtgttgagatttcaggcgtgagccactgcatctgacctttttttagaattttaaattttacagaaattattcctctataaaccaggcagaatgtatacaatttgaacattaaaggtacttcaagcttgatatggtgtccttgccccactacaataaaggggaaagatgttatggttgtttttatcattattctgtagttaatgtttcagccacctttttatactattcacagagtgatcagtcttaacaaccttggatgtatgtattagcgtttttaaaggtaattaaatatattctttttcctttggcatatttttatttaaatcatgtgaatgatgtctctttagtaagaaaaaattattactttagatttactataatatacatctactaatattgcattttattttgtaaactctaaactgtcttttcccagctggacaacctaattaaactaactacatattgtcatctttctgaaaaccaagttttgtcattttctttcactttttctgttttactttttttgcctcaaaaaatattttttaaattaaattattttactgatttcttaatacaatacataaaacttataaaaaattgaaacactatagagccagcaacaattcctccctgagataatcatcctagcagttttatgtatagcctttcaaatgcttttgcttatgtgtgtataaaattttctttttttaaaagaatacagagacctaatctgaaaaaaatttgtcattcttatacaaataggatacattacacatatcttgctctatgagttactttttatttctataacaacgtagtattattacctttgtatgaccatatatggtcatacatgctaactctatgtcctacttgttacatatccggtactattttaaatgctttatatattaactcctttaattcttacttcaca

SEQ ID NO: 146 - DNA, 4001 bp, Homo sapiens
ggggccaaggtgggaggatcagttgagcctgggaggttgaggctgcaatgagccaagatctggccactgcactccagcctggatgacagagtgagacagagtgagaccttgtctcaaaaagaaaagttcattgaggatagccacggtaatcccagcactttgggaaaccaaggtaggtagataacttgaggtgaggaattcgagaccagcatggccaacatggtgaaacccgcattctactaaaaataccaaagattagcgggcgtggtggtgtgcacctataatcccagctactctggaggctgaggcaggagaattgctcaaacccaggagaaggaggttgcagtgagcagggattgaatcactgcactccagtctgggcaacagagcaaaacctgtctcaaaaaaaaaaaaaaaaaaaaaaaaattcattgaacgcctgagctaacaacactgaatcttaaatgtgctgagctaacagcgaaccccacatatcctcccagcaagtactctgggctgggagtgagaataagaaaggggcaccaggaagggtgagggtagacaatgatctaggaatgagaaaattcaacaatccttttatttagctctttggtgccgacgcagtgcctatgtacctatatgcacgcccccctcccccaaggcttacagtctgagggaaaaaaaccacagtccccacccaacctgggacaaaactagacgacctcatgggggggatgcggggagggagtaaccccccctcccaacccaggaagccagagaacgccaccggggcacacaggtcgcctctgctgagtctgtaggttcggtctgggctgagcgccagcagcaatctggcctcccatcccttcctctgggttcctttctcgaggagtaagcgtgctcccaaagaagtcgctagtatctgaggccatctggtggagagcagtggcatggtaaccgagggctcaaagtcgggctcgcatcccggggactcgcagagactggactgcgcctgcggcaaggaaggacggagcagagccacctgaggccgagcgggagccagacccagggatgaccgtcctggggagcccctctgcaccccggaggggacgcaggacgcccggagcagtcccaggccctgcccctcgcttcacccacggagctcctaggtctctatcgtgcccatcgtacccgctgccctgcacttccgccccaagctggtggaggagggagggtgtcgcagacacgggagcgccgcggacctcctacagtcaccgtcctgcggcgcatcgcgggtgacccaacagcctcccgctgctcccgaaagtgggacggggccggcggatcatcctccaagccgggggcggccacaggcccgatcaatgccaggattcctccgactccaagaaaggcgacggggagaagcaggaggactcggatgactccggcaccagggaggagggcgcccgggcctcgccgtcgccagggcggtcgggacggggggtggcgggcggcgcggggcagggcccggtgcccgggaggccgcgggaagcggggggcgtcgagccgtcgggggccgagctcagcagctcttgcaggtactttatgtagcggatggcggcgcgcagcgtctccaccttgctgagtcgcttctcagccagggcgccggggaggtggccgcggaggcgagcgtagccctcgttgacgcacttgactcgctgcctctcgcgctcgttgcgcttctggatgaaggctggctcgaaggggtattcgtagaccccgaaggcgccggggaagggcacgtaggggaacacccccgcataggcgtcgtagtagggcggctctgctgggcccgggtacagcaggaagggcacgttgcccaggggctcggcggggggcaggggcgcctgccggggagggggcatgacgcccagctgcatgcagctggggggccccagaggcctccggtccaccagagcccggcagaagttattgttcatggtgccgcgtggagctggacccagagcgaggcctccaccgaatggccccggcttggggtctgcaccgtctccaccagtggggcaagtcacatcgctagcagcagctcttgggtaccaggacttgctagggcctcttttcgccctttagggtggcttccaatgactccctaacaagagccatcgccctagacaagtgtggcccctctcaggaggtcggtgcacgccttctcagagccagcccatggcgccgcggaactctgagggcccgcaccccgttccgcagcacccatgggcatggccacagacccgcccaccctgcctcttgctgccacccaacatgggcacctcaggcctaaaccacgggctccatgtcctccacacccaccccagcgcctggtccttggtcctcgcggccttcgggatccccgggctgtccggggtccccaaactgatggctgctgttaggagtgcgccagctcagtggagggagtccccgggaacatttctaaagaagaggagaggagagtgaacatatcagttaggaaagacctgtattatgggcttctttgtatcatccccacccgcaaacgggattgtaagcctcatgaggagaggcggttggctactgaaggggcacagatctgggttaaaatcttgtgtccactccttaatagtcgggtgaccactctgagtcgtggtttccataacggaagggcaagggaaacatccttgacaggaaattaataagatatgagaatcaaatgtgaaaaaatatatgcaaaaaacacctcctaaaggtcatagcttataaaaatgcccagttttgtcatgtcccttgagactgggggattaagtctcatcactgatcccttccggggtcttacatctagaagcgggtctgagactgcttattggattagcagcagcagccatcagccaatgagggaagccaactctttatggaaaggaatgcctctttgataacaaggtaggtgttgctggtccattcaaagccctctgcctggcagagacagtcatcaaagccttccctgccccagtccctgtggtctgggatacaccctctcaccccaccctgggtttctccatggcacctaatggagctgtctattctttcacctgtatgccctgagcctagcccagcccctgttgagtattagatgctccacaaatacatgtggaataacagagagaggattaggcagaaagctgggtttgtcagggtgggactgattacacgtagcctttcataggctttaggaagttgttatttcagaaataattggtgtgtgttgagtttaggtgccaccaagcttcattgcatgtggttatcagatccaagttaggtgccattttgtctaggaagcctctctgatcgcactcccccctcttgtgtgtgtctacagtgttccataagtgccatcttagcacttatcacactactctattattttttccctcttcataaaagatgatcaggacttagcgagtgagtgagtgatgggcagcatgacaccttggccactgggcacggcctctccaagagacagaaaggagctagctctctccctgacaggaggaggtggtggcaaactcagattcccgagaatgtctccttctgcaccctctcacctctgtcctttttgcaggccctgagtctgtttccagctagctttgtcctccacactaaatgaggaccaagaaaaatcaacaatgattctaagcgtcatggagacttaggtatgctctcaaaagtgaaaccaggccgggcatggtggctcacgcctgtagtcccagcactttgggaggctgaggtgggcagatcacttgaggacaggagttcgagaccagcctggccaacatgatgaaaccctgtctctactaaaaatacaaaaactagctgggtggaatggtgggtgcctgtaatcccagctaattgggaggctgagacagaagaatcgcctgaacctgggaggtggaggg

SEQ ID NO: 147 - DNA, 4001 bp, Homo sapiens
ttccacaccgcctccctcaacttaatacccaccactgtcaaaacaactcccctcacgttgtacccaggctatttacagagacaccttgattatcctcacgccaaggcatggaccatttattgaacaggcagtcaacaaatatttgttgaatgaatgaaaaaggatccttcctcccacagatttcaagttaagctgtcagcacccatgcagctgctctggtacaagttaagctgtgaaagccttctctccctcacacatacaacctcaagtgtcagaaatgctctgcttcctccataaatccaaaataatatagtcatggatatgcatttcatacaggtcagactcggcaaggacagctacgttccacatacatatctgacacaatcggtctcccccaaatacaagccaaccagtcttatgtgctcctatctttccagcatactcagatttgccgacaaagacttcctgaggcaccatggtatgctgaatatactgctgcagtagtagtgaaaatatgggagttacagttccaactttgtcaccaatttaacatgcggccttggagaagttctctccttatgcctaaatttcctattttgtaaaatggaagaaagcatcctaccattttcacagagattcagtatcacaaaaaaactgaaagagctttcttattgtattgtaaactattactataaacccgcgacaacaaataaggccacccattctttacaactttgtagtaatgattctgttaaagatattttggcccttcacatttacacaactcactctaaccaaaggcacaaactattcttaagaccacaactggctatgccaagtttctcccctccctgacctcacagacacatgctgtacagaacactaccattgccgctctttcccaacaagtaactaggggctcccaatccctaaaatacacacacatatcaacctgcaaggaacctcccaacatttattcaagaaataagctaacttataaggggaactccattacacttacacaaataaaggcaaactcttacggaaacacttgccatcctcacatacacacaccaacacagccgctacacaccaacagaccatctgtctgctagaccaaaaacatctctttccatgtacaaactaaccagtgacatttattaaacttacaacactgagatcatcctgtcgttcccacataccgttcaacgcggcagggacaccacagaccttgtcacacaggtaaaatcccctctcaagatcgtgtcctcgaccactcttatcccttaattaaacacacacaaactggactatgggggaggctccgatcatgcctacaaacacaaactaacctgtcaggggcacagccgactccgcctccactcgcttacttcccagccccctccgggagtctgcctgtcagggacaccccttcaccccgcctggagggacttcccggtaggctcaggatccccctccctgctctcccctcccccatcttcaccactgctctctcagagatccaggtccgggagatgacagtggctcccagaaagcccaggattcaatcgctgagagagtgcttaggcccgaatgccggcccaaatcgttctactcaccgtgtcggaggccgaggccgaggccgagagcgatgagagtgcagggaagtggggaagagggggtggccgccaggctcctccgcttccctgggtccacggcggatccctcccgcttgtcaggaggcggccagcgggtaagctgactggcggaaatgcgagagaggagaagggaaaggtggaaggctaaagggggcaaactgaggggaggcgggtcccgcaaccgagactgggatcgtctcccctccgcaaagcgaacccaaaatggcggcgggagcggcggcggcggcggcggcagcagcagagtggcggcggtggcggcggcagctcctccagagggagggagcgaagggcgcctagcgcccccctcaaccttccactccttcctccttgcgttctttcccaccgtcccccgctccgcccgactccgtccgcgtagcgcgcacgcccgcccgcacgcgtacgagtgtctacgggctcgtcgctggctgctcccaccaaccaccaccttcggccgccccgcgcgccagccagcccgtacgcgctcacccacaggaaccccctcgtccagtccctcactacccctcaggccctgtcaagccggcgccggcgcaggccctcacgcgtaccttcaacggcgcaagcccaagcctcctcctcctcctcctccacctcctcttctctcctccccccccttccccgcccccacggccaccaaccgccgccacggccgccgccgccgccgccagccccccctaccaccctccacccctcgcgcgtgcgcctcccacaatcccccccgcgggactgttccattcctgtcggctgcaggggcaggagaggaagggacgggccgagcgggtcggggcttgccgtttgactggaattgccagaatggcggaccgagccccacgacaacctacctccctgggctcctcgccgcagcgctgcggctcgcctccctctgctcctcctcctccgccggatcgcggcgagcggatcgaggactgcctagcgcccctctgcccaccggtggttggaggccgcggcggctgcgcgttgagtcgtttcctgccggttgacctgagcctacttcgcagtagcaggaccgctgctgtggagctggtcgcaggcggtgtgtgccggtcgcctagtcaggagaactagtcctcgactcacggtgagggaatggaccgacacgggtattgtaccgctgagggaaaggagcgggactccggacctccaggaggtagggagtgaggccagtaggaccggcgcgcctccggggggattcctcccgggcgttgagttgccaacctgggacccgaggaagatcggcgtggtggtgtgctttttgttgttgttaaccctcctcggatttctcgaatttcacaccactgtccatatgcgatgatgtttgtttgcccttgacgcacttactcatggatggtacttcttcagcctcgttagacagcctggtgatggaggatgaagaaaccatgtgcttttcattcagttctggacttagtctcccttttcttccttcagcaagttatttttgttagttccttatcaaaaagtgtacataaaaattaggcaactccaaacatgcctccagggttaatgtgtgaaataataagataatatatgtaaagtggaattagctcctaggcatagggaaagtgcagaatattgccgtgttgtcatttacagttctgttgatgtcgataacgtttgtgggtgtaattggtagtgttctgtccctccaaggagttaataaaacaaagcaaacataggcctgttaggtttctgtggctactgaatatttgtttctcaaaacacttgactgatatttgataattgaatgcagcagaaatacggacgattaaagtccacaaataattccaaagtttacttgatctagtagtttttacctttacctaaagggtaaagcagaataaattaccggaaggatctacttgggtttccctttccttcacatttgtggactcctggggatccaggaagtaattcagaaatgactgttcaaaagcccatgcaaggccgggcgcggtggctaacgcttgtaatcccagcgctttgggaggccaaggtgggcggatgacctgaggtcaggagttcgagaccagcctggccaacatggcaaaatcccgtctctactaaaaatacaaaaattagccaggcgtggtggtggacgcctgtaatcccagctactcaggagactgaggcaggagaatcgcttgaacctgggaggcggagattgcagtgagccgagatggtgccattgcactccagcctgggcaacaagagcgaaactccatctgagggaaaaaaataaaaataaaaagcccttgcaacctccaa

SEQ ID NO: 148 - DNA, 4001 bp, Homo sapiens
tcacgcaggtacctattagaacccaggcagtctaatgccagagtttggactttaacatctacaccccacaccctggcaggtagacagaatctgccaaatttaaacgctgacatgacaaaacaaattttgtttttcaggagaaacagacaagtttctgttttaaaggagaaataatataacatcataaacaactaattttaaaaaataagaatggtgcatttttactctataaaatagtttattctaaaaataccacaaaatttagttccacattataacaaaaaagagtaagttgaagtattatgtggatagaaaagaaatctgtctttccaaagaaaggaaagcaggcagtgattcatgaaacagaggggcggggtgggtaggttctgaagtgtagatagatgaaccattggtgacacacaagttaagggacctcagattagaatctcttttttctgcctaatgaagtggttattagcctactagttcagacctcctcggctaacggttttcatacttttggtgattctactcaatggaaaggtcacagcagtcaaaataaaaacataaattctccagtctttggtgaaggggattggagcattactcttgcaaatgcaatgcagtaaaagaaagctacaggagttcttgaaacaacatttataaaattaaatttgatgcagcattaaaattacacttaacagcaaagaaaaaaaggactaaaatactaaagtgtgcatacatactacacgtatatattgaaaacaactctgaataggtttttttggtttttattgtaggcatttagccagaacaaagctcactatttcaccggaaaaaaaaaccagttacctcgactctaagggtacatatggaaactaaaatgcatattaagatggctgatagaaattttaaaaaaagctgctttaaccaaccaaggtactcctgtcaatcttaaaaaagtgttaaaaaagtgcattgtctattaatttagaacggcaaggctatttcacaacgccttaagtctagtaaaagtgcttgtcaatttaacagagaagtctatataacttgctcctaaagatgctaagtgcgcgcgcgtttatgtgttgtccccgcccaagttagcgtctatcctagccttcaattagagaatatatatatatatatatatataatattgacacatatatatatactcacacacatgtgtatgcgtcaagggcccacccacagttattgaaaaggaactgacttcactctctaagggtcttttctgatttcttttccaagagccacccacagttattgagtgaaagggaactgactttattctctaagggtcttttctgatttcttctccaatcgtcaaccttcctgaggagggtggcaggaaagatagcggagaagcagaacaccggcctggagcacgctcctcctgagacctacctgcaacacgaaacagcgctgcgacacactgaagcccaggtccgcggccgggaagtgggagatcttcacttctgccacctcctcgttagggttgtctagggccagagacagcgtccgtgaggctcccaggagaacgtccccgaagcaaaggaaaggagacctgcagaagtggctgagagacaggaccggcggggaagacgcctcctcctcggccgcggggccccgcagccccgcgggcggcctccgctcggtcgggctcacttcccagcagcctcgccccactcgccggttcgccatggcagattcgagacccctcctggatctccttgccccgctcccacgaggcggctccggagcggggatccgggacttacgctgaccgcttcccctcaggggcggctgtagaggtcgtgggagtgaattcggccctttttcttttccactaacctactccctagaaaacagaaaacaagcccaataaactcgcaaattaaaaagaggagccaaacaagtatggcgttttgactctgtttaaacttgccgcctccaccaatgaggacctccgggcaccgccctcctcgtcacgggaccaatcggtgagcagcatcccctggccaatgagacggcggcgcttcatttgaatgattgcatccggccgccaatcgctatctgcggaggaggtgagaacggtagcggaatcctggccaccgtctaaaacccggggcttagaattgaaattcgtctttatatttttggttgtgctgaagggaagggagtcacagcatttccacaatacatgtagtaatcattgcggtttccaggaacaatcatagataaaactgttacgtaggcaaaaattggtttatgccactcctctcatatgcataccccgcccagaattatattaactttactgtcgcggtttccagggctgaatggtagagatgtaaagataattagtttgtatgaacatgcttattttagtgacaacatagcagggactcagtacatttacatgctgttaattacctcgggacgctgggagcaaaaccaggtaaacaaatgaaacctgagattaccagtaattcataaatgattgttttgactggcaatgcccttcacaaatatcttattagtttttatttcaattgtagggatctaataataattatagcttacatattagggattttttaaattatttatttattttgagatggagtctcgctctgtctcccaggctggagtgcagtgacgtgatcttggttcactgcaacctccgcctcccgggttcaagcgattctcctgcctcagcctcccaagtagctggaattagaggcgcgcctcaccacgactggctaatttttgtatttttggtagagaggggagttcgccatgttggccaggctggtctggaactcctggcctcaagtgatccgcctgcctccgcctcggcctcccaaagtgctgggattacaggcctgagcggcgcccgaccctaggctagggattttttaaaaatcctttacctatttatctcaacctttgccttaaacctacgaggtatctcttagggcgtaggtaccattatttgtatcttacagatgaggaatacaggtcatacagctaagtaggaagtggcataacccagataggtacacatgcctgtaatcccagcagtttggccctagtcttgctcttacccactacactatattgcctctaaaggcagtagaaaacttaaaaaataaaaataatgtctggatgtatgtatggttacacaaaacatgtaaaaagagaagtcaatgggaaatcaaaataaggaagatgagacatgaaattatattcaatggtgtccaatttcacctgaagttggaccttaacaatatttaaacgaaatttttccactgggcacggtggctcaagcctgtaacccagcactttgggaggctgaggcaggcggattcttgaggtcaggggtttgagaccagcctggccaacatggcgaaatgccgtctccactaaaaataaaaaaattagccaggcgtggtggagcatgcctgtaatcccacctaccccggaggctgagacagaagaatcgcttgaacctggggtggggggtgggggcaaggttgcagtgagccgagatcatggcactgaactccagcttgggcaagagagcaagacgctgtcaaaaaaaaaaaaaaaaaaaaaaaaaattctttcatagaggcttaaaaaaaaaaacaacaaaacaaaaccctggagcagagcctcacaagtcatttccagttctcctcagcatctaccccccacgacctctccattagcttagttaggctccaaaaaataaaacttggacggaggagagtgcaagatatgctgtgggagggaggaaacagcctatacagcaaagagttaaaagattttgacagtctaaggtggaatgtaatggtgttagaccaagaggacaaatcataaggaacaataaggccaaatttattgtcatgggtgcactttacccatttaattaatacaatgtccgaagtacctgg

SEQ ID NO: 149 - DNA, 4001 bp, Homo sapiens
gcaaaaataaataatcctatcaagagcataggttgggtttaatgggttcaactgagctgcactccgggaactataaagcaacttttcaaagggccaggcaatttttgaaattgcttttccctaagggttggggagtaggggtttattcactcacttcctagtgttttcagtgtgaagacatctcctatgaaggaagagcaagagggatgtgttagaattccacatgtggctctagcctacatgtggccatcaggaaaccatgtttctgcaaatggaactgtagttggtagggtatcaagtaaatggaacagcctcctagacattttctttttttctctacttggatctagagactgaagtgtggttttctttgaatttctcctgggcaaaataagaataattggcaacatcactaaagaaatggattgcatggtaggcatgcacagcaaggtgagagctccatctacacatggagaagtgaggggaatttggcaaagtaacatgaacttgtggtgctttgcaagatactagagcaggaccacaaaacctttgcagcttagtagtggaaaacagggatgatttgaagtaatgtatgggttccagtacctgaagtgacaggagttccactacctgaaggtgacctaagaaaattacagtgggagtaccaaaaagagagagatgtaaacaaacaaaggaaggaagagccccttgcctagaaaggtcattctgtgtgcaggaatgcctacgcctatctaaggtggccctgggaacaaagaagagaccaatactaacagactacagttgtataatatctttaaccaactgtgacgtgacatggatgtgtggatgtggttgaattagggggttgtgacatctaagcatggaggtaggacttcccagaatgaacagctgggggataagaaacttgagtgtttggaagggagggtgtcagtagcctggtgacagataaagggctctccatgaatgaagactagaatctggcttgcacatagctggcaaggtgatgacaggatacctgtttctaaagcccccaggaagtgctgtaggtgggtgtgggtatccagagtgagtgaagcaaagagctgagcatgtggctagggagtggggagaagggattatgggagttgaactggtagcagacaaaaagtgctgtgtggatgtgctcctgaatcaaagctgggaggtcaaggctgggagaggtttcagagagactcatgcaacctgtttctttgaggcagggcagctgagaggaggctcagcatccaggtcggatttggggagaagtcaggtgcacagaggcgctagtatgcaagtgggtgtggagaatggtccgggagtggggcggatccgggaggtaggagtgggggaggggaggtcgtcggcgagtgggtgtgtagagcgagctggagtggggggtgggggcgccggtccagcgcctccggccgcctcgacctcccccgggactcacccagcacgaagtagggcagctccgtgttctccaggtcgtccaccacgaccatttctcccgggaagtcgttgcgcaccgagaagaggagcttgggctccgaggccgaggggctgtgcatgatgctcaggtcgttctcgcgcaggaagggcagtgccgacaccgtgatgcttttgagcttgcactccagctccttggatggatccacgtcgccggcggccgtggccagcaccgccgccggcccccagcagcaggcgagcagggcgcagagcccggctaaagccatcttgagccccggccgccttcctcctagcgctgcgatggtgggggaggaagcgagcggggagggagcgagggagcgagcgcgggaggcgggggaggttagggaggggatggagagccgggagagccctggaccccggaatgagatgccgcttgcagagtcctgggtttaagctctgatgtctggagagccccggattctttgtttcccggagctgcttatctggagaagggaaagcgggggaggggggagaggagaaaaagggaaggaaggacgtcgaaaggaaagaggaagggagctgaggattctagggaatcaggtcagcccccagctggctgccggtgctcctgcctctctcctccgttgcatcctccaacacgagcaaggctcttggctatgaactacctgcacggcatttttaatacattgatctttgcaatgtaaaatcttccctctcgcatcatcatccagaaggcttgagagaggcacacacagacatacaccttaaagggcgcttctgcaaagctgcgcggtgaggggagatgaaaattcccccagtggttttgtggatgtattatagcttgtccgaatcttgcttccaccccgccccgtcccccactagttggatttgtacataggataaacgggagctgggaatgcacatgtgcatatttttacttagcactaactttgcaaaatatttaaagaaaatatttgttatactggtttagatggatggatagatatgcacaacagagtaaggtgcacagttaagcaggagatcgaaacttttactcgcaacttctctctgcttcatttcatttctatcacaaattttatctgtagtaaccaataaaaagatgatttggggaatattatagctgatagaaaaaaagtagggttagctcaaataaatcttgaaactttaattttagacaatctagtaaataggacaaagctggaaagaaattgtgagaaaaaccaaagttcctaagcattcttaacagatggaaaagtaataaaagaatatccttgggtatgagctaagtcaatcccaatccagtcaagagtacaacagggaagatgttcagcaccctgcgtaagtattctgaagaataacaccaccaccaccaccaccaaaacccatgtaagatctgttcccagtagtgctcaacaatgttgccttttaaaaatgatgacaatatgcaataaacagtggtagaaaagtgacattgtgtattctgaaatctgacatttaactgaactttctctcacatgataaccaataacttatttcaaaagtgtgtccctccattgttattgggtcaatgctaacttcaatactaggtgctgtgaagactgtgttatttgtagttctcactctagaaatttaatgcactactgttctaaaagaggacccctacttaagaaacaattacattttcattctacctggtgtcagtttattggcatatgtgaaaatatgttctttaaaagacaaaaaagcttttgccatatattttacaaagtttatctaattgaatagagaaaataagccatatttaaggtaatgtttaagtagtgaaagatcatttaccacatatgcaaagaaaagaagaacaaagacactttattagttgagtttttatatgtaacttatctgggaattaaccccaagttatcttaccatgcagcattgcaaactactgtaaactactgtaaaaaagatgtaccagctaacgacttttgaaaactcatcctgatcgtcattgctcccctaagagatactgagtgagacaaaaaccccatgatatctctttcattctgttatccctagcataaacaaaaatctagtattaaacttacttatgcaaggttatttgccattgaataattatagtggatgtcaggaacacacccttgatactagaatgtgagaaatggcatgtaagtacctgatcatgtattcatccaatctctcacttaacagataaggaaattgagacccattaaagagtgatctatcttctatggagctaagaccatgaacaagatttctttgcccactgctctttccactatatggttatggtacactagggtgcacccatggataatcactgggctttatggaccacagtaattaattcagcaaatgtttgtgtacctactgtatcataagcattaggctaagcacagccagaaaaatactactcctgcttttgagtagca

SEQ ID NO: 150 - DNA, 4001 bp, Homo sapiens
gtagctaacctcgggggccccagtgaacagagcacagatgagaccgggacctgcctctcagggaagacagtgccaggtcaacgggtttggctgctaagctcgggaagccaagggctgaagcgaccccgggctctcaaccactctcactctgaccccgaggggactgagggtgtgtcagtcacccagggtcctgccacagagcagtgacaggaacgtgggtgtcacggtgaggagctctgcctgtttcctcccgaggggacctttggctggattaagctgaggccactccctcccctgaaaatggctcattgacagttcctacccccagtgactctggggaggaggagaggggaaagagcaggtcaggtgcccgtgtggcctctcggttattagagtgagaacaatcattcaccactttggtgtgaccctgtgccagggacgtgcgtcccagcgcgtgaattcacacccacagggcacgaggctctcctccaggcaccccctctgtggagtgcagggcgagcgctggtgctcacagacagttctgggataatgtactgctgtgacttccaaggacaggccggaggaggggtcagggcactctgggaaccaggcggcatggggctatagcctcaagggacagaggaggcagtcggtgaggaggagccgcccgtttgcctggagagcagcaaggacaaagcaatgggctccggccgaatctcggcgacccgctgccaggaaaggggcacggaggaagccaggagcgtcgggaggggccgggcttgcagaggggctaccaggcagaggggcagggcagggggcacccggggaaagggggcagtcaactctggagaaacctctctcacctgccagcagtgaggccaggaaggagggaagggatcagaatgaaagagcccacacctggaacacaatccacaggaaacaaaagcctgatggagggctccccacggtgcacctggagaccctgccccgggccccgctccaccacagagagggcagaccaaggcactggcaacgccggcagagcggactgcgggtcaggagctccggggccgccaggactggagcaactcagaggcacaggtctgcactatggggaggcggcctgaggctgctcaaccaggcctgtaccactgcagggggccgcaggctgatcactacgattcagcttctggaagtgggagaagtttcaatctctaagtgaagttagcgggtgaaaacccccaggaactaggacacaaaggaaccctccaaataagcctgcagcaagaaagtcagtcaccaacatccgctgtcctccgaggtgccctgaagtccagcccttgattcccatcctaacctgatggttaaaattaccgaggaaggccatgagcagcggctcacgcctgtcatcccagcgctttgggaggccgaggtgggcgaatcacctgaggccagaattcaagaccagcctgaacaacatggtgagtgctcacaccctgagggccttgggtcaggggtttactcaagctgagcagcacggcctggcctgtggcttcacagacctcgccgtgcaaatgctaacgtcttccaacaagaagtgcaaatctgctagtctcgttagaatcaagtaactctcaaatacgcttcccttgttacgtggaaactgctagcaaccacccaacaaacccatctacccatctggccacgccttggcctgtgccacgtggaggcggcaagcgcagaaggatcccgcacgctcggcggtaactgaagaccacggccagccccagaccctgacccctgtaacctatgagcgccacctccgcaccgctttccgcacctgacccgctcctgacagctgcagaggtgcaaacgggtgacggaaagagtccgatcctcccggcacgcgacacggctccggccgggggtgctccgggggcgcagtctcgcccgggaagtggctgccgacagcggcgaggagcggcaagggccagggctcccgcttccccggcccgtcccgcccgcccgcccgcgccgccccgccccgccgcactcacgcgagtgctccagctcgcgcgccgccttggcggcgcgctccaggccggtggggtcgaagttgctccatttgtccttgggcgccggccggtctcccaacccgcggtccccgccgccctcggccccgggctgcgcgggcggcaaaggcggcggcggccccgcgccttcacccttggggcccttgttaatgccgaagagccacgacatgctcgcaccgccgccgccgctaccgccgccgggacccccacccgagtctgactcgcgcgcggctgggagcagcctccacgcgccgcgagccggtggtcaccgccactgcgcaggcgccacacacaccccttcctcccggcgatagaagcgcgtaagggacacgcgcgcagcccttggattggccccgaggacagtgacgccatagcgacggcgccgcgactgccgaacaggctttgggagccagcggggcgggagcggcgaagcatctggctacgggagccacgccgggacaaaattcccgagggacgtaggcgaacccaaggcagcgtcagccccgcgccgcatccgcgtgggctccgttgctaggggctccgttgctaggggctccgaggagttccggccttggcggcagcgggtggcaagtttccagggagccccaaggttctcgatccgtgcggcggggcgccctgcggtgagtccaggacgcagagaagagtctcgcgggaacctcacccgaggcggcaccggcgcccgggcaagccgagcccttccgcgatgagtcggcgccctggggtcgctgcgccaagagctcaggagaggcgcctcccctcctcggtgtctccgcagcccgcacggccctcccgcccaagaccccggggcgaccccttcccgcgtggcggggccagcgagctcctcttgcggggcgtggacggggccggggtgcccgggcaggcgccgccccggagcccacggtccacgcgctcccagcggccctgactttctccttgatggaactggttgacttcacggaatatatggagtgacttttcccactggattggaaactgttttaagcctgaataatgttagatacaatgagttctaaacttcccttcaaagaatcagtatatcagtatgttcagtctttgtcctgcattttaaagtctaccttcctcgcagtttcagtaaacaaccttttccaccagttctagtcagtagttgacatctgttgccctggtcacctgctccgtcctaactaatcccggtctcctgctttgacctgagtcacctttagttacctgtcccataaccatttttcccgccaaaccactcaccccgccactctggcccatactcctgctccctttaaaatagccaatgggcactagtttagactgtgcattctaaccctagccaataggggaaccacacagcagtaggggctacccgcgtcaggaataagaaccccttcccctcccttgtccaagcgctcgccattgctccatctatgagatgtccccttctatagaagtaaattatctagctgagaaaaatttatattcgagttctacttctttggcggcacagaaaatttacatataacacagtgagctgccgagatctcgtcactgcactccagtctgggcgactgagtcagactctgtcaaaaaaaaaaaaaaaagccagaaaatgccggccaggcgcggtggctcacacccgtaatcccagcactttgggaggccgaggtgggcagatcacctgaaaacaggagtttgagaccagccgggccaacatggtgaaacccctgtcaaaaatacaaaaattaacctgggcatggtggcgtgcgcctgtaatcccagctactccggaggcttaggcgggaaaactgcttgaaccctggaggtggaggttgaagtgagccgagatcaggccactgcactccaccctgggcgagcacg

SEQ ID NO: 151 - DNA, 4001 bp, Homo sapiens
tattagagtgagaacaatcattcaccactttggtgtgaccctgtgccagggacgtgcgtcccagcgcgtgaattcacacccacagggcacgaggctctcctccaggcaccccctctgtggagtgcagggcgagcgctggtgctcacagacagttctgggataatgtactgctgtgacttccaaggacaggccggaggaggggtcagggcactctgggaaccaggcggcatggggctatagcctcaagggacagaggaggcagtcggtgaggaggagccgcccgtttgcctggagagcagcaaggacaaagcaatgggctccggccgaatctcggcgacccgctgccaggaaaggggcacggaggaagccaggagcgtcgggaggggccgggcttgcagaggggctaccaggcagaggggcagggcagggggcacccggggaaagggggcagtcaactctggagaaacctctctcacctgccagcagtgaggccaggaaggagggaagggatcagaatgaaagagcccacacctggaacacaatccacaggaaacaaaagcctgatggagggctccccacggtgcacctggagaccctgccccgggccccgctccaccacagagagggcagaccaaggcactggcaacgccggcagagcggactgcgggtcaggagctccggggccgccaggactggagcaactcagaggcacaggtctgcactatggggaggcggcctgaggctgctcaaccaggcctgtaccactgcagggggccgcaggctgatcactacgattcagcttctggaagtgggagaagtttcaatctctaagtgaagttagcgggtgaaaacccccaggaactaggacacaaaggaaccctccaaataagcctgcagcaagaaagtcagtcaccaacatccgctgtcctccgaggtgccctgaagtccagcccttgattcccatcctaacctgatggttaaaattaccgaggaaggccatgagcagcggctcacgcctgtcatcccagcgctttgggaggccgaggtgggcgaatcacctgaggccagaattcaagaccagcctgaacaacatggtgagtgctcacaccctgagggccttgggtcaggggtttactcaagctgagcagcacggcctggcctgtggcttcacagacctcgccgtgcaaatgctaacgtcttccaacaagaagtgcaaatctgctagtctcgttagaatcaagtaactctcaaatacgcttcccttgttacgtggaaactgctagcaaccacccaacaaacccatctacccatctggccacgccttggcctgtgccacgtggaggcggcaagcgcagaaggatcccgcacgctcggcggtaactgaagaccacggccagccccagaccctgacccctgtaacctatgagcgccacctccgcaccgctttccgcacctgacccgctcctgacagctgcagaggtgcaaacgggtgacggaaagagtccgatcctcccggcacgcgacacggctccggccgggggtgctccgggggcgcagtctcgcccgggaagtggctgccgacagcggcgaggagcggcaagggccagggctcccgcttccccggcccgtcccgcccgcccgcccgcgccgccccgccccgccgcactcacgcgagtgctccagctcgcgcgccgccttggcggcgcgctccaggccggtggggtcgaagttgctccatttgtccttgggcgccggccggtctcccaacccgcggtccccgccgccctcggccccgggctgcgcgggcggcaaaggcggcggcggccccgcgccttcacccttggggcccttgttaatgccgaagagccacgacatgctcgcaccgccgccgccgctaccgccgccgggacccccacccgagtctgactcgcgcgcggctgggagcagcctccacgcgccgcgagccggtggtcaccgccactgcgcaggcgccacacacaccccttcctcccggcgatagaagcgcgtaagggacacgcgcgcagcccttggattggccccgaggacagtgacgccatagcgacggcgccgcgactgccgaacaggctttgggagccagcggggcgggagcggcgaagcatctggctacgggagccacgccgggacaaaattcccgagggacgtaggcgaacccaaggcagcgtcagccccgcgccgcatccgcgtgggctccgttgctaggggctccgttgctaggggctccgaggagttccggccttggcggcagcgggtggcaagtttccagggagccccaaggttctcgatccgtgcggcggggcgccctgcggtgagtccaggacgcagagaagagtctcgcgggaacctcacccgaggcggcaccggcgcccgggcaagccgagcccttccgcgatgagtcggcgccctggggtcgctgcgccaagagctcaggagaggcgcctcccctcctcggtgtctccgcagcccgcacggccctcccgcccaagaccccggggcgaccccttcccgcgtggcggggccagcgagctcctcttgcggggcgtggacggggccggggtgcccgggcaggcgccgccccggagcccacggtccacgcgctcccagcggccctgactttctccttgatggaactggttgacttcacggaatatatggagtgacttttcccactggattggaaactgttttaagcctgaataatgttagatacaatgagttctaaacttcccttcaaagaatcagtatatcagtatgttcagtctttgtcctgcattttaaagtctaccttcctcgcagtttcagtaaacaaccttttccaccagttctagtcagtagttgacatctgttgccctggtcacctgctccgtcctaactaatcccggtctcctgctttgacctgagtcacctttagttacctgtcccataaccatttttcccgccaaaccactcaccccgccactctggcccatactcctgctccctttaaaatagccaatgggcactagtttagactgtgcattctaaccctagccaataggggaaccacacagcagtaggggctacccgcgtcaggaataagaaccccttcccctcccttgtccaagcgctcgccattgctccatctatgagatgtccccttctatagaagtaaattatctagctgagaaaaatttatattcgagttctacttctttggcggcacagaaaatttacatataacacagtgagctgccgagatctcgtcactgcactccagtctgggcgactgagtcagactctgtcaaaaaaaaaaaaaaaagccagaaaatgccggccaggcgcggtggctcacacccgtaatcccagcactttgggaggccgaggtgggcagatcacctgaaaacaggagtttgagaccagccgggccaacatggtgaaacccctgtcaaaaatacaaaaattaacctgggcatggtggcgtgcgcctgtaatcccagctactccggaggcttaggcgggaaaactgcttgaaccctggaggtggaggttgaagtgagccgagatcaggccactgcactccaccctgggcgagcacgactccatcgccaaaaaaaaaagaaaagaaaaaaaaaagaaaaagaaaacagggcaggcgcggtggctcacgcctgtaaccccgccagtttgggaggccgaggcaggaggattgcttgagcccaggagttggagaccagcctgggcaacaaagagagaccccgtctgtaccaaaaaaataggagaggaggagaaaaaccaaatgacttccccagcaatagccagacgtccccccacccccaccccatggctgtaatcaaggttttggttatttatttattgagagggtctcactctgtcacccaggctggagtgcaatggtgcgatctcagctcactgcaacctctgcctcccatgctcaggcgatcctcctacctcagcctccaagc

SEQ ID NO: 152 - DNA, 4001 bp, Homo sapiens
cggtggctcaggactgtaatctcatcactttgggaggtcgaggcgggtggatcacggggtcaggtggtcaagaccaccctggccaaggtggtgaaaccacgtctctactaaaaatacaaaaattagctgggcgtggtggcgcgtgcctgtaatcccagctacttgggaggctgaggcagcagaattctttgaaccagggcgttgcggtttgcagtgagacaagatggcgccattgcactccagcctggccaaagagcaagacatcatcttaaaaaaaaaaaggtggcatgcggtggctcacgcctgtaatcccagcactttgggaggccgaggcgggtggaccacgaggtcaggagatcgagaccaccctggctaatacagtgaaaccccgtctctactaaaaatacaaaaaattaatcacgaggtcaggagatcgagaccatcctggctaacacggtgaaaccccatctctacaaaattagccgggcgtggtggcgggcgcctgtactcccagctattcgggaggctgaggcaggagaatggtgtgaacacgggaggcggagcttgcagtgagtggagatcacgtcactgcactccagcctgggcgacagagcgagactcatctcaaaaaaaaaaaaaaaaaaaaaaaaggaatcccttctgtctgggcgctgtggctcaggcctgtaatcccaacacttcaggaggacaaggcgggcggatcacgaggtcaggagttggagagcaccctggccaacatggtgaaacccgtctctactaaagatacaaaaaaaattagccgggcgtggtgctgcgcggctgtaatcccagctactcgagaggctgcggcaggagaatcggaggcggaggttgcagggagccgaaatcgcaccactgcactccagcctcggcgacagggcgatactgtgtctcaatatataaataaatagaaagaaccccggcttaaacaagagttgagaaccactgtattctttcaatgaattcagcaccttctacgttccagactcctagccatttgaactgcatcgtgctacaaatcgttaaagccacaggggaaaggaaggctgggggaagagacccgagcttagggaaggtgcagtcagtgctcacaccctgagggccttgggtcaggggtttactcaagctgagcagcacggcctggcctgtggcttcacagacctcgccgtgcaaatgctaacgtcttccaacaagaagtgcaaatctgctagtctcgttagaatcaagtaactctcaaatacgcttcccttgttacgtggaaactgctagcaaccacccaacaaacccatctacccatctggccacgccttggcctgtgccacgtggaggcggcaagcgcagaaggatcccgcacgctcggcggtaactgaagaccacggccagccccagaccctgacccctgtaacctatgagcgccacctccgcaccgcttttcgcacctgacccgctcctgacagctgcagaggtgcaaacgggtgacggaaagagtccgatcctcccggcacgcgagacggctccggccgggggtgctccgggggcgcagtctcgcccgggaagtggctgccgacagcagcgaggagcggcaagggccagggctcccgcttccccggcccgtcccgcccgcccgcccgccccgccccgccccgccgcactcacgcgagtgctccagctcgcgcgccgccttggcggcgcgctccaggccggtggggtcgaagttgctccatttgtccttgggcgccggccggtctcccaaaccgcggtccccgccgccctcggccccgggctgcgcgggcggcaaaggcggcggcggccccgcgccttcacccttggggcccttgttaacgccgaagagccacgacatgctcgcaccgccgccgccgctaccgccgccgggacccccacccgagtctgactcgggcgcggctgggagcagcctccacgcgccgcgagccggtggccaggaccactgcgcaggcgaaacacacaccccttcctcccggcgacggaaatgcgtaagggacacgcgcgcagcccttggattggccgcgagggcagtgacgccatagcgacggcgccgcaatttaggagcgtgctccggggcggcgggaaccggggtgagcgggcggagggcggggggcgtggtgaagcgtctgggtaccggagccgcaccgggacaaaactccggaggggagtactcgaacccggcgcaacgtcagtcccggcccgcagccgcgtcggcaccaccccggagcccacggttcacgcgctcgcggcggccccgactctctccttgataggaatggttgacttcacagaattatatggagtgactcgtcccactggattggaaactattttaagcctgaataatgttatatacaatgaattctaaatttcccttcaaagaaccggtatgtcagtatgttcagtctttgttctgcattttaaagtctaacttcctcgcagttgcaataaacaactttttccaccagttctaatcagtagttcatgtcatgtgcgtccatgtaaagagtccaccaaacaggttttgtgtgagcagtaaggctgtttatttcacctgggtgcaggcgggctgagtcccaagagtcgacgaagggagataggggtggggccgttttctaggatttgggtgggtaatggaaaatgacaaagggcgtttttctcttgcaggcaggggcgggggtcacaaggtgctcagttgggggagcttctgagccaggaagttaaggtggggcaagaacaaatcacaatggtggaatgccatcacctaaggcaggaaccagccattttcacttattttgtgattcttcacttgcttcaggccatctggacgtatacgtgcaggcttgggctcagaggactgacagttcacatctgttcccctggtcatctgctttgacctgagtcacctttagttacccgtcccataactgtttttcctgccaaaccactcaccccgccactctggcccatactcctgctctctttaaagccaatgggcattactttagactgcggtctaaccctagccaataggggaaccacacagcagtaggggctacccgcgtcaggaataagaaccccttcccctcccttgtccaagcgcttgccattgctccatctatgagacccccccttctatagaagtaaattatctagctgagaaaactttatattcgagttctacttctttggtggcacagaaaatttacatataacacagctgcagagatctcatcactgcactccagtctgggcgacagtgagactctgtctcaaaaaaaaaaaaaaaaaaaaaagccagaaaatgccagccaggcacaatggctcacacccataatcccagcactttgggaggccgaggtgggcagatcacctgaaaacaggagtttgagaccagcctggccaacatggtgaaacccccgtctctgccaaaaatacaaaaattaacctgggcatggtggcatgcgcctgtaatcccagctactccagacgtttaggcatgaaaattgcttgaaccctgtgtcatgtgcatctgtgtgaagagacaaccaaacaggctttgtgtgagcaacaaggctgtttatttcacctgggtgcaggcgggctgagttcaaaaagagagtcagcaaagggtggtgggattatcactagttcttacaggttttgggataggcggtggagttagggacaatgttttgcgggcaggggatggatctcacaaagtacattctcaagggtggggagaatgacaaagaaccttcttaagggtgggggagattgcaaagtacattgatcagctagggtggggcagaaacaaatcacaatggtggaatgtcatcagttaaggctcttttcacttattttgtggatcttcagttgcttcaggccatctggatgtataagtgcaggtcacaggagatatgatggcttagcttggg

SEQ ID NO: 153 - DNA, 4001 bp, Homo sapiens
gcaacacgtgaaccccgcctgtgagctcaggactgaaggtgaccggccgggcaccgtggctcacacctgtaatcccagcactttgggaggccgacgcaggtgatcacttgaggtcaggagttcaaaactagcctggccagcatggtgaaaccctgtctctaataaaaatacaaaaattagccgagtatggtggtgggtgcctgtaatcccagcgacttgggaggctgaggcaggagaatggcttgaacccaggaggcagaggttgcggtgagctgagatcgcaccattgcactccagcctgggcaacagagtgagactccgtttcaaaataaataaaattaaaaaatcttgctgagctggacgcggtggctcacgcctgtaatcccagcactttgggaggctgaggcaggcggagatcaggaaatcgacaccatcctggctgacacgctgaaaccccatctctactaaatatacaaaaaaaattagctgggcgtggtggcaggtgcctgtagtcccagctcctcaggaggctgaggcaggagaatggtgtgaacccgggaggtggagcttgcagtgagccaaggtcgcaccactgcactccagcctgggcgacagagcaagacaccatctcaaaaaaaaaaaaaatcctgctgagtcaaagaaatgaggtgagaatgtcaagaagatccaggccctcaggacgaccagacgccctcaccaacaccggccctccctctcgggcggctctgcggcagcgtctctcacctccccttgtttccttctgtgaaatgaggcgcccaagcttggccctgggccccactgctgcccatgtacacacccccggccctacccaccggcagtagccctaccaatctccacgcccgaaccccatgtgtgccccggcctccccgcccacaccggccccactcactttgagcttggactgttgctccaactgcagcgtctgctcctgcatctgcgccagattcagggcgtcctttgacatggcctgcagatgcagggacacggagggcaggtgttaggatacacggatgccgctgggcaggcacgcacaccagccaaggggctttctggaatccacggccacgcctcgacctcaaagcccccagccctgcctccccatcctccttcctagtcagacctggcgtgacgatgccccatccccagcacacggcctgatgcatttgtgaggttttatgccctccagggatggtcttggagagccacatcaggaaggccatcccatgtggacgggaggaggctctttcccaattcaacagaaagtcaggcgatggctaaagtgtccattttttcacgttacacatgctttttttttttttttttttgagacggagtctcattctggcccaggctggagtgcagtggcatgatctctgcttactgcaagctctacctctcgggttcacgtcactctcctgcctcagcctcccgagtagctgggactacaggcgaccgccaccacacccggctaatttttgtagttttagtagagacggtttcaccgtgttagccaggatggtctcgatctcctgacctcgtgatccgcccacctcagcctcccaaagtgctgggattacaggtgtgagccaccgcgcccggcacatacccttttcctaagcttccaatggctgttgtcagtgatctgctatcaagaacgtgcgggcaagaaaatgaaagaataagaattagatagcagccaacaagctcagggtgacgaggacaagcatctgacaacgtcctcagttacattttgttcctagtggggaaccgacacaggtcaatgtttgggtgacctgggacagaagtacgtattctctgagctgctgaggactcagcatcaggtctcaacattttccgggatgagttttcccatcacaaaattttaccataaaaatcttctggccgggcgcggtggcccattgagaaaatatgcaggaccttggggagttaatcatgaaggggattaaagaatccatgcccggaacccagaatcttacccgaatatttaacatacagcaaggaaaagataaagggcctgcgacataatttttagacagattaaaagaacaaatgagaaaatatgctggtcgaggtgtcgaggatcctcttgggcaaggaatttgtcactaacagttggccagatattaaccacaaattacaaaagaaagaactagaaaaataagcctgtagaagagattctaagagaaagggaaaaaaatcttagaggaaagagaaagactgacagaaggaacagagaaagtcagagagagagagagagtcagagagagagagagacagagtcagagagacagagtcaaagagagagaaagactgacagagggaacagaggaagtcagagagagagagagagtcaaagagagagagagacaggcagagacagagtcagagagagagacagagttagagagtgagacagagacagacagagagagacagagtcaaagagacagagagagccagagagagagagagacagagttagagagagagagaaaaggagagatagaagtagtcaagaaaaagcaatgtgccccattcttttaaaagccagagtacgcccggcgtggcagctcaccacgcctgtaatcccagcactttgggaggccgaggcgggcagttcaggaggtcaggagatcatcctggttaacatggtgaaaccctgtctctactaaaaatacaaaaaattagccgggtgcggtggtggatgcctgcaatcccagctatgcaggaggctgaggcaggagaattgcttgaacccaggaaagacagaggttgcagtgagccgacacagtgccactgcactccagcctcgacgacgaatgagactctgtctcaaaaaaaaaaaaaaaaacaacttaccgaaaggcatggaggccactgacaactatccttaatgtggtaacccacagacggccgtagtgcattacaggacgacacttatttaaagatagttcctcccaggtgattcgaggaaaaagacacaatgggtaatcagtaactaacaggaaaaactcttgtggaaatagagttaagaggccgggctctgtggctcacacctgtaatccctgcactctgggaggctgaggcgagtggatcacctgaggtcaggatcacctgaggtcaggagttcgacagcagcctggccaacatggtgaaaccccatctctactaaaaatacaaaaattagctggccgtagtggcaagcacctgtaatcccaactactcagcatgctgaggcaggagaatcgcttaaactcaggaggtggaggctgcaatgagccgagatcacgccattgtactccagcctgggtgacagagtaagacctccgtgtcaaaaaataaaaaataaaaaaatagagttaagaaagtttcctaataactggtctgctcaagcatgagagctgtttgcactcagccaagcctcaaagtacttacagaaccaggaaggaaccatctataccaattctaagtatgccttttaactgggcttttttttttttttttttttgagacagagtctcactctgtcgcccaggctggagtgcagtggcgctatctcggctcactgcaagctccgcctcccgggttcacgccattctcctgtctcagcctcccgaatagctgggactacaggtgcctgccaccacacctggctaattttttgtatttttagtagagacagggtttcaccatgttagccaggatggtctcgatctcctgacctcgtgatccactcgcctcggcctcccaaagtgctgggattacaggcatgagccactgcgcccggcctgaagtggcttatacattaaaaaatatatatattagactgaatgaagtcttattaatagcaaaggataattaaaatcccaaactcgcaaggttttcagcaaaagtaaagtttgctataagttatcatcgtaggccaggtgcagtggctc

SEQ ID NO: 154 - DNA, 4001 bp, Homo sapiens
actctctctaacaccctgcattactcatagtttgaaaatcactttgacttctgaaacataattatgttaatgtcagatgagtcagcagggggacagcatgctgctcctacggcagctgcacctcctgccaacctctgaacgtctcagtgcctggggcttcaaaaaaaaaaagaaaaaagagagaaagaaagaaaaagaaaacccctttctgtgggcgggaagagaaattatatttatggctcaaagaacagcttcaaagaagtggccaatttcgctttcgctgcaacatgaaaggaagagttaagtaaaatcgctacccctaggttaatctgtttatgtgaagaataaacaggaatttggagactttctctagggaatctgtgactttccctcagagatggctcgagacaggtcactctggtcactgttcagttgtgatccattactcgccgtacgaggttttactttcccaggaagtgatgccaagcagtgcaggaggtgcatcctcttgggcaccaataggaaccaggaggctgctcaattttcaggggtccccagaccctggatgggcttcccagcgcgtgctttgctccagcagcatgaccccctcagacacttttgtgagctgttttcagcgtcatttataacctctcaactgtttccccttcctcggctgctgggaaaggaacaggaactgagcaggacagggcaggaggtttctatggcacagctgaccgtgacctccaccccctctatgccctggtcacagttcaacctgccagtaaccccaaacatcacccctcagcctgccttaccccacctgccctgtccaaactcagggtgttgctttacatccacattgtgcctctgaaaaggctctcagcttcatcctcactgatgtctcataataacccatattttataaatgggaaaattgagtttcagagaaggggtgtccttgtccaaggtcgcacagcaaatggcagagccagacactcaaacttgtgccctttctggtgtgccaacaacagaaccacagatccacacttaaaggacagaagaggactagtggggctggaagaaccccaagtgcacatgtttttacagatgagaggagtaaccaaaacttaaagagaaacaatgacttgcccaaggtcacacagcttttacttggcagaaccagctgccaaacaagatctcctgaccctcactccagggcttttcctctctaacctctttacttcctcactctggacttattccagtttaaacacaggaagaaccagctctccccatatccagcccatatccagttaacctatccatgttacactgctgatacaaagcattctattcccaaaacacaagggccccagaacaggcaggaatgtcaaggaggagaacacactagaaggaaggggttaaccaactccaatggcttcccattatgagtaatcaatgccctacattgactacagcactgactagtggtatccccaaaccacggtttcatcctggatgagaccgagatggcatcgctgcctcactgggatgccacaggtcgtcccacaggtgttatgtaacctgcagaggggtcagtaaaaaacttaatccaacctagagattctgcagcaccctaactccaggacttttcgatccctatccctcagatcacttcattgggtaccatatgcaccgaactgctcactttcccacccctcttctgggtggcacccacccagcagggccacagtgggtactcccccaactggaggcttcctgaccaaacacctttctcctgtaacatttttcccacttagccccaaagccagagaaaaagtcaagactcacattttggggcaaggtgctgaaaatccttaggaaacagcagagcatcctatatagaggaggatttctcttcttgtcacatcttcccatctgatcccatccaatttatcctcaaggcatggttggtcaactgaagctaaccccacctccgccccacaaagcaaccaacagctgttactatattgagtggccatatgatgtcatatcataggtgactaacccaccgaggcttcccttcgagccatcatctaaatatgacagccttccatcatcctgaccttttcacgggagaaagctgagtgaggggcttgacactgatctggggctccagtgcatgtctggccttctgtagccagcacctctggggacacacatgagcaactgaggacacacatgcccccatgcacagattcctttcctagtagaagacactttcacctagtagaagacagctttcttcccctggctgactttgaaaatagtagccatcagaagagataagaatcacagtcatagggaggaacggggaggcctgtatatatttaccatgctgtatatccaggtgctggattagattctttacatacagttttgcatttagttctcaaaacactctgaggaaggcattacaatctctataaagttagagaaactaagattagaggggtaagtaactttccccaggttacagggcttggctcagattccagcccaaatctatgtgacgctacagcggaatgaactctacagaaaggtgttaccacatcacttggcttttttaaacatcaactttattgtgtagaacagttttagattgacagcaaaattgagtggaaagtactcaatttcccatatacttcctcttcccacacttgtatagccacctcctttatcaatagcccccaccagactggcacgtttgttacaatcaattaacctaattaacaaattattaatacctgaaatccatagtttacactggggttcactcttggtgttgtacattctatgggttcgggcagatttttaaatacaagtatctaccattatcgtatcatacagaatagtttcactggcccaaaaaccctctgtgctccacctgttcatcacccccactcctcaacccctggtaaccactgatctttttagtctccatagttttgcctttgccagaatgtcatatacagtcattcgtcacttaacagcaagaatatgttctcagaaatgtatcgttaggtgatttcattgttgtgccaacatcatagagtgtacttacacaaacctaggtagtatagcccactacacacctaggctgtatggtatagcctattgctcctaggctacaaacctgtatagcatgttactgtattcaatactgtaggcgactgtaacacaatggtaagtatttatgtatctaaacgtatctaaacataaaaaagttaataggttggctgggtgcggtggttcacgcctgtaatcccagcactttgggaggctgaggcaggcggatcatgaggtcaggagttcgagactggcctggccaacatggtgaaaccccatctctcctaaaaatacaaaaaatagcttggcgtgttggcaggtgtctgtaatcccagctactcaggaggctgaggcaggagaatcgtttgaacccaggaggtggaggttgcagtgagctgagattgtgccattgcactccagcctgggtgacagagtgagaccctgtctcaaaaaaaaaaaaaaagttaatatgttttactactatgttatgacaactatatcactagatgacaggattatttgagctccattatatctttttgtttgtttttttgatttttgttgttgtttggatacagagtctcactcttgtcgccgaggctggagtgcaatggtgcgatctcagctcaccgcaacctccgcctcctgggttcaagctattctcctgcctcagcctcccaagtagcagagattacaggcatgtgccactgtgaccagctaatttttgtatttttagtagagacaaggtttcaccatgttggccaggctggtcttgaactcctgaccacaactaatctgcctgccttggcctcccaaagtgctgggattacaggtgtgagccacagctcctggcccattatatcttttgggac

SEQ ID NO: 155 - DNA, 4001 bp, Homo sapiens
ccagactgtcctctgaactccagactcacatatccaactgcctgcttgacatctccacaggggtctgcagaataggacagacctcctgctcttgccaccaccctaacccctataatcccaaatctcagcagcaaatggacgctccattcttacagctatgctggccagaaaactcagtcacccttgagtcttccctttctcttacaccccacatccaatctatcagcaaatcagctttaccttcaagtcagatccaaagccaaccacttctcagcacctgcactgctccctcctgctgcaggccccctgactcacgtggattcctgccacggcctcctttctgtgcactcagcttctgtcttacccctactgcccattctcaacatgacagccagggtgatcatttaaaaatataaatcaaggctgggcgtggtggctcacacctgtaatcccagcactttgggaggccgaggcgggcggattacctgaggtcaggagttcgagaccagcctggccaacatggagaaaccccgtctctactaaaaaaattcaaaaattagccagacgtgtggcgggcacctgtaatcccagctatttggaagactgaggcatgagaatcccttgaacctgggaggcagaggttgcagtgagccaagatcatgccactgcactccagtctgggtgacagaacaagactctgtctcaaaaaaaaaagtgtgtgtgtgtatctgtgtgtgtgtgtgtgtgttgaatcttgttgcttctctgctcaaaagccttctgtggtttcccacctcactttgagcccagggctgcatctatacaataataatctgtaagacccaatatgaccagcccctatttatctcccacccctatactctgccccactgcacagcccaccaggcaccaatacttccacctcagtgcccttaatttcttttaccagatacccacgtggcttcttccctctcctctttccttcttcctttccttttgacctctgctcaaaagtcactatcagtgaatccttacctgacttcctaatttaaaacagcaaccccggctgggtgcaatggctcatccctgtgatcccagtgttttgggaggctgaagcaggaggatcgcttgagcccaggagactgaggctacaatgagccgtgatcaccccactgcaccccagcctgggtgatggagcaacactgtctctaaaagcaaaatgagtcttgctccatcacccaggctggagtgcagtgaggtgatcacggctcattgcagcctcaacctcctgggctcaagcggtcctcccacctcagcctcgcaagtagatgagactataggccatgtaccaccttgcccagctaatactgtcatagagattgggtttcattgtgttgcccaggctggtctcaaactcctggactcaagcgataatcccatcttggcctctcaaagtgctgggattataagcgtgggccaccatgcctggcctgaaaagtttttaaacccagcaaccccatccctacccgttctctctgccccgctccctgcttttttctcctttgcactcatctcttaacgtgtacttacgtatgttatgtacttctgtctcctcccaggagaaggtaagctccctgagggcagtggttttgtttgtttcactctcaacaacagccccctgcctagaacatgcccaacacacagtggctgcgagcgaaacatgtgccgaaagaatgaatacctgtgatagaacccacctcggcttttgtgatggacaccccgaggggtctgtcgctgacagtgactgattccagcgcagaggacatccggtggcagaggtgcttgttctggatggcaaacctcagctcttccttgacaaagggcgtcaggttagcaaaatcctcaaacaccagtgacccaggaggggacaggcaggggacgatggcagaagcactcacttccgaggcagagacctggcctgggtgttgaagcatcattttgctgaaagacacattgaaacccaaactgtttcaggggctctggggcatgggatcaagtccccctcccccaccagacctccaacaccagagccccaccctcagagaaaagtcccataagcccttgggtttctgttttgttttcatttcatgccatcctcatcttaagtaaagcaggttcttaaaatacacatagctcagtgacatgaacaaaatgcctatttgaaatttataagggatgatgtttcaggctactctgaattcacaagatctatgagttttggctggtgtgcctatgtgcaaatgtggccacaaacagtcctgaaagaggaagaacattttttaaaaatcagtgaggccattttaaaaatcatgagtaatctcattttcagcttctttttctttctctctctctctctttttttttttttgtatattactcaaaataaagtttctttcacttaaaaaaaaaagcctctttttcaaagaggcttgacgtcaagctgaaactatcagtgagtggaagtaaaagcaaaaagtggggaatccttgaatttagcaaatacatctctgaagcttctcccccgaagttgggcccaagcaatgggaatgagaaaggtaactgtagccaggtgcgtttcttcaccccagtctttggcaggggatggggaggtggattcttaaggttaaggttggcaaagcaaaaggtcttaaagaaaagtgaggcactgtattgtgggggagttgttcaggcctgtggtatagggatagacttaggctgggtgtgggggcagggaaccctggggctggctctggcactaaacagcagtgacttgagctagtaatttcagctctctaggacccagtctgtgtctggtaaatgactgacagctcctccaatgcaagcattgagtctccaccattgctttacccagagcctggcccaatgcctgactcgccatgcctcattggccaactgataaatgaagtggggatggggtcatcaaatcaaatggcccccacggtccaaggttacctttctcattcccattgcttgggcccaacttccgagggagaagcttcagtgatgtatttgctaaattcatctccctctgttattctatagctcggtgaacccaaaaggatgacaaaaggaaaataaagagtagaaatagtgacagttccatggccccaatttggaagagtcccccataagtcttggcctgctgtgtactccctccagtggtggccatttcccctcctccctgcagttggttcccaagggacaatgagtatagggatgagtgtaggatgagtgtggtctgggcattcctctcaaccggggatctgtggtcattagcacagtccagacagagaagaagccctctggcaagtctcgaacatttaaggagtgcctccttcataccagaaaccttaggggcactatctcatttaatcctcacgagaacccagtgagttaagatctagctgccttttatagatgagataattgaggtttagacaaactaagtcatttgcccgaattcacagaattaatatggggcagcatcaggatttggaattaagttagtttggctccaggattcatgcccttaatttgtacattgcaaaaaacaaacaaatattattctacattacaaaaacaaacaagcattatgttatattgcacaaacaaacaaaaaaccagagcaaattttctcggggcaggccttaaggtaggtgggaggcctggaaatgaagtgatagaggggaggctaagtaaagattcctcgggataaactgaactctgtttaatgaactgctaatctttatgtcacggtgcatacccaggctgcttgctaactgccttctgggagtgtgagcaagtgggtctcttatccacaaaattcccagactgaggtcagaagatgaagatttgaagcccacttactccattatgtgttatcattgtacctccccgtggctttttctcctctgttaaag

SEQ ID NO: 156 - DNA, 4001 bp, Homo sapiens
gaagagagagagaaaaagaaggctcccatcactgccacagatgctgggtgctgtatcttatccccactgcgggcgtggggtgctgccttctttgctgtctctgaaaccattccgacagtaactgcaatcctcaccccatcccatctttgcccaggatatcctcaaagcaggagcctgtatgttgtagcattattctacaaccaatgctaactgcaaaacaatggggacagtaataccaattttttgccttcactttaagttacagagacagaaacttcgaacagaagatatgactgtcacctacaacgaaaggggtacactgagagaacatccagattttctggctctccttttctttctgggttcatcaaggatttagtaactattttatttgtaagaaagcatatgtgacctatgcaatgaaattagggaaaagaaaatgtttaggaggaaaggaagtagatgagaaatgaaaatgggagtggggggagcagagaaggagaacgaatccagtggaaagaaagctggtgagggaaaagatgccctgcagaaaagtcccctttcccccactgtctggacactggtgaatgacattagatagagacccaccccattcaagtcccctcactggctccttttctccccactacaccactccaaaatctgaaaatctccagacagaaaggaccttagtagttatctggtccaaccactgcattgtgccctccaacacgcagagggggccggtactgcccatgtgcccttatttcccggctccgcatactgaggcccaacgacatcgattgcagtgtaagcgctcagagtcctggcactagaccacaaagccattctctcaaatatctgcacaagtggctccacaccctcgcttccccgccacggtgggtctcccgcggacccgccgaaggaaaagccagagtgagagtcccaggtgtgtgggagtcccgggctcggggtccggacaccagccgttgccgggagccctccccgtcttccgccccgggacagcgcgacaccagcgctcgccacttccaagcttatcccagctaactttttctcggggttgccttcacggtcctgccgccagtgctgcggggtacccagggcgacccccagcggccgcgcccgggacgcctcccgccctctcgccccttccccattcattcctctcggcgcgtggggcagccctcccgcaagcctccggccttcgtgcctctctgcgcccccccccccccacccgggaaggatcggctcccacagtgccgtgtctcgaagcgagggatggagcgggacggcgagcgaggcagcctcggacaccccaacgcacccgcccacccaccttacgccctctcccagccgggcaagccagcgccgtcggcggagagaagcggcgctcgaggctggcggcagagtggacgcccgacctccgtcaccaggaacctttcgcgccccaagtcaaaagagaaagttagttctttcgctttgcgggaaacttttcgaagcgccgaggagcagcggtggcttagaagaagtttaagccagagttatttccaagccggaggctgggggcgcggatccggggtgggtcaggggtcggcggactggttacttagaggggcgcgaagggaatgaaggcgagcagccctcgtcgcgctcactccctcggcttccagcgctcacctccaggctccgctcggggcggccagggtcgggacggggtcgggcgggctgtttgtctggccggcgggcgagcaccgaggactcacggccggcgcgcgggctgaagggtgcgctcgggcggcggcgagagaagagagctgtgcagtgcgcgcctggctgcgtgcgactgtggcttggagagcgttgcatcaccccttttatagccctcaggctggcggcgcggtcgtttactccgtgttgccagtcccaggctgacgtaatgctattaatagcttcccgggagaaccggccgaacggagcggaggaaggggggtggaggaggggccaaggcggggccgaaggcgggtggagagagggggcactggtgatgcaagttcggggaggagccagcccaggcgcgttcccccagcctcgctcactgagacacacaccagcccgccctctctctccatatcaggaccggagccgcccgggatagccgccagatgtgcgtactcgctgctgcgtgttccaggcatgaccaatggtgcccaagccagcggcatgactccaccgcgctggcatctgtccctccgctaggttgaagagcggggggggcggggaaggtggggaggcgggtcccggccccagcccagactaggtgaggctgggaagcgggcacgacctttctctaaaatgcgtggtcattttctggagcttcaggaaaataccccctcccccactggcctcctacttctctagcaggggcggagtaggggcagaagcgttagtctgtggtgtggggaaggtgtccaaagtcacccttcggtgtatccacgccgttacccgccgggtgtgacctctgcggcggggaccgcgagaagcccgccggttaacacaaaagcggagggcagccctcggctggcaccgtgcgcccgagcccgcagccccggacactccacatggacgcacacgcaggacagctccgggctccgaaactagggcgagtggtaggaccgtatcggttcgatttttttttttttacaatcacaaagcgtttgaaattgacaagaacatgtcagtgaaaccaacaagagcgtgaaaagatcggagtccaggaggaatcagaggcaacccggtgggagggtaggagggggcggaagccagcggccaggaggagggggaaagagaaggtgctttggggtccgcgaacctgcccaggcctgggggtcgccccgctctcaggcaatatttagggaaaacccatgttcagctttcacgtgttcttctgctcccagagccgattggactgggaccggacggcccggaatggggacgcaatgaccacaggcggaacccgcagcagaaatcccctctgccctcaagccagggtggcgggaaaggcggggccccgtggtccgagattcgagctgagacctcagcagaactgggtttgaaccttaaaaacgatttcctggttcttattccccgaccccaacaatttctgctcagagagcggcagaaccaaggaaccttcttgactgcccgtggatgactatttgtagacacaagtgtggcctgggactttcgcacctgcctgggagggagacctgcgcggccgcagggtgtgggggcacggtgaagggcagaaacacctgctcctttccacctgcctctgggagagaggcggccgaaggtcacagtttggtaatttggggtagaaactagaggtgtctggagcctgggtctcacttgaagtccccagttccccccaccggggttcctcgccgccaagcccgacctcactcagaccacccacctctccacgggcctgggaacacgcggagggcggcctcggaagtctttgcgccccggcggacccgggagccctggagttccacgcgggatcctccgagatcctgctctggacctgaaccgatttccagcggcgtcgcgcgggaagtgcagggcgggtgttttcgctttacttttcgccctggtaacggctctccgggccccaccctccgcttccacgccctcacccccgcgcgccgctcagcacacctccacaacccgccctcccgctggagtgcgcgcaggtaaaccccgggcgtgtcggagcagcccggcggacaccgggcgggattaggtggaggagtgtttgcatttgaatgaagttatttgttatctctacttagctattttatctacttatagattgttctggaataaatagcaccattataaagtgaagcaaggagaggagggagaacacgtgaagctttttactctttctgctgtgaaacagaaattttgaccagttt

SEQ ID NO: 157 - DNA, 4001 bp, Homo sapiens
agtctggaaaatgcagcctgggtatcagaagacgacataaaattatgctaccaggaagtgtcccacagttatactttaagaaatgtcactggccgggcacagtggctcacacccgtaatcccagcactttgggaggccgaggtgggcggatcacctgaggtccagagctccagaccagcctaaccaacatggagaaacctcgtctctactaaaaatacaaaattagccgggcgtggtggtgcatgcctgtaatcccagctactcgggaggctgaggcaggagaatcgctcaaacccgagtggcggaggttgcggtgagccaagattgcgccattacactctagcctgggcaacaaaagcgaaactccatctcaaaaaaagaggtaaagaaaagaaatgtcatgaaaatataatagctgactagctgacaaaataaatcataactacccaatatattcaagtagtcttattaataaccagggatcttaggaagaataaaatctgtagacatgagttaggaaagcattatagaatagatgctaggggtacagactttggaggtagaaaaacctggtctgatccttcttctgccactaactagctctaagaatctgagcacaaattctgttagcctcagtttcctcatctctaaaataaacagtacctcattggactgttggtaggattaaacaaaatacttcatgtcaagagtttaacagggtccctgacacaaagagctaaataaatggttactgtcactaatgcatttggcttgggaaaatgggaataaaaaatcttaagttttccagcaactcttaaaaaatctacccaaggattaaaataaatctccaatagaatatagttttagagaacatctgtccttgaaacaattaaatgactttgttcaataaaaagttgagattccttccactcctgctattgagaatgctgatccaagggagaaagataaactgggttccccccagttccaaggctgatgagtggtgtaggctcactagcgggcccatttgggaacctacacaatcccaaattcatattggaacctaagaacaatattactattatatcttgcaatcaagaggagaataaaagtctcctctaaatacttagataacaaagtttcttcattctcatttccacttcatcccattccacccttcctgaccaccaaaaccaaacaaaatatccattaacaagaaaattaagagctgtatctggagagcagtcaggattacaccataagtattaggtgtagctaagcagggacccgaggtcaggtgcttgggtgttttgcttttctgccaagacggacatcaggcttaaaccaatagtaaaagctgtaagattagaatttcttgtatataaccacattctctcatatacaccaaacacacaaaaacccactccattgtgctcaccgcccacatttcacactcaggaaatagcttgtagcctttttggcggtcccagccattttgctctaaacctcctaaagacgtccagtgttagccacacaaaaagatcacccggtacttccccagtgggaatagtgaaaaacgacagttaactccagttagacaatattctactctccctgtggccaggacagaagccgaacgatactcccagactcttccaggggcacgaacaggagtgacgaggggcctcactccccaggcagggttggtccacacctgtcaccacgagtgggcggaagtagggaggaagaaacctttagacgcgaacccgagccaccctggtacattctcagatcccactcaccccaatcttcatccagcctgtgaaagagtcccgggctaaaaggtgactccatggtgccggcaaccccagccggctcccccatttcacaagttccttctccctggaactccgtgattaatatctgggacggcggcggcaggcggacaaaatactccgtaacgctgacgagacggtggcctagtaaagacaaactacttttgccgcacgagggatttgtacgacacaggaaaacgtcagagactaagcaaatttgaatagacctctgagtaaatatttcccttttggagttttcaggactttctgtcccgctgttttatggggaaggcgggggaagacacgcagacatcaattcgactaaacaaagtttatcaataatattaaaaataaaaagtaaagcccctttctgaacattatggcttattccttgattatccttcttaatgccacagcgtggctatctcagaacaaaattagagactaacagtaaatttactttaatttttacgaataattctctatcaatgtaaaaatttttcatatacgcgtgtatgaaagaaaaacactactatttttccacattcgtgaaaactgcttaactgggacagtaaccgaggtaagtggtactataaaacatacttctagaaagactacttttatttaaataaattgaaacaaagcaaatataaaaagataaaccccccaaatttatctcctaaagataaatttctaaagcatagtatttagtcaaagtccaagcgagtctaccctaagacctacagtaatcgaagttcccaatatttgtattactaaagattcgggttttatttaaaggaaaatcacatacatcacgaactccaactgaaaatatgaactgagtttgataaagcagtttcaagaacgctacttaagagaatttctttttcatccattttaaatttcagcggccagtgaatatttaaaatactgtaaccgacgaatacgtatgcttctaggaccacgtggaatctttcccatggtaggtaagcaaaacaaatgtgcttcccagaaccctccaaactgctcgtgggtatattactacagattacataatgcagcagcgttccgggacgcaagcccagaaaaagataattaaatccccttacgtcagatgtaactacttttgtcattagaaaactaataaattttcacttaaggtgaaatttataacactttaattctcacccaattacaaattcaaaaattgacataaaaaactaaaataaggccgggcgcggtggctcacgcctgtaatcccagcactttgggaggccgaggcgggcggatcacgaggtcaggagttcgagaccagcctggccaacatagtgaaaccctgtctccactaaaaatacaaaaagttagccaggcgtggtggcgggcaagtagctgtaatcccagctactcgggaggctgaggcaggagaatcgcatgaacgcgggaggcagaggttgcagcgagcggagatcgcaccactgcacaccagcctggtcgacattgcgagactgcgtctcaaaaaaaaaaaaaaaaaaaaaacctaaaataaaataaaatcatcgagtcttctgtatcccactagacaccttagtcttttaagaaaatcaccatgacaaatcgccaatttttttaatttccaaaagattttatttttattcaaaaagtgcaagtaattatgaaacaaacatttgtgacctatcaccaagaatttaaaaatttaacatttttcatttttgtcccagatttttcataagaaattaaatactacagaattgaattcctctttcctccctgcttcattttcctcccttggcgtaggccacttctaccatgaattttatgggtataaaattttattttataaaaataaaagtgtaattctagtccacttttatttttagttttacggtgcttaaacatgtttatagacacatgcatttagtgtcatttgggtttttttaatgtatgtaaactttaatgttctccaaatcatttttcttattggatattaaggatctacccatggtatttccttgaatgaatctcaatttctctctctctctccctctttttttttttttttttttttttgagacaggggctcactttgtcccctaggctggattgcagtggagccatctcagctcactgcagcttgacctcccaggt

SEQ ID NO: 158 - DNA, 4001 bp, Homo sapiens
taaatgtaaataatactcaatagcttagttggaataactgcgctaatgctttaaaagtatctatgcagagctgaggacaagaggatactcttacaaacaaatgttttggtgattttgtgacaatagttaaatagtaagtagtcactaaattcctactaaatgaataaaatctcaggaaaaatattaaaagattgagtaatggctaccgtatcatttttttcaataaaaaattatatgagtaaatttattctgaaatatatttcgccccaaatcttaagcatggctgaaaccatttcagcattttgtgcattaattaggaataatcccaatttaacattgtaccagtattaatatttatattttactgacatgtatagatcatacttgatagcttaaaaaagaatgataatcttagtataagaacctctttagtgcaataattggaatagaaaacgagctgcaaactcatttgagttacgtggttccccagaaagccagaaaatttctgcctttttataaaacattagtgaacagaatacgatgctgttcaccagaaccatcaaaacatctagaaatacttcataaccaatcaccataaatacatttttccaaatacttgaatcctattttaaagaaaaagagcattaattaaatggcttttaatgactttttgctaaattatacaattctttagatgggccactttttgacatgtggttctaaaaattttatagcgaatgaactggtaattcaatatagcctcagattattggactaaatagaaactcttcctgttcaaagaagaagctttatcaatttgaaactcagaaaatacatagactttacctttcaaagcctttccactccctctgggtattctcaatggctcataatctaattacaagtcacaagcaagcaagaagatcattcccttgtctctttctgccatcaactgacacaaaatcattgccaaaaacccaccggggacatatggtccgagcaggaaaacataagaaaactcctaagtaattcggatataaaaagatgtaagacgaggtattcttctgtaactatagggtagcagtgagccccatgtgggtaaataaccaatacaaaacgaaaaggtaagccaaagaaatcacaagaaatataaactcaataagcagtgatgctgagttgaccgctgaaggttctcatatatgaatatagtcatcatatgtaagaatttattctacacctccaacctcaaaagcccttagatgtgggtagggttgggagagttcacggtgagcgggaaccaaatgaagtgaatgaacgttaatatttagatggaaaggcattaatatatgcaaggcagtgtgttatggcttgaagcagtaacaaacaccaaaaagggagaaagaggctaggaatgagaacagagagacagtggggatccagttattattattatttccctttttttattttttaaacgaggaaaaacagggccgacagagcactggcatgaggaggggtcaaatggatgcgatagatcaggggaaagagtcttgcctgcaacatctaagaaaaccacaaggaaaggaggaacagctgcccacagttaggcttacggtttatctctgcaacccaggacaaagcgaggaagagttagaagacaaatgacactagaaaggagagacaaggaaggcgccaaaaccctcagagaacccagatggttggccacagggtcttcactgaaggcggacccccgcaagaaacccagtcattcggggaccagagacgctaagtcccaaacttcttgactcctttagcctcaagccgatccctcaccgaaagagaaggactggagaactgtaaaaatgtgcaggagccaccaacccggcaaatgctccagctctagcagcagccgccacaaaaccagcccgcacacacgcagacgttccgacctcagcgccgcagctacaggtactttgagcaccccggccaccgtagtaagaggaaccgcctccgcgtcaaatccaacagatcagccacttccgggatacgaaagccttgcgattggcagtagcgatagcagcggcgtaaaggcctctgctatgcttactttatccatccctttttcccacctgttcgccaccccaagccgctaatccaccaatgcagcaagcgcagaaccaagagaaagtatccgtctgtgagcattgtctctctgatagacaaaccacattacggctgccataaattcctctcgagcacttggacttcaactaccagcaggccatgcagcatcacgcccttgcctctggcgtaggaactgcaagatccagcatgcattgcggccctccttcctcgcactcaggaccaagatagagccaacccaagcctcactttgatttaaaaaaaaaaaaaaaaaaaaagccaggatgccttcttttcctgttgtgaaggaactctaagccaagccattattaggactgtaggttatttataaaacatcaagggatatgtgcactcattttccatattcagattattttcaagcattaaaacacaggacagtcgggcgcggtggttcgcgtctgtaatcccagcactttgggaggccgaggcgggtggatcgcttgaggttgggagttcgagaccaacctggccaacatggtgaaagcccgtctctgttaaaaaattaaaaaattagccgggcgtggcggcgggcgcctgtaattccagctactcgggagcctgaggcaggagaattgcttgaacccgggaggcaaaggttgcagtgagcagagatcgcgccactgcactccagcctgggcgacagagcgaggctttgtggggaaaaaaaaaaaaaaaagaaggaaaagaaaaagaaagaaagaaaaaaggacggtccgaagatgctttttataacgtggaaatttttggccaggcgcggcggctgacgcctgtaatcccagcattttgggaggccgaggcgggcggatcacttgagcccaggagttccagaccagcctggccaacatggtgaaatcccgtctctactaaaaatataaaaaattagccgggtgcggtggcgcgcgcctgtagtcccaactactcaggaggctgaggcgggagaatcgcttgaactcgggaggcggagttttcagtgagccaagattgtgcctctgcactccagcctgggcgacagagcaagaccctgtctcaaaaaagtaaaaataaataaataaataaataaataagtggaaatttttatcttcactcctaaatgatgtcaagagaaatactgttactgtaaaatgtaatcctatgccgttttacagtaccgcagattttgttggagcaaggactaccagacatgcttctgaattacataggaaattatactaaaaactaaaaataaaatatgaagtctatgccaccggactatgaaaccacatgggaatgaaaaccttcaagaatgaagagttgaaaagttcaaaattaaacttgaaattttttcaattttttagtggatttggtggtttaaatttttttttattctcacagaaacaggtagctggatctatttattttttattcatgtacttggacagctaaataacaaaacaacaaacaaaggatatgataagatcacaaatggcacacttattagagtgagcaaagtagttttcttgcatgattccatagcttgtggtttcctgtttcgaaatccccaaactctgttttgattttttttaggagagagagcatgcatctaacaagctgtttagatgcctttttgtaactttcataaagacctggattacaagaatgcatgtattttatttttggtattgtgcattaacaggccatgagaaacaatgcttggattcttaaaataactatatatacaaaagtaaattgtgtgtatactacagacttgggttttctgtagatttgccacaacaaattttaattggttagaaaaaaaggagtagagtacctttcctttt

SEQ ID NO: 159 - DNA, 4001 bp, Homo sapiens
ccccagggcttctgtgggctcagaccagcccagaacaggcacccacaggctgtgtgggggggcgagagcaccttcatgatggcattgctcttttttttgagatggagtcttccccccccgttccccccttcccccctgcccgtctcccaggctggagtgcagtggagagatctcagctcactgcaccctccacctcccaggttcaagcaattctcctgcctcagttcctgaagtagctgagactacaggcacatgccaccacactcagctaatttttgtatttttagtagagacggggtttccccatgttggccagactggtcttgaactcctgacctcaagtaatccgcctgcctcaggctcccaaagtgctgggattacaggcgtgagccaccacgcctggcctgtcattgctcttctgatgaacagcagctcccatggagtgctcaccatgccctgcggaagcccttcagtgtgctaactcaatgaagcttcacacacaaccctctggggtagtgactattattatccccattgtacacctggggaaactgaggaacagcatgtgaatcccttgtccagggtcatagagcttgaaaggggagaagctggaaatgagtgtgtctgaatgggcacattctttcccacagccattccatgaaaagtacagattaggattcccatttaaaacgaggcccagaggagtagattgacaagcacaaagtcacacagctatgaggggccaagactggacttgaacctcgtctgaggtcacagctcggggcagtgtcaccagcactgtggatcagaggggctagagccatttgggacctcttatttcctgcggaagccttggcttcctgctggtgacctggcagcggcccagggcggctgcctcctccctggctgtggttcccggcggcggggagctcctgtcttctgccaggctgaggcgggagtgtgtgtgaaccatcttcccatctttggatctggattctaggggctgtctttcctcattccttcccctccctcgccggggggtgcactctaggctgtggggctgggggctgagtgacagacactgagatgagacctttctggataggggaggaggactggccccattcccggcaggtgggatttaaattagaccctggaggagtgggcgtaggacatctggccagggatgggttgcatggagggtgtggcccttggccctgggtgtgacgggttttctctggggtctgaggcaggaggtcaggagtggcgctgtggcccaggacatctacccaggaaatggagtcccgactcccccaacgccattcattcattcattcagcccagaggggttgcccagaggcccgaggatgcagccgtctcccccacctggacatccgtcactcggggtgggatccgattaagtgggcgtggggtggcctccccgtccccgcacggccccaggaccctcttgcacaagcgcccggcttccaatcccgcggctgaggggtgcaggggaggggagggaccggctgcgagcggcggcgccatccccagccccggcgtctctgggaagaaaccggggccgagtccccgtcaaaagggaggggacgggccaggatccccaaccaggtcccgcttcctgggctcgcgaccccgcggtggggggcgtcgcctcccctctccctccaaggggtgacgacaactggcgggccggggaccgcgccgggctcggggccgacccggactccgcactcacctgcgctcatgccggctcctcgcgctcatcgccggccccggcgctgcggccctcggcctgggccccggcgtgcgcaaggccctgggcgggggcgcggtccggacggcccggggcgaggggcgctgggctagcgcggggctggagcagggctgacgcgggcggggcacctgggccaccaggctcggcgcggctccgacactgccgcagtccctccgtgcgcgccgcaagccccgcccggccctctgcggccctcgcagcgcccgcgccggggctgccgggacttgtagtccccgcctgctcctccgcacacaccgggggcggggcgaccggagacacacacctcacggaggtagcccccgccagcacgtcccagtggttagggactgtgcgtgctggtccagctctccatgtcttccaggccgcgcgaccgtgagcaagtcactgatcctctctggccctcttttcccaacctgtaggatagcaatgcctgcttcacagagaactgctgcgaggatcacacaagaaaatgcttgtcaactgggcgtggtggcgcatgcctgtaatcccagctactcggagactaagccaggagaatcgcttgaacccaggaggcggaggttgctgtgagccgggatcatgccattgcactccagcatgggcaaaaagagcgaaactctgtctcaaaaaaaaaaaaaaaagaaaatgcgtatcaagcacttgagacagtgcctggcgctgcttgatgaatgcaaagaaggaagacacacctgcccagagattcacagggtcagatgtgggcccacagagacccagggagagtctgccatgatgcactggaggccttgaaatgccagagaaagagaagcctcacagcgtgacctgcagacacacctgcactggggggattcatgaagacccctgaaaggcaccagagatgtcttacctgcgtgcagcatttatcctgctaccccatagtgaccggcacaggcatagtgttccctgtctccaggacctctggacagaggagctccaaaggggagagtggatctgtgagatcctagggcaaacaagggaaggttcacgttagggccaaggatagacgtgggcaggatcactggtcatttgtccagtatgaatttatggagtgccagcaccactgtgggagccaggaacgtgagagtgaacaaaacagagatgcccctgtccctgcggagactgctgtctactgggaagtagccctagtcaaggaaaggaaaactccaacgatccctattgtggaaggggctggaaggagacacagctgtgatggtggtgagggtgtgggtaggggatagaccccaggagggaaagcagcacctgattcatagcaagatcccagtgaacatttggtacaggaacacacgttggcaggacttgctggtggataggatgtgggggtgcaggaatgtgtggaattcaagatgctccccagggttttggcctgagcagctgggtgccagtggagccatttactcagctggggcaggctgcccgagccaaccagttgcgggtcattcctgttgaccacctgggccatgggactggcttccttgggtcaggtgacaagagttctttcatcttccggtgacacttccaggggaggcaggctgcttaacttttcagaactcccatgtcctcccccagggcttagctcaatttctggcaggaacccagcctccagggcagcaggaaggctgggtttggaaatggctagcccaggtggccttggcaagaggcagtatggtacagtggcaaggggctgggttctggcatcagaaagacatggatgcatgagttgctttctagctgtgtgagctttaaaatgtcactttccttctctaaggctctccttcccctcacctacaaaatggaaggcatggagaggatgaaatgagatggcaggaacttggtagaagccagctgcttgctttagatcctggcactggattagcggcttcataaaagcagaggtactccagtctgggtgaaagactgagactccctctaaaataaataaataaataaataaataaataaataaataaataaaagcagagggcttggggactgcatgggggactgccttgcaagggtgcccccttcattctttttattgctaaggctgcctggccttaaaggggctctattccctgagccagctgggaaggagccgcacctgcagctcgtcccttctccttaatgaggg

SEQ ID NO: 160 - DNA, 4001 bp, Homo sapiens
aaccccccaaaattagctcaggaagtaaacttttttctttttcttttaaggcaggagagacaaagaatgagctttaaagtgcatgtttacagaaatgatcaagggtttgacggtgtggtaaaagcacaggccactaacccagactccatcaggggaatggagaggccctgtactccgctctttgatgccacctgacctggaccagccctccacgctgcatgcttttaaaagcgaggcgagttgtgcatttccacttgtgcctgttctccccaccaggtccaagcctttcaattacctcctttaaaactcccttagagtccccaaggagtgcagcctccctctgctcccgacactctgtctacacccagaagcctcagggccttcaaagacctactcagtgtctgcactgtgctaaaccctggagacaacgaagtggattctctcccatttgtattctcatgacatggtcactttcaccccatgaactccgaggttattctgtgtaaatttttctcaactagactttggctcatttggggtccagggcccagtctcctgcacgggtaatagctaggggtaatcaagtcttcgctacagaaatgtaggacagcggcgttgtgacgatattcccaccacgctccgcgccgctctccagccccaagacccctcgtttccttcagggaccgccctttggtgcttccgcgacgctggaaaccggcagagattcctaccaccgtattgcctgcagcctccagtcctttttcgggtttcttgtaccctgaggccctggtgggtctgcctatcctccttcagggctcgtcccttcaaaaaaaatctgcacgcctctccccaccatcggatgacaactccagttgccatcggtgcatcctgtgtttacggaaagtggcccaagaaagccctcaaaagtataccttaaaggccatcttagggcagtgaagacacaccctttctggcaccagcccgcccagccggcttcgcacttagaagcagccagttttttctttgggggagggcggccgcctctgcgcggagcaagctaagccccagcgtccccaggagaaggagccccgaacccggaggctgcccccgccggaaccggggccgcggcgggaacggaggcccgggaggaggccccggcggagcgccccaggggaaggggaggagcgcgcctttcctcagggcacggagggcggagggaaaaggaaggagaaggaggtgacggcggtcgcagggaggggagccaggctcagggatgccggctcagtcccggggccgcccccgctgctgcaagccccctcctcccggccccgaggcttcccaagcaccgcctctcggagcccccggcccgctcggcctccggggcgcgcagcccccgcccagggtccgcccacccccctaagcaatgccgcgctccagcccctcggcgctcccttcccccgccccccgttactgcgctccctccatttccaaactgcgtcgtcttttaagccgcgcggctctgccagcccactccacgcggcgccgcttcctcctccgccgcctcccgctggccgcggtcgccctcccgacttcctcctcttcccctcgagggctccccgagccccctccccgggcgcgccggacactcacccccttccccatggtggcggtgctcagtgcccggcgccgggtcctgtcgctggagaatcagagagaaaagcacagagcagctcccggccgagcgagcgggaccaggggagccaagtggagggagctagggctgccgcggggcgggagggtgggagggcggccggcggctcgggccgatgccgccgccgctgttgctgccgccgcccgggctgctaccgctgttgccacgtgtccgcctcctcccgccgctgctctgcgccccagaccccgccgcagctccagcccgcgcctcctcctcacttcctaaaatatgcaacctgcgtgctggccccgcccacgccgcgaaacgtcaccgttaccggagcaacctgacaccggccgtgggcctggctccgccccctcccgaaaccccgcccacgggcccggacagcgcctgctgcggccagtcctggctcccggcaggagggcgcccaggtctgggacaagcgtgtccaccgtgtcccgggagggctgcggggcgctcctgctggctgaacagcggggactcggcggccttggccctcccacgcccctcctcccgctgccctgcatgacccgcctactatgtagggcccaggaggtccgcagtgggtgcggtacggtctcggaactgggctcccccagtcgccgccgacccggcaccagaagtcgtgggcggaacggcttttccagcgcttcggcgatctcctctgggactcagggatgctggagggggctggcgctcgggtgtgattgcagccagcgcctgactgagggactccgcccctctgtggaatccaggccccgcgcccacctgcggatggcctccccgggcgcttggtgctctcagagtgcctcctgtgacttggggtcctctttatccacttcccgctccgtcatagctggaatcgatctgaactggcatcgccagaagtttcaagcgccctcctcccaccacctctctttcttcgagattccaaaatgagaatctgaagggcgaccagcgaattcattcacgctattgtgtgaatgtaacctgcttgtccagtttggggattctctttttagggaagaaaaacctgaaacccaaaggaatgcgtatccttagctagaggagctaaatcaagggggaggcgtttgaggacttgccaggtgcctctccacgcctccacctgtcacggcagcatctccagcacagccttgggttctctgggggggcccaggaaaccaccactctccccggagatccctggttccactgcactttggggcttctctgtcattatagcttttgcttcttagcaagaggctgcaatggctgaagttctccaacattttaaaaaacaaagtattattaacaaggtttgcaggaagtcaagtactctgggaaaggccaggatattgactttctaagcaaaggttcctaagttaaagccaactctatcaacttcaagtattcatgtagcatgaacaaacaaggatatgaaactggaaaaaatggagaaggaaggaaagaaaggaaaaactagaaactgtgttgtcagttacatcattagggtaattctcatcccttcttacaagatagtttcttacacgagtctcttctcctcaagaatgtattgttaaaggttgatgtctcctacagtgatctagagacttggttcaatcattctaggccatagagagcagaggaattgtaaatagaattcaaaaccctgactgcctggagaagagcccccaaattcagaacagaattccttagactgttaacagagggttacagagtgttcggggatccatctctaagcttctagaaaatgctttctttacatgcttgatagcctcagttactgtactttgtaagatgcttttgcttgctaaagatagcttgtttaagattaattactcctgggccaggcactgtggctcacgcctgtaatcccagcactttgggaggccgaagcgggcggatcatgaggtcaggagatcaagaccatcctggccaacctggtgaaaccccgtctccactaaaaatacaaaaaaaaactagctgggcgtagtggcacatgcctgtaatcccagctactcgggagactgaggcgggagattcgcttgaaccacagaatcggaggttgcagtgagctgagatggcgccactgcactccagcctggtgacagagtgaggatccatctcaaaaaaataaataaataaaaataaaaacaaagattaattactccttgggccctggtctgaatgggaaaagtgccgcggcaacaactaaatatataaagcacgggtcggaacaacgtagatttctcctgccagctgatct

SEQ ID NO: 161 - DNA, 4001 bp, Homo sapiens
ataacaaggatacataacgcctattttatgaaaaggtttctttaatttttgtacaaaacaatttccaactaaatgatagaataactaaacaaatgatagtataaccataacacactgcaatgggctagctgggaaaagtgcaaaaatgggaattgttgaagattcaactaggtgaaagattcaactctatttaacaaatgtagaaaaataaagggaaaatttatcatcaaaaggtcaaggcataagcatggctttgaagccaactgcaagtcctggtgttcccacttactggctctcaactgctataaaatagggaaaagaaaataacatctactttcaaaaagtttcagggaaaagaaacggtagcatataaatgcccaaattctgtgcatgtcacatggtagatacgcagatggtgtctgtcattttcttactagagcccctgaggttagacctgtatgtaatacaggggaaaatataatacggaaaactaggattttgtacaacagctttcaaactagaacatacccggctcaagtctgttccatatttacgatgaagttcatcaaggctaagtttatgatcatcctaagggaaaacagaaacaaagaaaatagttaaacagtgtagtataaaaaaatgacagaaaaaatagcattattcattactatcattaagcttattaaacaaagtgcagatgttttcttcagtgcataagttggtacaattttcaccatcgctttgtggctttgcaaccacacagttatcattgacagctcttcactggagaatggctaaagctgagtgaccgtggcccattactatttgccataacacttcagagaaacccagcagctctcagggatctagtaaaaccttatctgccttctctgatgaccaggtcgattctagacaggttaagtctatggaagcttccatcgcctggagaggctgaatttcccaatgtttgatataatacagagaaaagcaaagactcatggtatcaacctaagttccttctgttatctctggttatgccagagtgactgaataacttttcctaccctctaacagcttttaaaaagtatatgttcaacattaacctctacgactagatgagatctgtacagctgctatgatctcttttaatatatagcagttctttgaagaatacagtgaggcctgggggattaaaaatcatggatttttaataaggatggaatacaatattcctcctagtacttaccatagaaacttctttcttcagttcatccatgtccctgtcttttttgccctttttgccctttttatcaccttgttctgaaacagctgcaggctcatacttatcacgtccaacctgtaggagaatgtgggaaaagtgaggccatgaattatgaacctcatctgaaactgaaaattctggagcaggggattttggtagtttttaaggtagtcataatttggaatagtcattaagataatagtcaggaaaatgtatacccatatattgcctactacataagcaaagcaatctactattaatacattggctcaagatacattctctccatccaagagcattaagaacaatactgaagctaccggtaggcttcagaatggccctgccagtgccacttccttttggggttaatgaggagatttttgctatcaaaatccctattctgcagccttccatcttccctactgaaagaatgaaactaactttacattattaacttagagtgcaatattgtgcttatgagtccgcattctcaatcagacagccttgagttaaaatcctgggctttaccacttaccagcagtgtatccttaggcaagttactaacttctacatttcaatttcctcttccacagcgtggagataaagaatagtgccaacctcatttcatgtttttaaggattaaatgatacaatacatctaaatgctagtacttttatactgtttatattctttgctttgcaaagacattattacatatcaaatttaaatatctttagtgctcacataagaacactgacctttaccagcttcccatattaaaaagtcagcctaagactccttaaaattctttgcataagagataaaaaagggagcgcccagcccattctgtagcctgaaaataaaacctccaaaatgaaagtctctggaaatgttttgacataagcaggatgtaggaaaagcgtgtgcattatcacataattcacaggatccacctacgcctcttgaaaactggaacaatttttaaagaaaatgttgattctatagtttaaatttagattgttccactcccccacccctgttgaaaaatccttgagcttatctacacaaagcctgaacttggtgctccaaagcttagcggagcagaagagccccttgttccagacacctccccctgaagcagcctcccacaactacaacttaaggccaaaaagtagacattagcaattttcttaaaatgcatgacatatggtgctattactattattttgtggttctcctttactcatttctaactttcctaagtgcattaccagctactaaagcaataattaggaactcgtgtccagattataatttcactgtgctgaaatgaaaaaagaaaatcaaaacgtattatgtgtgtttcagtcataactaatagttgcaaataaaatacattgttcacttaaatttaaaaatatcctcttaagactccaaggagaaatccttctccaaattcactggagtgggccacatgtagagacacattatttacctttttaacttctgtggtcacgtgtgcagcactacttgactaataacttcttccaactgggtgggttctttagtttctatcttatctattaatgaagcaggtctaaagatagtcaacattcttgacattctctccattatggagcaaccacatttgttggtgcctctttcggtacagctcttggtgccagagtttaaatgaaaaatagtaacacatacaagtggacaaataaaacaaaaaggaaaaggcaggtcatctaccagaaaggaaccacagctaaagtggtatatctttagctttaattaaaggtatatcatacctttaatgagaaagcacaacacttaaaaaacattttaaagacattgactaaggatctctaaaagatttatgtgaccactttgtattaattttcttttttttggggatggagtctcactctgtcgcccaggctggagtgcagtggcgcaatctaagctcactgcaacctccgcccaagggttcaagcaattccctgcttcagcctcctgagtagctgggattataggcgctcgccaccacgcctggctaatttttgtatttttagtagagacggggtttcaccatcttggccaggctggtcttgaactccttacctcatgatccacccacctcggcctcccaaagtgctgggattacaggcgtgagccaccgtgcccagcctgtattgatttttaaaatacagctcacggattctctctgagcaagttgaatatcattgaaatatatttcaataaatgaaatagttataacccctcagcttcataatctgcatgctttgcttattctcagacttccaatatcttccactccagaagaggagagaggattactagagcagctaggctttgaacacgttccaaagttttacccccacttacaaaataaatgtcttgcccatagcttcaccactatcagtgctaaagttagttgggaatttagattccctaataactctcctttttctttatccattcatgctaggtaaggcaaagttttaaatgaggctatttgtgggtgagacacatggcaagtattaacaagtaaaactgctttttcttcaaaattttaattttttcactaggcaatgtgtgtctagaagaaccaggcagcttatacaatttagttcttctccacaagtaaaataataacttaatattagcttattcttgtgggaaccaaatatcc

SEQ ID NO: 162 - DNA, 4001 bp, Homo sapiens
gtactgaggagaggaggggaagaaatttacaatgaccttaaaaattagctgccggcacaggcttccttgttagccaattatcagcagggctttagtcactctccacccacattttaatccccatgtggaaaaatcccaacatgaaatattcttctgaacatttggacgctcacaataagtcacaggacaaacacacacacaaacacacacacaagtaaactaatgtttaatgtatcagaatactcaaaatgctaactaccacccagcagccaagcagctcatcatcccagtgttcgcagctgtaatttaatcttgtgtttgctagccactatacattttgttgtaagacatctgggtttaagctctactaactattcaggtgggttaccaccgcatcactactgtgcatgtgtgcctgtgtgtggttataaaggagacatctagataaatggacataacttagttacccaaaccatctccatggcctattaattcaacatcacaaataccccgtttcatccgaagttctgagttctgtataaagaactcaatgttaaagagtaaatgcatgttcaggcttgaggccacaggctgttcaagaatcagggacgcctagtctgtcactagccaaccgtttgaccttgagcaagtcacttcaccttcctaggcttggggcacacatctgtgatgtctaaaccccccaaaattagctcaggaagtaaacttttttctttttcttttaaggcaggagagacaaagaatgagctttaaagtgcatgtttacagaaatgatcaagggtttgacggtgtggtaaaagcacaggccactaacccagactccatcaggggaatggagaggccctgtactccgctctttgatgccacctgacctggaccagccctccacgctgcatgcttttaaaagcgaggcgagttgtgcatttccacttgtgcctgttctccccaccaggtccaagcctttcaattacctcctttaaaactcccttagagtccccaaggagtgcagcctccctctgctcccgacactctgtctacacccagaagcctcagggccttcaaagacctactcagtgtctgcactgtgctaaaccctggagacaacgaagtggattctctcccatttgtattctcatgacatggtcactttcaccccatgaactccgaggttattctgtgtaaatttttctcaactagactttggctcatttggggtccagggcccagtctcctgcacgggtaatagctaggggtaatcaagtcttcgctacagaaatgtaggacagcggcgttgtgacgatattcccaccacgctccgcgccgctctccagccccaagacccctcgtttccttcagggaccgccctttggtgcttccgcgacgctggaaaccggcagagattcctaccaccgtattgcctgcagcctccagtcctttttcgggtttcttgtaccctgaggccctggtgggtctgcctatcctccttcagggctcgtcccttcaaaaaaaatctgcacgcctctccccaccatcggatgacaactccagttgccatcggtgcatcctgtgtttacggaaagtggcccaagaaagccctcaaaagtataccttaaaggccatcttagggcagtgaagacacaccctttctggcaccagcccgcccagccggcttcgcacttagaagcagccagttttttctttgggggagggcggccgcctctgcgcggagcaagctaagccccagcgtccccaggagaaggagccccgaacccggaggctgcccccgccggaaccggggccgcggcgggaacggaggcccgggaggaggccccggcggagcgccccaggggaaggggaggagcgcgcctttcctcagggcacggagggcggagggaaaaggaaggagaaggaggtgacggcggtcgcagggaggggagccaggctcagggatgccggctcagtcccggggccgcccccgctgctgcaagccccctcctcccggccccgaggcttcccaagcaccgcctctcggagcccccggcccgctcggcctccggggcgcgcagcccccgcccagggtccgcccacccccctaagcaatgccgcgctccagcccctcggcgctcccttcccccgccccccgttactgcgctccctccatttccaaactgcgtcgtcttttaagccgcgcggctctgccagcccactccacgcggcgccgcttcctcctccgccgcctcccgctggccgcggtcgccctcccgacttcctcctcttcccctcgagggctccccgagccccctccccgggcgcgccggacactcacccccttccccatggtggcggtgctcagtgcccggcgccgggtcctgtcgctggagaatcagagagaaaagcacagagcagctcccggccgagcgagcgggaccaggggagccaagtggagggagctagggctgccgcggggcgggagggtgggagggcggccggcggctcgggccgatgccgccgccgctgttgctgccgccgcccgggctgctaccgctgttgccacgtgtccgcctcctcccgccgctgctctgcgccccagaccccgccgcagctccagcccgcgcctcctcctcacttcctaaaatatgcaacctgcgtgctggccccgcccacgccgcgaaacgtcaccgttaccggagcaacctgacaccggccgtgggcctggctccgccccctcccgaaaccccgcccacgggcccggacagcgcctgctgcggccagtcctggctcccggcaggagggcgcccaggtctgggacaagcgtgtccaccgtgtcccgggagggctgcggggcgctcctgctggctgaacagcggggactcggcggccttggccctcccacgcccctcctcccgctgccctgcatgacccgcctactatgtagggcccaggaggtccgcagtgggtgcggtacggtctcggaactgggctcccccagtcgccgccgacccggcaccagaagtcgtgggcggaacggcttttccagcgcttcggcgatctcctctgggactcagggatgctggagggggctggcgctcgggtgtgattgcagccagcgcctgactgagggactccgcccctctgtggaatccaggccccgcgcccacctgcggatggcctccccgggcgcttggtgctctcagagtgcctcctgtgacttggggtcctctttatccacttcccgctccgtcatagctggaatcgatctgaactggcatcgccagaagtttcaagcgccctcctcccaccacctctctttcttcgagattccaaaatgagaatctgaagggcgaccagcgaattcattcacgctattgtgtgaatgtaacctgcttgtccagtttggggattctctttttagggaagaaaaacctgaaacccaaaggaatgcgtatccttagctagaggagctaaatcaagggggaggcgtttgaggacttgccaggtgcctctccacgcctccacctgtcacggcagcatctccagcacagccttgggttctctgggggggcccaggaaaccaccactctccccggagatccctggttccactgcactttggggcttctctgtcattatagcttttgcttcttagcaagaggctgcaatggctgaagttctccaacattttaaaaaacaaagtattattaacaaggtttgcaggaagtcaagtactctgggaaaggccaggatattgactttctaagcaaaggttcctaagttaaagccaactctatcaacttcaagtattcatgtagcatgaacaaacaaggatatgaaactggaaaaaatggagaaggaaggaaagaaaggaaaaactagaaactgtgttgtcagttacatcattagggtaattctcatcccttcttacaagatagtttcttacacgagtctcttctcctcaagaatgtattgttaaaggttgatgtctc

SEQ ID NO: 163 - DNA, 4001 bp, Homo sapiens
ctgggtaatggggggacagtgaagcctgcctctgcagtggagatgcaggggagaagggattggaggaaaaatcatccctagaacaggttgtgggtgtcagatgccttccctcttcaggggtcgttggtaggttgaactctaagctccaggccctaaatacccccacctcacccagcctcttagtttaaacagcccagatctgctcctcatcttgctattgcatcacccacagcaacttaggatggtgattaaggggagtttgggggtgctaggggaaaaagacagactggaaaagtcaaggtctcatcacttcccaagcaagacctcctgagctgggtctaccttgctctaagatggagcagggtagggggctacctcccctccttctctcttcacttggatgggggaaatggagggcttatctgatcctttaacccctgcctcttctcagaggtcctgcatctcagctagggatgccctttccatggggagccagagatgtcaagatgcagctgaaggtcccaagacagtatatcttcctgcagctatgacctcttcctccgtgaagcccatacctcacagctcctaagggcaggctcacagactctcaagcacccccacacagtgacatttatgcttgtgcaggcttgaaggcttgtacatttacaaatttgcctgctgagacacaaacacaggtactcatccatgagtaactgcaggactccccgcctatggagaacacgtggtcaaggacacacactcacacacacacagacacagacacacagatacatgcatgcactccaattctatttatggctccaaccctagctcaggaaccctggtgtccaggctcaggatttcccagctgctcaactaggtgcaataacatgtccttgcctgactcctcctgggcccagaaacacccacggctccccctaggcacagtcttcctcataccctcctgttccgcagcatgccctttccctctgtgtcctcttttgccagtattccacaaaaggaaagcagccaggcacagcatgtaaaaggattgggccactcttctccatatgggaatttcatttccaagaattcaaagccctctccctgcccgccccattgttgttaatcttcctcttggtgtagccattgctgcagaatgccatggacgggtggactggggggggggtcacctgtcaccagcctctgggaaagtcctcaaagcccatggcttggaacccacggacaatgctgctcgggacatccggaggggtgctggggtgggggctgggtcatcattcttcctccccacaccccgcccagctgtccttggcactcagggcccctggagctggtgtccggaactacttggtgactctgggagccggatgctctactgcccctctctaacctcaaaatggacccccagcctctcaggctaggactcccagaggaatggatattttcaggaggtggcaaagacaggaggactcacagtgccaaacatcctttcagctgggaggccgggagatgcagtgagaggagggactgctgcagggaaggactagagatgtgggagtggggtggagggagagatggagggggcatgtgtggtgggctgtgggtctaactgtgggcagggggctggggcgtgcagaggagaggagagcactagggtatgtgaccgccgtgggatctgtacacacattggtagtttggagactgttagtttcaagttccaagtatcccactcagctcctctctcccgctccttccacatcccattcccacttcatccttcctcagcagcctccctcaccctctagactgcgacccctgctctttagggatactcaccccacggcccatcttggggcagagtggctgagggaccttagcgggagaggtcaccaggaggatcccaagcccacaccagcccgtctgggacagtcggagaccctggcagacagagaaagccaaagcaacagggtagctttaaataggtccttctccccctctcccccgccttcccctcctccgaaagaaacgtttgttgaaacaggatccctgaggactcctcccctcccgcccctttagccactggccctagacagcccgtttgtcccacggcatgcccccccttggctcctctcaaccccctctggcctgtggcactcacaactgagagaggctgcaagggaagggggcctgggtcccaggttggggggatatgcccccttggatctggctgaaggggagcagttgactcagaatcccaggatgacagagaccatgtggcctaactcttcttttccaagtgggtaaactgaggctcagagagattaaacaatttgaattgataagacagagccagaactcaggtctcccgagtctacatccaatctcccagagaaagaaagaaacatagaccactctgttccttctattatagaggttgcagggacactgaagcccagaaatagaatttgaaccgaaggctgacctctgcacttgaggcacctggaaggggggcccaggaggagtcaaaggtggctcgggaggcagcgggaagtttggagatggaggcaagagggtgtccccaaaccctgccagatgtaacctctccaaagttttgaaggagaatcaagactctggtagggaggggcaggccagggctagaggggaacgggtgggactcctagcaggcacctgatgacatctctgggttttgtttacccctcgtttaccgtttcattgctgttgaagagctctagactgaatctatgcctgagtagagtagtgatagggagaagtcaaaagagaggaaaatacagaacctctaagatgtgtgtgaaggtcaatatcatagcaaatatcagacatgtgaacgggaaaggagagcgactgtttccttcttccagtggggaaggggaagcaaagctgcagcatgcaggactgaggctggagaacaggcctctctgcagtgaagtgggggagattggaaatgtctgaggagtgaggatgcccatcagagtcaggagcaatcccagaaatgcctaaggctttgcctggggctggaaagggtatctttaaccttataccagctagaaactggggacaacgagatgacccaggacaggaccagctggtctaggggtgttgttgctgctcatttgatgagtaatccaaaggatgaggggcacagagaggaaggggaacccagaaggggcagagagaaaagaaaaaattctgctcccgccttctactgggaacagtcagaggacaggattcccctggagtacccctgtttctctgggcacagagatggagtgaggggaagccagcggagtggggcaggtctaagtgtcctgagtgcaaagaaagcagagaggaagggagggagggaaggggggctttggccagaggcctaaggtgcctgctggctgggctgggtccatctctggccccagagggaactccctgcagagggattatcagcctctcctctagcaaatccactctcagggcacaaggctaacatctgaattccctaaataactggccccctccgggcctgcagttgagattttccattacagggacctggtaggtcacatctcacttccacgctccttccctctctgggttacagtcagaaagggtgggtaggatggggccaacagggccttctcatggcccccctctccgagctcagatttggtcttgggagagaatgggcagagggaggaaacaatgaagggaacagataccagttcagcccctgtgtgttaaggagagagtgagaggggagtagcgggaaagcctgtggttagacaccaggagagactgtctaaagcaaagtcactccagagtggccccgaggcagctagggagatcaacattggggcaggcttgcctgggggctgtgggaacaacatgataaattggggtttaggaagcgcctgttccgtaggttcctgggttggaattcctgggtaatc

SEQ ID NO: 164 - DNA, 4001 bp, Homo sapiens
atatggtaaatatagacagacttaagccacataagcacaagttctttgcggtcctagataaattctaagagtgtaaaggagacctaaggacaagacgtttgaccagcactgccctaaagcattcttattctcttatctagtcccacactctctttgagggtagttaccatttgcagctttttccaggtagtgtccatggaacgtggccaggcagagggtgaggggtgggaacgttggacttgaagttagggggctggattcctagttcagcttttgtcctggcagcctcacagtcagagttggagactctctgcctcctcagggagcttcttactcacctttgtcaggtccacggagtacttggtgctcagctcttccaaggttaatttgtgatcatcctgaggggacagtagaggcattgagggacagggggtggcccaggtcatttccagggagagggggagaaacagactggagaatgttagtccaaactgagactgctccattttgtaagctccctgcaattctttttttgagatggagtcactctgttgcccaggctggtgtacagtggtgcgatttcgactcactgcaacctctgcctcccaacaggtgtttctcctgcctcagcctcccaagcagctgggattacaggggcccatcaccaggaccagctaatttttgtatttttagaggcggggtttcaccatgttggccaggcttgtctcaaactcctgacctcaggtgatctgcctgcctcagcctcccaaagtgctgggattacaggtgtgagccaccacgcccggcctagctccccactattttacaggccttggtcaaagtgaaacatttcacgggggttcgggccagagaaacagcctgcctaaccacctgaccacagggcagacgaaggcccaattaaagacaaagaccccactaaagaaacatccctatcacatcctgctgggcaaaggtccagggaataccatgattatattctgtggaaacaagggccaaaaatcacctcatcatgagaacatcttatcgatatcctgccaggcagcaggccatacagcccagactcctcccatccatccctataagtacccagcctgtaagtggcagtggactgtggaattaagctgatcccccacttccacaggtgtctgcaatatacctgtgcttgctgttgagctgccctgtctctctgtgtgtatctttttttttttttttaaccctctccttccctccaaagcctaacagagaagagatgtggctctggcctgtgtgtttcattctcaaggtaagatgttaaagataggtggaggagtgttttcagagggcagctgtcagcgcccactttgggtggcctcaccatgaccacttccttcttcagttcctccatattgcgcttctgtttttccctcttcaccatttttttcttgataagcccttttttaggtcttcgtcttggactctggtcatggggagccactgtccctttcttcccccaaagccccatagctatccccagaaagagctgcccgagctcaactgtgggaagaaagctgagagagtgaggcaaggggaagggaagagggcgcgcgggcaagggggccacgagaagagagtggtggggagagaatgagggagcagaaagaaagaggcagggagggaggtgttgggtggtgaaggtgagagagaggaagggaagtgagagaggagagactgagcggtcctccagccgtccgctgggaagaggaagagtcaggagtgagggaagagggaggagagaagcctagggtggaaggataaaaaggtagaggtgagggaatgcagtgagggcaggaaacaagaggtgaagcgtaaccaggtgcctcagtgatgaagatgccgcaaggcccacaggaaggtgggaaatgcagtgagagtgaggaggcggagtgagcttcaaggatctgggaaccccccagtcccaggccctgtggttgctggggcaatgacccaggtctggcatcacaaaggcctcctgaaagttctaaccaagaatccagaagtcttgccttggcgatggtccaggtctgctgtcgcaaaggcctcatgaaggttttaaccaagaacctagaagtctcagtctttgggtttgaggacgattggagcaggccctgctacagaaagagtttcagtctgagggcagaactagaacaaagttcttgtgtggtcctgcagactttggaggcttagaggtatgccaaatagatgactcaaaaataaagcgggtattcggccgggcgcggtggctcatgcctgtaatcccagcactttgggaggctgagatcgagaccttcgtggccagtatggtgaaaccccatctctactaaaaatacaaaatttagccaggtgtggtggtgggcacctgtaatcccagctgctcgggaggctgaggcaggagaaacatctgaatccagaaggcagaggttgcagtgaattgagattgcatcactgcactccagcctcggtgacagagtgactccatctcagacaaacaaacaaacaaacaaacaaacaaacaaacaaacaaaaaaccatagcagggagcttacaaaatggtgcagttgcagtttggactaatattctcccgtctgtttttgagactccatctcaaaaaaaaaaaaaaagcaggtactctgtgtgtgttttttagcaaggcacacttttccactaacattgggtttgatcttttaattttaggagatcagctagcagaatagatcagatcttgggctctggaaccagtcctggatttcaatcccaactcctccacttgtcagctgtgtggctttgagcaagttacctaacctctgtacctctcttttcttatttttaaaagaggataccttctaccttaagtgaggtgctctacaaaaagcactatgtgacatatatagtatgtgctcaataggtagcttgaattcagtagtagttttatttgtggattaatatgcagctcttctcagtgagggtaaaaatatgcttttccatgtgatagcgttgcattttctcattttaaaatgatgtacttacctcttccattgaccttctctggtgtctcagtaagtgctttgactatattaactgtatatatgttttgcatgtccataggattctacctccttccaagaataatctgaagcatctatacttttctgtcaaccattatatatatttttcaattatgcacgtcacatagattttcccattctgttgtttgatatttgtttatttactttttgagacaggatctcactttgttgcccaggctggagtgtaatggtgcgattatggcttactccagcctcaacctcccaggtccaagtgatcctcccacctcagcctcccaagtagctgggaccacaggcatgtgccaccatgcccggctaattttttttattttattttagtaaagacggggtgcccctgtgttgcccaggctggtctcaaactcctgggctcaagcaatccttggccttggcctcctaaaatgttgggattacataagtgagacaccaagcctggcctgatatttatttaattgcattttggttgggcatgctttttaaaaatatgactgtatctggaaacattcatcttggtgctgatgcaatcctccttgaatattcagaaatagaaatgctcccttcccagctgggataaatgatcgtctatttctttaacagattggatttttcttctctattaaaaatgtttaagataaaaattgaaagccccaccttccctccctccaaactcagattctccccactgctgaagttactgctggtaacaatgtgctgcatgtccttccagtcttttttctatgtttatacaaatagatatctaaaaggaggtatttttcaacttttaaacaatcattcaactctctaccaacctgtcatgtacataaagcttctttttttcagtgctgtgaggcttccatattc

SEQ ID NO: 165 - DNA, 4001 bp, Homo sapiens
ttacttttaattacctttaatttattgtcagtaaatttatgttatgctgcatcttggcagcagggaggaagtatcaagatggaaaacaagggcttgagctgggagttgagatgttggcagggtacacagcaatgagaactttgggtgtcactggatcctgcagcagtgttaatagctgggaatattgacatctgatggccttacagcctcagctaatggaagccaactgtatgtgaggggcaccttcccaacaattcagatttgaacacaatttgagaaacctgcaattggcttggtttggagacatcgtggtgaagtgggaaagtgctgggcagggatctagagtccagaattcaagtccagctcttttagggattcactgtgggactttaagcaagttacagaatcttcctagatcaggttcctcatctacagaatgatgaaaatttactgtgtcctctatgacgctacaattctagcaataattgctgtcacatgtcacatgacccattgtcttagaaattgggacaggagtatcacagataccaaaaaagcatacctactaaaattcttaaacacatattgttggggagagggcttcagtttgagcctcattcatcttggttgttagaaaagacaactatagagaggtatcctctaggttaaaaaggtttagaatgattaggaagggatatacaaagaaaataggttttcagggttttgtttttttttttctttgagacggagtctcgctctgttgccaggctggagtacagtggtgcaatcttggctcactgcaatctccgcctcctgggatcaagtgattctcctgcctcagcctcctgagtagctgggattacaggcacccacgaccatacccagcttatttttgtatttttagtagagatggggtttcaccatgttggccaggatggtcttgatctcttgaccttgtaatctgcctgcctcagcctcccaaagtgctgggattacaggcgtgagtcactgtgcccagctggttttcaaattttatatttatttatttatttattttttgagacagagttttactcttgttgcccaggctgcagtgcaatggcgtgatcttggctcactgcaaactttgccccccgggttcaagtgattctcctgactcagcctcccgagtggttgggattacaggcatgcgccaccacgcccggctaattttgtatttttagtagagacggggtatctccatgttggccaggatggtctcaactcccaacctcaagtgatccgcccacttcggcctcccaaagtgctgggattacaggcgtgagccactgcaccctgcctcaaattttaaatcatatcatttgaactctcatggagggagagtataagaggagaggacccagcatttatttctggggcaatcatggttgaaacctgggaaaagagaaaccggctcagaaaagttgatatgacaaagactccaaggagccaaaggactcagacaggcagggccagacaacagacaggaggagccaaccagaatgagcctatgctaaacagaagaggatttgctgttgtggctgaagactgagggcaagtgtgagaaggctcatacaggactgaagaaaaggcatcagctctgtttgtgtggtgcttcccttcttctctcttaaaaaatttgctgcactcactctcccctgtcactctcactcttactggtctcagctcctaccttatcccttctactcacccactgctgtccgtagctgtcctccaggtcattcaagtatttatcttcccagtggaggcggatgcccagcagatcaacaggcctaaaaccattctcagccaggattacaaagtaggtaaagaatccagccagagcctggatcatccctgtgaatgacagagttgcaggacaggggagcctggttcagagaagggccccaaaaggtaggccaggggagggctgggggctgggacttgcttctggctgggctggtgtgtgtctgaagagtaatgcggaagaatcttgccatcagctgcctaagcctgttatctctcatctctgtgggactttccttcaagccctgacatttgtttctaaactctgacccagagtcagctttgaatcacatggtcttaaaactaaaaaggactttagaggccactgattccctctcccaattttttcttttgagacaggatcttactctgttcatcactcaccctattttctgaaataccattgcacctggaaaatcaagaacaaagacttctaatgactctcaaatgtctgtcaaggctgaccccaacacaaatgatatctctgtctacagtcttatttttcactactttataaagactaagggctctaccaacctggtttattcagtcttctttaactgtgccatctgaaattccccactcctttggtctcccacacctgaccatacacttactagtctaagccccactctcccacaccaagtttaagtcctatttcctgcataaggcctctctggctatcctcataatggtgagcctgcttgctttgtaatcctgtagtatgttctgtctatactcattacttggcacttggagatgctatcattttatgtatgtttgttccttttgtactggactctaagtcaaggacagatcagagatgagtggttctttgtgttttcagggcctagcacagtttgttgctgagaaaatatctccctgacttccaaactgagatggctcacgttgccaggcaggggaaaccactccctgctccctccacccctcattcctctgggcgcaccaatctgtccataggccatgccaatgagacggtggttcaccagattatccgtctttgggttccttggaagcctcttcatgatgtcgctttcagctgactcataagccaaggagatggcagggacctggaggatggagggtggggatgacaggggtcacaaagttcagaaggaaacccagcagtaattcaagctctaccattctgtcttgacgcagcctcaatccatcttgcaggaggtgcgagagctggatcataagtgggttgtcatgagttttagtaagatagctccaggcagaaagcagggagcttaggaggcagaattctgggaatctcttgctcaccagcttggcccttaccatgtcagtgccgagatcaatgcagaggatggttatggttcccagaggcaggggtataccgaggatgatgaacatcaggaagggcgtgatctcggggatgttgctggtcagggtgtacatgatggatttcttcaggttgtcaaagatcaggcggcctggggaggaaggtcaacctcctgtgagaagccctgggagaacacgcctccctcaaaccagctccgggacagacaggccacctcaaagaagtgtcacagtccaggaaagggtctggaggtcctagacctccagggtcccagtattgtttctaaattgtgtgccttttaatcagagccatgccgtctgtgtactgtttgttcttagattcaccctagctaacgttatctgatctctgaaaattagcagggttgggcctggttaatcctgcgatgtttgagaatgtcagtataaaagcctttacaagattaaggctggaatggaaacagccagggcttgggacaggcttgtgttcaaatcccatcttctgccatagctagctgtgaccttgggcaccctcacctccgtgagcttcattcctcctgccttgcaagattgctgcatccgtctctgactgccttttcaaagatcgaatccctctctgcactctctgcttggtctgtcccatggcacttatcttcttttaacatactatataatttaattattttattgtttgtcatccccactagaaattaagttacacgagggcagggatttgtgtctttgttctccctactgttgtatccccagcatcaagcatagtgcctcccacatagtcagtgttcaaacgaacttattga

SEQ ID NO: 166 - DNA, 4001 bp, Homo sapiens
tttctctctctcatggaggtgctgcccattaaatgtcggcttaaaaatgagtcagtccatactgccttaccctctaaagcaagtattattctgagaagcatgaaactggaatgagcaaagatgcatattatactaaggggaaaaagacaagaaggcaaatttcacaatgtgcctagagtcaatgcagcccctgcccctgtgacgcagcagggtcagaccaccagagaaggaagccccagctaacctggggagaagggtgcccataccgcagtgcaccttccaggcctccctcaagttacaaggagttgccagggagctgttcattctacacacaccccacagttcttcaggttttcctttccacagtaaaacacaggaaactacctttatgcctgagacactatgacaataatctcaatgaagaagtctccccaaaataaaatataaaacaaaagctaaaagccattaaagaactacattttccatggctcagggatacctatgcttcccagtaacaccttggaaagacgcttcaccttgactaaccttgaagtgtgatgcattattaaccctttaattttcaatcaagagagactcacaggctgcatttttttttctttacaaaaattcatatattccagcttcttccatttcaaaatgtcagctaagcactatttccctgactcattctcctgccgattcccacagatcctcccaagcaggaacaccaatcggcctctgttcaggactccctgaatgactgcagtggtggtgccagtggtgttggtggtgatggtcatgatgatgatgatgatgatgatgatgttggaggaggagggggcagtgatgcagcagggggagttccctccctccttccctcacgcagtcacgactcatagattcgcctacaactctgcccttcaaaatgaccttttttttaaaaaaaaaaaagtcacctttccggagaggctgaaaacaagaaatctaattttcgatggaaaaaagtctatccaaccaagcaacaggctgcacaaaatattttaagatcagctgctctgcgtttatattcccttcaccataatcaacccaacctactgactgatccacaactgtctgtgtagaccttgaaaacaaccagactttgccaggtttcgggccaaagctaagaatcggagtcctgaaatggagcttattgaaccatttctgggtggtgatgactccaggggaggtcatggagggaaatccttagccatcgctgtgaaatactacagtgtggatggattcctctccacccttctctttcctctcttttgagatacgtatttagactagaagaaagatgctgtaacacacaacctcgtctgcattagatcccatcacctcacgaggttctctcaagaccccagatctcattttttttttaaggactcaggacacgggagagacaaatgtagtctcgcagagcctgactattcccaggagtaaaaggctcaaccgatgcacggtaggaaagactgcaaattaccaagccaagatcgctacgatatgcataaccttccgcctgtcgtgttccagccccgaccctgcgccccactctggggacaccgcattccgcacaggactgcaagcccaggccggcgcgacccagcagcgtccaccaccctcgcccccgccaccccggccagcgcggtgggtgcggaaccggccgcggaccctgcgcaggggatgcgccgcccgggaaagatcagacgcggcggccgggagctgcggaccccgtacttacaccaactgccaccggtcctgcccagaaactccttcttctctgagttccagatgaatttcttccagctgccctcctccttggctttcccgcgggccatggcgatggcgggtcagcagctgccgcggtccggagggtgggtggctgcggcgcgcgccctggcgtcctctgcgccgctcggcttctccggcctggctctctgcaggcaggacgcgccgctgccgctgcggctctcggagtgcgagacgcgcggcggaggagccaaggcaggagcaggaggagggggaggcggcggcggcggcggcggcggggcgggggcggagggagggacggcgcaggctgcgcggctccgagccccgcacctattggtgggcgcgcagccgctcgcgggctttctttggtccgccgagcgctcctctagcccttggggggtcgggggctccgcgaacccgtagctgccgctcccgctgccactggggacgtgtgctgggcccccgcctcccctgacctctgcagagacaggcccggggtaggagagtcagagagggaaggacggacaagcggactgcggggcgccaccggcactcccgccaggagccgaggaattggctgcgcccgccctacctttactatataccgcgccccggcggccgtgcgccccgccctctagcggcccggtggccaatcgccggcgccaggggcagggactcggcccgagagggcgggttcggggccggcacaaaggagccgccggggctagaggggccgcttggatcgctgggcgcggggcgttgggcgcggggcgaggaggaggcgggggcggcggtgagggacgcgcaggcagcgccgcgcagccccctcccagctcccggctgggcgtgaaccgccccttccgtggctgggggatccgcacctgggtcgcccggagcctcgaggaccccagcccggcagtcctggcccagcctccacgcctctgcctgcccgcccgcgctttcggcctccctgggctgtgggtccacccctcctgggcgctggcggggtgggggaaggtcactccgggacgccggactggcgaggactctgcccagctccgccccgcctcccgctcctgcacctgccgccccctcgcactccccgccactgcggttgcagttccggcccttccctcttctttgcaggccagcccagccggcagccccggttcctgactgcccggctgtgccccttgtgggcggcctgaaccacctcgagcaggacaattgccaaacccacccagggcggtagcccgcagtgagttgtcccgtagaaaccaattgagactcaggccagtctagaccccaggcaacaatatctgcacgtgacccagccaccgaggactttcttggtgcccggtcggcggcgggtattctcattggcatgcttttatgcccccttgggggtatcgatccctttgttctgctgtaaaattcttggagccaaaggacctttgggaaaacctagcgcatagggcaagatgttgcagacctggggcatagagtaccccttcccactctttgtccgctgttgctggaaagccaaactcttggtttcatccctctcctatgagcccccaagcagctttatacatccctctgaggacagtgacacagcagaaaacaccgggatgcttctgcttccactgcagagaagccctatccccaggggccatcatggcccatcttgacgtcccagccccatatcagagaattccccaataccaggatgcttgtccttatcctggccacccttctgtccccaaggtcaacctcgctggcataaagacaagcccgaactgattaagaatgagcatttttctaatccttctccaagctcgcctgcaggacctgtgcaaacctaaacattcctgaaattcgggggagaagcgaccacctatccaccaagccccagtgggggaggctgcagggctctgtcaagggcatccgagagagagaacagcttattgagaaaggaagccacctctcgtttagcacctgtaatgtttatgttggaaaaaccccagcttggtagtatgagagctgcaggaagatgctgcacttgcgggtatgatgaccctggtccccttcaggcagaagttaccttatcgagtagttttccagcaggacaggttgctgggaagggtatgtgttgttgagtgtccattactgtaacaggagggaaaacc

SEQ ID NO: 167 - DNA, 4001 bp, Homo sapiens
ctcgtcactcccaggctgctttcctgggcctggcccagcctggaatgagcctggtctccttcctccaggtagagggctcagagtggagggggcgtagtagggcctccaatgggaagcgcgtggagaaggggcagcttggggaggggcttaaggagcagggccagggtctctagactccctgccagactcctcacacagaggaggggggcgctgcagaatgggattttgtttcccttccctcccccactcctttcccctctccacaggggcctcagttgagtaccggcctatttcttcatctgacattccccctgcccggccagcaggcgccggcatcacgtctgcaagttattgttaagtccggcaggaatgcccaggagggacgtgcctctggcagcagagtgcccactcccctcccaagatgcggctggccactcctgcaccctccacacccagttggagaagagcggcgggtaccctcagggaggtggaggagtgtaagaggccagactcgactcggggaaggatgccagcagccccctctaccaagagcgagccaagtatgtaaaagaaagagagaagggagagcaggaaggacaatcccagtcttaattcctagctcttcagcaagccaaggcagtggcccgagacgctcagggatccttccacagatgcctgtggcccaccccatctgccaaacactcaccagccccacagtgtccagcctcgacatcggaaacttttcaattcacccttctccttcctcccctttgggaccagagatgtgtggggcggtgccctcggagacactcatacagttggttctggacgctcacacacactcaaacaacagcggtacgaggtaactcccagctttttccacagctaattatacatgtgaaagtctgaggatgttttgcaagcagcacagagaaactgctgaggtttctctgcaaagctaaagaaatttaattcgtgcactctccttccccactcctgccaacttctcccagcccacctccaccccatggccccaaagtgcccctctcctagttcccgctgcagcccctctttctgctgaagatttctttggttccttttttttttttttttccatctctcttttgggctttcgagaaagggaacagacacggaaaatatttttgcaacagttttccatcctgcgtctcattcccaagccaaggggggaaggggagggcaggaacggaatgggttgagggaggggagataaatattttttccaagagctcaattttggtgtcaaaaagagaaccctccattaccctaccccatagcccaggaatgacaagaactaggaaaagagagataaatcacttgttcgactatatggtttctcagaactgataataggtaaaacagtatttgacaaatctgtgcacacacacatattttaaaaaaaatcctccaaacccagtcgcatgaaatattctagaaagaggaaaatcggggagttttagaagccattgagagaaaagaaagaaacaaagtttgcaaatcacaagtcaattcattctctgcaagcctacctctctttctagcaaagatccaggtttcttcaggcgggactctccctccgggtttccatggatgagggtagggtggggtgaccacccaccagtctccccagtgtggcaaccaagctagagacgctggctttgctctcttgcctttctggctaaggccggggagtgggctgggtctcctccccctgcccctccaatgggaaggacctctcaggttcctgaaagaaaaagggtgcaggagagctgggcgggtgtctctgatcttgctctcttcggagggatggtgccccacgaagttcgtgccccccctcccagcccccagctttggacgatctcaacagcagagctttcttaagaaaatgcttgtcatggcaacagctctagctaactcgggccagactcttgctcaccagctctccccaagcagtgcgggaagagagaggggaggagcaggagctggaacagaggtgggacttggcgcgaggccaaaccattactctactgttaaggtggcccgattcttgcggttacttcctggttcgtcttaagggggaatgggaaaagaaagggaagcaatcctctcccctgtcggctttcttccccgcccttgctctcacttgttgaatagaaagctgagtaggggtggaggaggggtgagggtggaggtggggagtggatgtgggtggcggtattcaacggttgctgggcggaggggaaaaaaaaggaagcttgggcaggcggctggcttcctgcagctcctacgggcctctcaaccccttactcacttagatccaggacccagaaacccgaggtgtctgtggacacttgtatgtcccctcctaccttcctgctcctgtctgaatagggggttccttggagaaggagaataaattgttttgtaaacacacacacacacacacacacacacacacacacacacacacacacacccgtcctcccctacaccttatatacaggtcacattttgttccctcttgtccctgtacccaccagaggtatactgacagtgcatgaaaatagctgcttacttttgagtcctgctatgcgtgggctatgacaccaaaagctttgtctatatggtatcgtttctagtcctcatttaatcttgaaaggtacttattattaacctcatttcctagttgagggaattgaagattgagtgtctggcccaaggttatacatccggctaatgacagagccaacgattcaagaccaagtcagacagactccaaagcccgagtactttcctgtactttgtatcatactccggcacatatttccgttttaatttgcacacactcagacatccatgcacacttatacacagcctgtaaacagttaatcacacccccatacccacacacccactagcattgtgcaacagtgccacccatagattttgcatagaactttatggctttcaagcacaaacatgcaccatcagctggttcacacaacatatcttcattgactgacagattcccacacctacctcagcaaacacactcatgtttatatgcttatggaaggcacattgacatatgtctcacaggttatagctatgagctatgctgtgaagaaggtgactggccactacttcccaaccttttaaacagagggttgggaaaaggcctctttgatcctatcattctaacccaacagctcacaccaccccctgtccttctttgctgtcatctctgcccccaagaagcagagccacatgtgcatggagaaacagggttgtgaaacggggtccagtttcccccgtgtccaactagcacccttcccaatgttctctcatttgggtcctctttttcctcttcattttcttaccctgctatttcttttttctttatggtttttttttttttttttgagacggagtcttgctctgttgcccaggctggagtgcagtggcgtgatctcggctcactgcaagctccgcctccggggttcacgccattctcctgcctcagcctcccgagtagctgggactacaggcccctgccaccacgcccggctaattttgtttttgtatttttagtagagacggggtttcaccatgttagccagaatggtctcgatctcctgacctcatgatctgcccgcctcggcctcccaaagtgctgggattacaggcgtgagcccccgcacccggccagtaatgtttttagactggttgggctgggctcagaactcagagttcatcaatgtgaggctggagattgcctgctgtcatctgaaaacaaaatccaaaataagccctggctaggcacagtggctcatccgtgtaattccagtactttgggaggctgaggagggaggatcacttggggccagatttcaagaccagcctgggcaacatagcaagacccaccccatctctacaaaaaaattaaaaacaagagaaaaaaa

SEQ ID NO: 168 - DNA, 4001 bp, Homo sapiens
gggattgacataatcctcctggctattatgagaatgggctgtaatgggacaagaatagagatgcaagactaattaagagactactaaaatacctaggtgaaagtttatagtggttcctactttagcggtagtggaagcagcagtcagagtccaaatttctagaggaagagccttgctgaggtactggacatggagtgtgaaagaaaaccaaggatattccttgtatcttgtaagtataagttatttactacctggtattacaattatttgtttaccagtctgtatggggtcctttttcttctaagttggaagcagtcaattatagccttactttttgcatacatgagacttaattatagataagaccactttttcaagtccattttttttcaatttgagttaccgtattttgcaagctttagaactaagtttggaagtaaaaagagaaatctctaggaaaatggacatgtcttatggaacaattttaacggtaacagctgctaaatttactaagcacacgctatgtaccaagaactgtttttgagtttcacagcaattgtctcttaattctcaaaagccacaatgcactattatcgccattttatagatgaggaaattgaggtcacacagccagtaagtggaggggccagggaccctgtactggctgtggagccctcactctaaaccaatactcttaaggtgcctcccattcctagactgtgagctccatgagggcaggtaattagccatactcattcttgtatccttggttatgtttttaggcaacataaatatttactgaatcaatgaatgatttctctgattgttatcatatggcagcaaaaactaggtatctgggaaaccgactgtaaacaacatgctttactgttttattgaacaaaatttattcttgggtatgtcatctactcggattcaggctgtggaagctacatgtcataaggtcccaagggaaggtcacaaaggagtagggcgggtatagaagacagcaaaaccaatttctagtttagttagaatacgttacttatcctgctaaaatcttggtcattaggtgacatgagagcgttcctggcagttacaggaacaagtgtcttgtctgaaagagggtttaagtgtcccaaaattatcggaaagaaatttctgacctaaagctaagggggtgggggcaggaatcgggaaataaaaggtagtgaaaacaaagacgaaagggagcattatcctcacacttaccctggacctaggaaggctgcattcttcagagagggggctgcagatagacaaggcgaaggtcagcaaagtcaaatgaaatctggtttgccctttccttacccccgccaggctctatcactaagcctatgtacccctctttcccgtccctcaagaccccacgctcccttccgaactgcactgaccactcgcctctcaggcccgtgtcgctgcgcccttctcccctccctgtcacccctagattcgcttctttccaatcactctgatagtccagagcagggtctataccccttacccgctgtggcggcggcggaaagtaccacccgggacagcatggtcaacgaaagtccaggtagcaatcttagcgtccctgtgaccccgataggagaatctgtcagggcaggaccaagatggccgctcacaagtctcgcgagatgaaaattttgtactcttccttcaactttccttgggagatttttaaaaaaaattatcgcgagaagagtcaagtaacgctgagagcctatcgcatgagggcgacagccggaaagcaggatggagccatagaagcaattctcgcgagaagtagagttgcggttccctcgggagaggggcggaggctcagaggtgcaccacgtggggtttgctgccggagcggagtctccggccggcgtccagtttgagtctaggttggagttggaaccgtggagatgcggaaggaaaccccaccccccctagtgcccccggcggcccgggagtggaatcttcccccaaatgcgcccgcctgcatggaacggcagttggaggctgcgcggtaccggtccggtgagccgagatcccgggcctgggagctcccttaccccggcccagggcgcccctccccggagactgaccctcccagcccatccccgccctgcatgttatcctgaccctgggtcgcgtcaccgagctgtccccagccctgccccgcgttcctgagctcagatccagacccggccggaacgctgttctgtgcggtctccatggaggcgaacccttctacccttcacgcgctgacagcttgtaccccccgtagatggggcgcttctcctcggggcctccagcctgagtgggcgctgctgggccggctccctctggctttttaaggacccctgtgccgcccccaacgaaggcttctgctccgccggagtccaaacggaggctggagtggctgacctcacttgggttggggagagaggtattctagtggcctccgattcaggtgagtcactatcccattatccacccccacccccgggtggaacggtagaatggagacttggggtaccgtagggttgagctcaatatctaacgtcctatactcagtgcttggaggagcctgagagtgttggccccgaatgcaaactcttgtgtaggtgggaaataccttttctaaaattctaaattgtctggtgagatttcctagaaaaatccgtaacaaaattaagcaacggattggaaccatttttcttctgtgtaacctgccccttaacccccacagcccagaccaagcataatcttgattttaagatgacattgaagccaatctgtgctacatgtctcttcccatttcttaccgctttcttgtcttcattctgctttctttttgttgactgttaggcttagcgatgcaggctttggctttttttttttttaaaatcagaatttggaagttggccggcattgcatggaagtttaaagtcccagtttttgatagatttaacctctctgacagttgagcttgaacactacataatcaagacaacttttggcggattctctatacttaaccagtcactgtgcaagacgttcaattattcaacatatttttaaagactctgcaagacatttattcaactagttcagcaaatacttactagtgtccaaatattggggaagtgttaacatcactggatagtgtgctgcttaaacagttgtggaaacttcatccttgtccccttgcagctcattttccatattctctcactaaaagcagataatgaattttacagactgttccatctttgtctttttctggaagctttctgcacctacttgtctgggctgtcattaggaaaacagtaacgcagaataaagtcaaagactcagaaattagctgaactctccaatgatgtggactttgcttttacaggaataactaacttactttgttaatttagtgacaatggctctttgaatcctagaagtgaattactgccttggtataatccaagctcatgttttccttaccctacccccaacaggtgctgttgaattgtgggaactagatgagaatgagacacttattgtcagcaagttctgcaagtatgagcatgatgacattgtgtctacagtcagtgtcttgagctctggcacacaagctgtcagtggtagcaaagacatctggtgggtccctgttctcattgctcctgtctctaagcctcctgtgggtgcctttcctatcctgttaacctcattaggtaacattttgggcttattctaagaatccagtgacttattttagcatgtctataaggtttccttagggattttgcagtccatcgtaagtagaccatagcagcagtccaagaggcaaagacttggggaatgttgattacaggaagttcttgtttgaacacgtttttatgttgatagtgtaggtcaagattaaatgtctgtttgcttttgcttcttagcatcaaggtttgggaccttgctca

SEQ ID NO: 169 - DNA, 4001 bp, Homo sapiens
tgctaatgacaattgccatgatgatgccgtagatggccacagcctcacagaagatgatgctggtagtggtagagattaggggtaaggagtggaaaggagaaagaaatgagaaagaaaccgtccttcctgcccagtaagtccccagcaatctttcccctataacatcccatcccacaaggtggcttgtcagaaacagtatgtcagatcaaacacacaggcagcgccaacacagctggttctgacaaaagtccaaggaccctgacacttacctgaccaggttcttggtcttgatcctgggggccttcactcctccaccaatgatggaggagccggtaatatagatgcccctggtggaaggataaaaaactgatgagcagagcccaagctgtcactgccctcagcatgcctaagaccccagtgacaccacctgccatgactcagcccctgcccccagtcccaccaccccaatactcaccaggctgccccaaccacagacagggagatagctaggccaatgcccaggttggaccacatgaagggcgaagtctccgtcaggaacctgttgtggaagcagagaagaaagcagttcagctctagcagggaagcggagcacaaaatcttaacccctcaaacccccttcaaccccaccaccagttctacaggcaacaactgaccgcgtatttcccaaaggtccatgtcccaggcaggcagtggtgtgggggagggactcagaccagagaaaagaagagaggctgcagggaagaagcttcaaggggaatcctccccctgccctcccttaccatgccacatcaaagcggaagcccaaatcaaaaatggtgtagcagactcctgcagcagtgagggagaaaaagggggttacgggctgctcggtagagagaagttcttcaacctaaagtagctgccgagctgaagggccacctccctgaaggggcgtcctcaggctgcccccaggtgacagtacagctgtgtagacagattcctctgcttaggcctccattttctgccattccctcgctaaaaccacctcccagaccaagcacctgcgcaggcagggtcgccacccgcaagcccgaatccgaggcgggaccgagggagcaagcgctccagccagatcccgccggcccagtccgttccgctgtttacccaacaagctgtgggtgggggagggcaaagcgactgggaaaagaggaaccggagcagccggcttgtgaccgagcgggccggtcaggagcaagaaaggggggacagcagtgagacgtgggagcgaggggagacagcgatagtggcaggacgggggagtgctgccctcgcggcccctacccgcccgcacccctcctcaagcagctggaaatccgggtctcctttgtcggagtcagaggccctcgcaggcgcaagtccccagagcctcgggtgcagagcgcgcggggggccagtattccccgcaggccacttccccgccgagttccgacccggccagctcggccgcgatgctgctcccgcccgccaggacccggcctcacccacggccagcgcgcaggcccagaaggccacgaagaccccggagtagagcagtgctagccccgtcatggcggcgacggcggcgggggtcggaacggcggggccggagctacaaacgcgtcccagcgtccaccgtccgtcccgcagtctgtccgcccgccccgcagcgtcacctaactcgcccacgtgatgcgccggtaccacgtgaccccacgccggttccccgcgcagcgccgccgcccgtctagagcaaggcgacgctggaaccgcaggcgctggggattgtggtagttgtagtcacgcgtctcggcggaggcttgggcgccctcctctctaggaacttcgacatctggccggtccttctcgagtctctccacctcgccctgccagccctgttttattcccgagcctgctcgcgggcccctaaggcgtcctctctggcagccgtgcgtcctagcctgtggcgggtggcgccgcgcgtgccctctgcctcaccttgctcacggcgtctctccgccccagtgcgcctgttggcgctcgctccgctgcctggctaacacctgctgtcctccgaaatcgtccttccggcaagccttccctaacccagtggcagggaagcgcgtttgctgggctcccgcgatgtcctggtgatgcttattaagcttcagtaagatgtcactaccctgtcgaaatgccctgatggctcccatttcattcaggagaaaagccaaagttctcacaatagcctgctaggctccccacgcccctcagctgacttcaccttctaatattcccccactaactccctcctctggctgcactgccctccttgctatttctttgaacgtgccaaccataccgcgacctcactgcccttgcacttgctctctctgcttctcctaactatacatgcggctcatcctgtaacttcctttcagtttttgctcaccttcttgaaaaggccttctctgaccattctgtttaatattccaccccacttaaacgctcctctgcttcccagctttacatttctcacggtacttactgatcaccatttggcatactaagtattttatttgtccaactcccctggaagagtggaagcaccatggcttttgtgtcgctcactgctgtatttccagtacctggcacagagtgtgtcctcagtacatatttgtagaacacatgactgatgcccactttgtctgggttaccttgttagcttacagctctgcctccaccattagactaggcattccctgagggcagggaccacatctcctttgttcaccttcaataccctcgacaatgccactgtgaccagattctcaacaaatgtggggaagaagaggcgagtcttttcatttcacccctctccacctttagggcccagcaaccccacttgcttgaagcatccgccatgttggttcatgtttaagcccaaaggtctttttcactccttttctcctgacaattattttttcctccaaaagatccagcataggtgttatgccctctgggaagcctcctcttagtccttgtcaggtatctcctgtgggatccagctgtccctggggcttccctcctcccagatagagctgtttcactgtgtactgactgcgtatttaactctctttccaggtacactggaaaggaatctggttaaatacagttaacatctacatcccaggaccagtgcaggacctgcagtatttcatgaattaaaaagaaacacaaagagaaaaggtatctggtttatttaggttgctgtgatctccctgagaaataagagtcagtatagaccaacgctgtccaaccaatagaactttctgccatgatggcatatcctgtagctgcactgtcccctcatgtggctgtctgaacacttgaatgactaatgtgactgagaaactgagcttttaatcttaattaacttaaatttaagtttagccacatgtatttagtggctactgtactggacagtgcaggtctagctagaccagtggttctcaattgagggcaattttcccccacagataacatttgccaaggtctggagatatttttggttgtcacaactgggggagtgcttctgatgtctagtgggcagaggccagggatgctgctgagcaccctaccatacaccagacagccccacaacaaagaattatctggccccaaatgtcaagtacgagtttgagaaaccctggtctagactgtctagcacctgccttttgacaaggacagaccctcaactgcagcctgggaactgggattggccaaaggtcctgggctgccctcaggaagacagatgggtccagaggcctcagggaagtccctaagccctttattccatcagccaaacaacacgcattactgggcatgtgctgagcttgtgccagtgccaggacaggacagagacggatcctatcctgtgaagggctgcctgctctccctccttc

SEQ ID NO: 170 - DNA, 4001 bp, Homo sapiens
gaaaattctctatgccgcttcaaccacaggtcctgaactgctttgttttctataaaactactctacattcatatcatcttgcaactatttccacacttcgttgtagaaaaagaaattgagaaataggtaaagtttgccttcactatctttcttcttcctttcctcttctatcatctccacctggagtcattccttttatgttgttgatgcccacattgctgagtgttcaggaaatctatttatcttaagaaaaggaaatgattttacctgtggttgaaaactttagtgtacctgccttatttctgactgactttcttatgttgtaatatattccttcatttcattcattacgtttaaataattcagtacctactccaatcccatcactacattcatccaaagagttacataagtaacattttgaaaatatggcccctgttttgccagactgaatctaattgcagaggcaggacacacaaggagagtgaatgacactacaaattattgtagattgaataatgaggtgatatgaaatgggatagtgaaaaaaatgtcttggccttgggaatctgaattccagttgtagatctgagacatattaatttttttattatgcaaattgtgtaaattttgtaaagcacagtggttaagatctgggcttggaaattatagctcatctaaatcttgtctctaccatttaccctctgtgtgaccttagacaagttgtataatttctctaagcatcacttttgctttttcagtaaaggttgtgaggaataaagataagcaatgagcatggtgcctggcacaatattttctatttttaaaatataaccttgaacaaatcagtgactccatttctgcatacattgggaataatgttaatatcctattcatttggctgttgtatcaaagagaatagaaaaggtgttgaagttcattgaggacattctatatgtaagtacatgaatgcatgaccaaatgaaaagagagctgagtacagtggcaagtgcctgtagtcccagctacttggcaggctgaggcagcaggatctcttgagtccaggagttggagttcagccagggcaacatagtgagaccctcatctcttaaaaaataaattaataaaaataaaaagagaggtagaaaatgagaataaaatgaaaatattttaaaatattagatgttaaaaagctaccaagagagggatgagaatgagccattattattctgattttatggaaatgaaaactgatgcttataaaaaataagtaatttgctcaggtttactcactaataagtagattcaatccagaggttttctaccccctaacaatgttgagaaaacaggcatggcatagccaaggcttaagcccacatctctataatcttaatgtccatgaacacatgacctctcaaaaggatctgaatgaggaaacttcatccctgctctagaaataaggaacatatggctgggtaattttaatgaatgggtgaaggtctcacagggagtacagtaaaccaaagtttgaaacaaggtctgcctaatccaaaagtctatgcttatccctgcattccactgctttgtttatttcgtgacagacccctcacaggtgagacttactcttcttggcttcctctagcttgtccttggcccgtttttctgcctgaagaagctggtggatcccctgagactggcttgtcatggtagtctgctccaagcaagtggcttctgtgaaatctgggaagtaatgggttcatttattcttttagaaattaacatataactcagattattgtgtcaacagcaagttccaaatgcagctgtttcaaactggctttattgggctggatagctgggtcccaaggaaagcccaaggtggaatctagaaaaacaagttaaaccaatgtgcataaattgagaacttaccatttctgccaatcttagctcttctgtatgagataaggaggtataaatgaggtgttgcatctacttataaataatgaataagagaccttttaagaatgttggtttccctaatcttccaagaaacattgacatgtttactgagtttttcttttaagtaacaagatctttgctctttgtacctgcagtactttgtttcaggtctttttctttatttgtttctagtgattcagttatctgcttggagaaaacgtgttaatcttttgttaggaaagagattccctagctttgtgcatagatggtggactaaggatttttttcccccaaggtctcaggtgactggaataaaaagatttcttttgggcattgtgctgctcttaagtaatgctgtaggttgaagttccaggaagatcttactatggtgactaaacaattagtaattttagtagtagtaatcatgatagaaatagactataactgtaggttttgggattaagttaaaataatttaaacatgcattttatattattcagtgtttgtggtgagtattgtcctaagataatacaataaaatccatcatacttgatttgattcgatccagtagcaattggacaaatcagaatattggtcacagagaagaaccacaaagtatcatttatatgtatctaaaatttttatttgaagtgaaaagctaatctgttgacttagaataaggctttccccccgatacgatttgcagattggggtttcacgtattattgctttcataaactatacctctattgcctcatatgtaagtgccaggttcattttctttaataaggtgtctggatttaaagacaattgtaaaacaatctgggcactaaatcttttaaggctttaatgattattttctcctaatcttttcaagttgtctcatccatatctgcatgcctacattatgtgtgcattttcagcaaatattttcaaaaggaaaaacttttccacaggatcacttttacttttttttttttttttgaagtcacatttaatcagcttataaagtacttaatttgtattgcgtaattaaatacctggtgtaactgggataaaccgattttcgaacaagcacaactcttgtatgatccctccagacaaaaagatacaaggtggcttaacaggaagaagtcctagagaggaaaaagcctttgggaataacccaaaatggagacttagaatgaatttcatcctctcctgaccctcaaaaaattactctctcagtgaaaaggagggatagaaaaatctacccagaagcagagaaagatgacaaagaagaagcttctcatctcaatctggactctggatggaaaaaaaaaaaaaagaagtaatcacagtcccaaacttatgtgggtttgaactgccacagcctctgcagagataaaaccatactgaacacacttttacaatctaaattgcaaaacaaatgagaaagtaaagttgaggagaggtagatagtgtagcagtagatagaggtaaaagcctggctggagaatttgaactttattatatatccaatggattattatcatacaaatggtttacttgctataagagttattcctttgttttaatcaaagctgattcctaatgtgacttttcacttacaaactcaaacattgaaggataataacactttaaaaaattctattatagccaagattttgaatttattctttaaatgttttgtattactgagcatcaatgggacaagcttttctccttctattcactaataaaatatcagctaggttccagaaactgggtatgatactttacaattatgcatatttccatatttaactaatttgattcttacataggtgttattattacaaagcacagcaattttatcagtaaagaaactaaagcccctataaaataagcaagacgagtggtcagggaactgtggctcagaaaacctgagtgacaggcccaaggtcaggtggcttctgagtagaagaattgttctcatggtcagtgttcttgctgctgaacaatgctctctttctttccaggaaaattttcttccaggtttc

SEQ ID NO: 171 - DNA, 4001 bp, Homo sapiens
agaggcatggccctcactttctgcacagacagtccctaaacagcttcccctcagcctgggtcagccacccttctgggctggcagaggggtcttcccaaccctggtggggagtttgcccctccctccctcccaccccaagcctagtccagtcagtatggcacagggtgcaggcttagggagcaccagtgagacaagcctctgcctgcttccgccttcccatgtcctttctcctaaaaggttcaaggcctggccttacaaggcagagcctcatccttactccccagcctggcccaaaggaaactgccagtcagtcacctcctctttccttgtctgggtggaaggcctttcacctcctcatcctctttggttccctctgcctttagcctaccaggcacaccccaccaacctgtcagccccaagagatactaattgcctgtctggctaagctctataattacagattctggccacaacccagtcacccacaccagttctcccttcgctagctcagatcccgcccttacaccaagtcaggcaatcctgaaagccagaagtccttttcatccctgaccttctccaactatggcagtccagggtgcctggctcaggaagaaaaacctcatccatattttagagatgccaagccctcctccagggcccccagccagggtctccacccagtctgagtatgagtcacgggagggtggggagcacagggagaggttaaaggatgcaagagtgggcatcacaagttctacaggcagccccgcccttggggaggaagggatcaagaaacactatcagcctaaacatctgagtttgagtcccatgaaagagttaatgtaggagctgcacacgccatcaggagtcaggagtctggatatggaccaggaaagttgttctacctctgagaccctggggagactggaagcaggcttggccccagacctcatcccctctgggggggccatcattccaaggggaagagaggagagacctgggaactgggatcccctctcacttttccttcttagtctcacacagcctgggttttctgagcaggtcaggcccatcagccacgttgccctgccccgtcacccagccccagccccctctcggccacatttgggataaaaatagccagccccggcaagcaggcaatgctccatggaggaaaacagctcctcctataggtccggtccctgctcccttacaagcaagagccccaaaggctggccacttctttcagaggaggatggcaggtcagggaaacaggaggaaatggaactcgagacctccagctcactggccaccaacacgagctcgggccaccttccctcaccaaggacagaactcagggctcccggcacagctatcatctcccagagctactgccccttcctgacaccctcagttttcctcaggcatagacctccaccttactgagacaaagcctaccagcccaaactcccttctccaggcaccaaaccctcgggtcccggttactcctctcgcccaacaactctctgggcgggtctcccctggccaaggctgcacgagcttctccttggcactcgcgccgctctcctgctctccacgcgccccttcggcaccccatcctcccatcctgtacgcagacccccgctctgccccgtccccgggaacccgacagcccctcgtctccagtcggccgccatccccgccccgtctggccgcagctcccaaatcttggcccccggtgctccccagtctacacccgctccccggcccctccagccccgcggctgcggccgcatctccctctgccctcctggccccgcgctcccgggcgcccccgcttcgcctcgcctcgcctcacctcagcgctcagcgctcggcgcccgccccggcggccccgtactgcccatgccgggggctggggcggggggcgctcggctcggctccccacgggctcccgcccccccagctgcggccccgctcccccggggcctcggcccgctactttgtgtcagtttcggccacggcggggcggaagtgacggagccggcggcgggggccggggggcgggagggggttttggggaggggagaaggagcggggaggagggagcagccatctttgtgcggggcagtgggagggtcttagcccttccgagcctcggcgtggctgggctgggatgcccccacacgtacgtccatccgcatcttaaaagaaaaaacaattcgggaggctagatcgctctgagggggtatttttaattcggaagaagggaatagaggaacactgccttctctgcaaaacgagcatcctctgcagggagcggcaggagagctgtagaagtggtgaataaccagaattttccctggcgccaggttgccctcagcccgactctcgctcctcggagccgcccgccctccgttccttcaccctccctcctcgccctggctcatttcactgtatctcaactctccttgaatgaacgacacagcaccgagatgtctaggaacggtgcctcagtttcacagccttgctctctgtctctgtgccccgccgccctccttccctccgcccccaccacgccccctgggtggaggcggcttccccacccctaactaccctcttggggaggcatccccgagagggtgaaggtgggaggcgccgaggcgatgagagctaggagtcggcagtcgggacaggctatggagggcagtccccagggttgtgccctacactggatggtggccccctccaccctgcagatgcccgcagccgtccccatccagcatccaggtgcgcaccctctagcggttacctcgagcaactacattccgagaggccctgagggtcagaaaaccgctttgcgggaggaggggatgagaagcctgagtcctggtaccttatcctcctccacttctccctgtccaggatccttcttagtttaggaggaagggatgccaaacagataaacagagaagcctcccaggttctggcacattaacaaagaggaagaatgactgttgttcccaggcggggtcagtggctggctccagggtccatgagtgaagtgagggttgtcctaatcatagcttacactccagcatctgagctgaggcaggagtttccaactctgaggctttgtgttgagcagacaccagatcctgagctggctctgggccctcagggtggtgcagagccaccaacagctggtaagtggctgtgccaacggtggcccccaccagaggggccaccacaggcacccaccaccagccattaccagcactgcaaaagaaggacagtgggaaggtatcaggagtgactcccttagccttcccctctccaaggacggggggcagtaacaagagagtgccctaaagttgttcccagggtggtagacaccaggaagaggattgccttgtcaccaaagcatagtatttagaagagggaaccccaggagagcttggtccagcctcttgccttagggaattatctgaatatattaattttgctgatgaagtcactaatgtgcatggaagtaatgtggcatgcctaagaacacaacctctaaatcttactgtttcagtgaaaagttgggagggaagcaagggagaaagggggagaatatgacttggagaaagaacactgtcctaagaagccaagagagctattttaaaggcagagtgctgtggacccagggacagagcccttagcagaggaaggtgagtggaggccagcaccaggagagtctgtctcccacctgaagacttcaggaccccagccagccacgtaggtgaagagacgtgggcccaggtcccgggcagggttgagtggaatcccgcagttggcacccatggataacccgagggccaggatcagcatccccaccaccacaggctccagacccgcagggactcccttgttccgtctgtccaggatggccaagagccccacaatcagcatcccagtgcccagaaccttggagtcaacagaggcagagggttccc

SEQ ID NO: 172 - DNA, 4001 bp, Homo sapiens
tcaccttatttcaaagctcatcttcaagtagaaaaaggtgtggggggtgcgtttcagggatatgggtcatgcagactgagatagagatagaggagggaggaatgaaatgtaattgaaacagttgctctctaactggaccttccttgtaccatctgcacacatttagctttaaagggctcatctgtcactcagttagtgacacctatctagctaaacctatctgaaacctctgcaggtctgggactgcaggcatcaaattcatgtcccagaacaaggagctgtcctataatagattccccagcccgtctccccgggggtcaccatgacctcatgctgcaaaaaggggtaacttggttaggcagcaaacctaatgccttaagcctgtccgggagccaaagacagcattccagaaccctttctacacaccccaggacccctgcagagcacactgcagtaacaaaacccaggccacagtgccccctgcctaccaagccacttcactcccataaacttccctagaggggctctcttgggccaagtcccctgcgcaatcaccaaagaccatgcaaacgaagaaggtagggactggatccttcggagccaggatctctgggtctggaaagaggatcaaggcaggtagggggaggctggggacaagtgaatgtagggattggaggggggaaataatgggtgcgggagagctgccaggcgctgcctcccgttacctgtcccccaagagggcttctttcggctccaagagggaggcgcctgggcccgggcccacttctcgggcatctccttggggaccgtcatgatcccggtttgagtgggggagggcagaccgtctatatgtccttggccttagtggcatcgacggggcggctccccggggaggtgcaggagccgcagccgctcagaggggagccccagccgtcgggcgcgcgccccacccgcagcccaggccatcctcccggccgccggcgctcggggacaccgcgagctcagctgcgccgccgccgccgccccccatgccccccggcggatgccagcgtgcgctgagtggccccggacacgccgagcacgcccagggttccgcccccgcccgctccccgactgcaggagccgcagcctgccagcgcgccgcgtaggcgaaagctcgcgcgcgagccccgcctcccctcccacccccgggccgggccaatgcgggtgagcggactgccggcgttgtcgggggcaaccgctttcacacacacacacccccgcccgcggaaaaaccaggagaaccggtagatggaaaaacgaggggagcagggaaggggtgagaggaccaagcagagatgagaacacagctccctaggccagaaagcaggagctgcaggtgcccgaagataagactgcaggtgtttcggggcgtggggctggtgctctgcgctgtcctggcagataacccagctttgggatcaagcggaagaattcggtttcctaggctgcccccaagctgggtaggggctgctgtaagctaccctccctcagacccataccagttgtcccttttccttttgctccctgagccataacaacacccactcttgatggttcccgggatctcccctccttgcctgtcttacctggggggcgcttttttgcacacactgccatctcacccagcaagatcccagcaatcccatgggagaccctgcaagaagtgacagacgaatgaggtcaggaagctgaggataacccttccctcccctcatgagacctcttttgaagaccctcttctccagctctgaccctgcccctcccccagcctccttctcccagtctctcctcttactgccatgatgggttcctgggaaagaggggacttccccaccacctcccatcatgcccctgccttgggtgacatggggggctgagactttacagaagcccatgcctgtagggaaaggagaagaggccagatattgaaaaaaggggaacagctctcaaggtatccatcccagggacaatggaggctctcatgtgttctggcggcaatgagtagtgcttgtgcttactagaaagcagtttccccaaagggtggggtggagggaacatgagccaggaaacacctggcagggcatcaggaaacagggtgggcaggctccacccttctcgaaaggcttataagttccctgccatccccaccccccattactagggcttccattatcacctcctccaggggagctcacattagaggcatggccctcactttctgcacagacagtccctaaacagcttcccctcagcctgggtcagccacccttctgggctggcagaggggtcttcccaaccctggtggggagtttgcccctccctccctcccaccccaagcctagtccagtcagtatggcacagggtgcaggcttagggagcaccagtgagacaagcctctgcctgcttccgccttcccatgtcctttctcctaaaaggttcaaggcctggccttacaaggcagagcctcatccttactccccagcctggcccaaaggaaactgccagtcagtcacctcctctttccttgtctgggtggaaggcctttcacctcctcatcctctttggttccctctgcctttagcctaccaggcacaccccaccaacctgtcagccccaagagatactaattgcctgtctggctaagctctataattacagattctggccacaacccagtcacccacaccagttctcccttcgctagctcagatcccgcccttacaccaagtcaggcaatcctgaaagccagaagtccttttcatccctgaccttctccaactatggcagtccagggtgcctggctcaggaagaaaaacctcatccatattttagagatgccaagccctcctccagggcccccagccagggtctccacccagtctgagtatgagtcacgggagggtggggagcacagggagaggttaaaggatgcaagagtgggcatcacaagttctacaggcagccccgcccttggggaggaagggatcaagaaacactatcagcctaaacatctgagtttgagtcccatgaaagagttaatgtaggagctgcacacgccatcaggagtcaggagtctggatatggaccaggaaagttgttctacctctgagaccctggggagactggaagcaggcttggccccagacctcatcccctctgggggggccatcattccaaggggaagagaggagagacctgggaactgggatcccctctcacttttccttcttagtctcacacagcctgggttttctgagcaggtcaggcccatcagccacgttgccctgccccgtcacccagccccagccccctctcggccacatttgggataaaaatagccagccccggcaagcaggcaatgctccatggaggaaaacagctcctcctataggtccggtccctgctcccttacaagcaagagccccaaaggctggccacttctttcagaggaggatggcaggtcagggaaacaggaggaaatggaactcgagacctccagctcactggccaccaacacgagctcgggccaccttccctcaccaaggacagaactcagggctcccggcacagctatcatctcccagagctactgccccttcctgacaccctcagttttcctcaggcatagacctccaccttactgagacaaagcctaccagcccaaactcccttctccaggcaccaaaccctcgggtcccggttactcctctcgcccaacaactctctgggcgggtctcccctggccaaggctgcacgagcttctccttggcactcgcgccgctctcctgctctccacgcgccccttcggcaccccatcctcccatcctgtacgcagacccccgctctgccccgtccccgggaacccgacagcccctcgtctccagtcggccgccatccccgccccgtctggccgcagctcccaaatcttggcccccggtgctccccagtctacacccgct

SEQ ID NO: 173 - DNA, 4001 bp, Homo sapiens
ccctggcgctggcctctcctacaccagtttgttctgtgcaccatcctaggttagaatttttcaaataataggttgtgaaatacatttagtggattgtgatcagagttttttaaaagatgaaagagaataaaaagtaataagaatggactgcatgttgtaaaagttagcattattttatacatttttttttcagttacaatcatatacctacatgtgtactgaattgcaatgtaaaatatatttcttattgtggtcatggtcaaaaagtttgaaaaacactgcattagaataatcttcccagacacagttttcaacatgcttttcctcagctttgattcctatttaaggataataatggctaatatatattaagtacttatgccagagacggcgctaaagagttttaaatggtattatctcttcagcacaactctgtgaagtaggtactgttattattcctgttttacagataagcaaactgaggcatggagaagtaacaatttgctcagagtcacccagctagtaagtggaagggttaggattcagtccttggcatctggccccagagcccatcctcttagcagctaaattatcctgcctgtactccttaagcccaaagagtttaatgcctaacttatttctttagccttaacacttccctctccattttaactgggcatagtaccttgctgtctcctgaaaccccttttactttcaaagctcttcctctgtttaagctaattcctcaacatgggaatggatgggggtgggttggcagggttggctggttgtcaggaaactaaatctagtctgccaaatatttttgtagattaagttttactgggacagaaccatacctattcatttacgtacggtctaggcctgcttttgcactatgatggcagagctgagtagtcacaaagaagaccatacggcccacaatgcctaaaatatttaacatctagttctttacagaaaaaatttgatgacccctgctctacatcaaagtcccattccttcctctctacttaatttaaatcccccacaacgttcctagcctaggtcaggttccatctcccatgggaaattttctctgatacctctagcctactaccatgtgtgccttgccttgaccaccagactgctcctcttgggagcaggaagtacccctctcatacttctatatctccaccatgaccacagtactttgcctagaaagagcaggataaacatttatggatggaaatggagttgggagagactatgttcagttcacccagctgacccatcaataaaccaactttaaggataagggtgagggtaaggagggtgaaggagtgctggtaagcaaacaccacaaatgggggaaggtcttaccttctgttccacacatttgataaaatcaccttgcctggaatgccccactggctgcttccgaaattcactgcgtttctccaggcgggactcaaaagcagctgggtctgacctgatcagaggtaaaccaaagggtaaaccaactgggcctttttgaattctaaaataacaaagcatcactttccacctctacagagaaaggacactgccattcagagaggttgaaaaatttgccttcagttagtaagaactgggcacaggcctagaaataaagaaactggaaaaagaaatcctgttattcaactgttgttaatcctcaaggggcctgtgtaacatttttcttttgcaggctgttccctaggtttacacagggcttagtctctcaggtacttacattcagggtacttagaattttgaggtcatcttgctggatcacctcttcagacaagaatcctatagcctccttactaggtgtcaagcttttacttgaatacatccagttcttgaaaatatgtccccccaaccaggttaaacatctgctttattcagatcctggtgattcagaggctttaggtagcctattttgcagaagatttagcatctgagtatctccctaacctaccctccaaagaagctgctcttggagatgaaacaacagaacacattgtttatgtcaaaatggggttggtcttcaggtttgaagtccaggctggggtgctgtccctattaagaattcttcagactgtgtagctaaccatgggatatttggttttgtacactttggtgaagatatcatccagggattccagctctttggccatgagacccagagtttcatgggtgaggtctggaggacccagggacatcttggctatccctctggtggactttcctggtcaatgcattatagggggccccttcttccataaaattcctttctggaggtgacataaaacaccactcccttcactgtcatgtagatgggatgtttttcttctctctgtagtgggccggctcctcctcaataaagagcctcaccaggggtttctgcttagtcgggcatggcacctgcctggccagagctgcaagcagccctgggggctgtaccaggaccagggtcaaccctgctagtggctacagctgcaactgggcctgccatagtgaaggggtagagagggcaagggacagcctgggcagtgaagctgttgctgggatctgaggatatagaaataaataagtcagactccctacctcaaggagctcactatccagtgggagagacaggcataaaagtaaacaaatgaaagtacaacaggtattatgatgaaaatttgctcaaacatccccaaatggttaaggtggtttcatgcctctgtacctttgtttatgttgctgctccccttacctggaacatcccctcctctccattctttttcaaaggaagtttgctaacagataaaactagagagagactggcagggactagggtatgaggaacttgtgtgaaacattaaggagtttggatgttatttagaggtcagtggggggataacagtatgtgtaaatgttgatgggaatgatccagtggggaaggacggtaaaaccagttatttatttgttcatgagtgggtaagaataaatggatgctgataaagtattcaaagtacaagtagacaactcttcagagatgcttgtgtgtaaaacagatcaaatacagatcaacgagagaagcctggaggggaatgtacatcaaagaaaggcttttaagatgacaaatacttgagactatctcaatgctgctggaaggagagcaaaaatactcattcatttactgcataactgtttcaaatggcaagaaagatcactacagtagcagtgagaggaactggggtaaagtagtccaggaatggaagtagggaactctagttagaggataatggcaacagcccaggtgacgatgatggagtagattaaggcagtggaagtagagatgagacagaactcaaatttacagtactaagtctttggtttcctttcataagacaactaccttcttaccctgctaaattctctcccaagcccctttaattttcacctctgatctcctttagctcttcccacttgaactcttcagatgctcctatagcccctcatatgcaccttaagcccctctaagctccagatccttccctctggaagctaagaggtggtgttagggaccctggactcagagtcagacaaatcccaaacagctgtgtgacctttggcaagtctcttactctcgctgatcctcagtctccttaagagggttcaatgggtgatccgactgtgacactattagtctttgatgccctcctcccatccccagtcgcctttccttgcagtcaaggccctaagctaccaccagcctgggaactccagctctgagccaggcctcagctatcttaatatgtgaccttgagcaagtcaagtcccttctctagaaggcgttttcccatttctataatgaggacaggtgtctctgagctgcctgcctcagggctgtcataagagtccaccttagcgtttggagaaccaaagcagacaaacgtggaacgagccagggctttgcagagactcccagctct

SEQ ID NO: 174 - DNA, 4001 bp, Homo sapiens
gggcaagggacagcctgggcagtgaagctgttgctgggatctgaggatatagaaataaataagtcagactccctacctcaaggagctcactatccagtgggagagacaggcataaaagtaaacaaatgaaagtacaacaggtattatgatgaaaatttgctcaaacatccccaaatggttaaggtggtttcatgcctctgtacctttgtttatgttgctgctccccttacctggaacatcccctcctctccattctttttcaaaggaagtttgctaacagataaaactagagagagactggcagggactagggtatgaggaacttgtgtgaaacattaaggagtttggatgttatttagaggtcagtggggggataacagtatgtgtaaatgttgatgggaatgatccagtggggaaggacggtaaaaccagttatttatttgttcatgagtgggtaagaataaatggatgctgataaagtattcaaagtacaagtagacaactcttcagagatgcttgtgtgtaaaacagatcaaatacagatcaacgagagaagcctggaggggaatgtacatcaaagaaaggcttttaagatgacaaatacttgagactatctcaatgctgctggaaggagagcaaaaatactcattcatttactgcataactgtttcaaatggcaagaaagatcactacagtagcagtgagaggaactggggtaaagtagtccaggaatggaagtagggaactctagttagaggataatggcaacagcccaggtgacgatgatggagtagattaaggcagtggaagtagagatgagacagaactcaaatttacagtactaagtctttggtttcctttcataagacaactaccttcttaccctgctaaattctctcccaagcccctttaattttcacctctgatctcctttagctcttcccacttgaactcttcagatgctcctatagcccctcatatgcaccttaagcccctctaagctccagatccttccctctggaagctaagaggtggtgttagggaccctggactcagagtcagacaaatcccaaacagctgtgtgacctttggcaagtctcttactctcgctgatcctcagtctccttaagagggttcaatgggtgatccgactgtgacactattagtctttgatgccctcctcccatccccagtcgcctttccttgcagtcaaggccctaagctaccaccagcctgggaactccagctctgagccaggcctcagctatcttaatatgtgaccttgagcaagtcaagtcccttctctagaaggcgttttcccatttctataatgaggacaggtgtctctgagctgcctgcctcagggctgtcataagagtccaccttagcgtttggagaaccaaagcagacaaacgtggaacgagccagggctttgcagagactcccagctctgacaccaattagctgtgtgatcttgggcaagtgacctagcctcgcggagcctggctacatcatctgaagagctgggacagtactagtgcccacctcacagggctgtcctaaggcccagcagcccgggccgcccctcctcccgcctcctgcccgcctccagccaacccaggcccgcacctgcgcagcagctggatcttgtcgcggtagcggtcgtagaaagggttggcctggagctcggcctcggccccgaccccgctgctgtcggcgcccccctcgggccggcccgagccggggcgcactgggaagacgcgcagctgcgcgggtgacacgagccccaggcccagggcgcggctgcgcaccgcgcacaggccccggtagagaccggccacctgcaggaccgccggtcccgcgccacccgcagccgccaccaccacagcagccatggccgcccccgcctcctcctcctcctcaggcgcgtcggcctcggcccgcggcccgcgcgcccgctccatcccgctccgagtgcgccgcgcccgcgctccggcaccgaggttccgcgcgcccaaggttccgggcgcgggatagcggcgaggcggggcggggaggagggggcgcgccgctctggccccggcactgcgcgctctcgccgccctgtgtatgccacggcccgcctcctccagggaggctgcccaaattcaacgcccttcctccctctgggaccagcagcctctgcgcgccaagtccgttctctaaagccagcggatctccatgtcctcgcggtgcttgcccctggcactcgctgtagtgccaggcactcgatgtagtagtccgtccttcagcatcgaaggtcttttcatcaactataatcacagcagcaagcttctctttactgaggttgctatgtgcaggacactgagcggcttcatactctgtgtggcagtattatcctcatctaacaaataaggaaactgaggccgagagtaattatgtgacttgttcaagttctacccgacagctgagctcttttcaagatggcagctgcctcccaagcctccttttcctctgcttcctgacatcctccttgaactccagccacagtgacctattctctcccaaagaaacaccaggattactccttgaagagtccttattcaggccctttttgacccctggaatcctctctccttccattctctcaacccaaatgccacaatcttccttaccgtctgaaccaggtgtgagctcctagggtcagggacagtgacattaacatctctgtgtcccacctgctcacagaacagggccagtcctggagtgggctctctgggacagtactcatcatcaggtccttcttgtctgggttttgtctgattgaagcccctcctgggacaggggcagagccttcaactctgctcaatccaacctatgctcatggagatcagccctgagccctgccctgtgcgaggaacagtgtaatggaagatgaataagtccttcaagtatgccagcccatacctggctcacactcctaacacttgctgttttctctgtggatctgcatgtggctgcctcctcatcatctaagggctcagttcacatgtaagcacctccaagggacctaaatgacaacccctccatctctttatagtctttatcccatcactctattgcattctctttatagcagttatcattatctgaagttcttagatccttgtttatattaattcattgagcttacattctagtggagtgaaacagacagtaaatatataatgttaggtgatgctacatggtatgcagaaaaacagcaggccaagagagatagagataaggggacacttgagcagagacctgaaggtaatgtgggaatgctgggggaagagccttccaggtaggggaaacagcaagtgcaaaggccctgatgaggaggttattgagtctgaatgagtgagggcacagcagcagaaatgagaccaagaaggtatagggagggctagttagattgcttaggccttggttaaggactttgattttaaatcgaatgagatcggaagttactatatgttttaagcagtggagtaacatgatctactttttaaaaggatcatgctggctgctggtgggatttaggatatgtggaggcaaggatggaaactctcccaagggtgactaatttattccagtttgcctaggactttcttggctctagcattgaaagccccatgtcctgagaacccaccccaagtcctgggcaaaccaggatgttggtcaccctacagggaacagtaatccaagtgagagatggtggtacttggactaaagtgatagtgataaaaaaaagtggccagattttggttatattttgaaataaaagcctaaagatcttgctgatggagtcagtgtgggtgtgatagaatgaaaggagtcaaggatgacttgcaggtttttggcctgaacaacccgaaggacagagatactacttatgaagaggaggaaggctgtaggtagggtagactttggaggatggataatcagagtttggtttt

SEQ ID NO: 175 - DNA, 4001 bp, Homo sapiens
gacaatttattataatctgttagtagcacacagacaaatattagttaaaccagaaccatgtctacacagaagtgggcaatgacatgtgccattctatggcacacggtgtgcacttaatcatcatgttttagcattttgatcttctgcttatggcgctcaatttctttctgcagacgctcaatctccttcttatgatgaacgatttcttcttcatggtgttttttcaaagctgccagttgttctctactctgtgctctacaaggacacggtggctcagggtttaatttcaatccttcaccccaaagagatctcaaagcataacctgtaatgtctaagcaaggaataggagttccaattccatgggagtctagctggtcatcctcttctactcctcaactagtgaaagaataccccatcttaaattgaggtgtagccatcttaagaagaccaaagagcttattgctttcagattcctctttaaaatagaaaactccagagagatgtgacacaagtccctaataccttatgaggggaacaacccagggaacttgactcccctttagggaaaaaaaaaggaacaaaatgaggaagacagacaaaggggtgtagctaaaaggcaaatatccatttcctattccaatctgtctagagctttctttgcctatagaaatgaatggcccactgtaaggccaataaagggtctcttgcatgcgcagtacttggcagttcaatttaggttccaagaagggactggattacaatgttggtttggtcacatttaggcctcagttttccttaactacaaaatgtaggggctcaattagatagtctctaacggctgtaccttggctctctatacggtatggcaggtgtcatggtgataattctcaacagaaggcagaagtgaaaggccaaaggacaagcaaaagcaagattaattcctcactgctctccagagtggacagaagtcagttaaagataactcaaggctggcaaagggaggcccagcccactccatactcctaagcaggagagggaaatctacaggtctaggttgggctgagtagggcaaaagcctttagaagatggtgtccaaccataagtagctcccatgaccagctcccatcatcctcactcttgcggagtcgggggtctagaaacacctgagaagcctgaatgcatgcaggcttgcaaagctaaggcgtgctggcgaggaaggagagcgtagagggggtgacaggtgggtaagggccgagggagtcaggctgggaggcaaacgttgggcggtcggatctagacactgtgcgaagaatctgggggtgtttcgcacgacctgaggagaactccacgcgggagatggtaatgataaaggaggagttgagccgtgggttgttttggagacccgccggtggaaacggtttgggggcctgaaactgttgtgcaggtaactgggagtgccctatacgtggcaacggtcgggacatcaagggttagggtatactggattggggcccgggagttctgttgggggatggggcgcccaaggcaccaggtaggaacgggtggggcgattggcagtttaaggattggaaggccattgggagatccagggctggacttgggacccggtgagcctcaccggaaatatcgttcctcttcagcctgctctctctttccgaaggccccaccggcttcccggatggagcccgcgccccggtcgacattctcggactgcagagagacagggacactggtaaaggtacggaagcaaagatgggatccgcccgcggggctggagcagcggacactgccgcagcgtacctgatccgagccgaagcctcgggcttgcatggtcctcacgccccacacgccaagccacgtccgcgccgccaacgccgtcactgccattgctgctggagctgcacctctggcgtctctgccgcagcaagcagtctctcgttacgcgctaatggcagggacggccaagcacccaatctggtcgacggaggggcggatgaacacaggagtagcgaatcacgggagagcggaggcgggcttcccggagctcacagcgaatcccgagcaagagacgggtttcttcttagccaaccgctagcaagggcttagggccaaaggactggaaagaggaatgatggaggagtttagagagctgagtgaggagagtgccagaagccgaaatttcggctcttggacccatcagaatgaggcgtggcgtccacctccagcccacgatttcaattctaaagtcgttattattcaaagcccaaaggaagttttcccttccctggcctgctagcatcaataaaatgggggaattcggggtttgggagctgtgtccaggatgctgatgtccaggataccgacgtccaatgtgccctggcttagatatacataaatcgcgttcatttgttatgagaagtgtcagtgttctggctgggcgcggtggctcacgcctgtaatcccaacactttgggaggccgaagtgggtggatcacctgaggtccggagttcgagaccagcctggccaacatggggaaaccccgtctctactaaaaatacaaaaatcagccgggtgcggtggcacgcgactgtaatcgcagctactcaggaggctgagacaggagaattggcttgaacccgggaggcggaggttgcagtgagccgagattgcgcaactgcactccagcctggtgacaaagcgagactccgtctcaaaacaaaaaaaaaaaaaagaaaacccaaattataacttgaccacctcaggcacagtttcctaggacctcttgaggctgtgtttccccaagctatggtcactcatcttggctcagaataaaccttttaaaaatattttagtttgtttttttcgttagcaacatattgttgaatgggcttaataactgcacttttggcaatgtggtgcaatgcagtagaaaagagcaggccaggcgcggtggctcacacctgtaatcccagcactttgggaggccgaggcgggcagatcacctgaggttgggaattcgagaccagcttgaccaacatggagaaaccccatctctactaaaaaaaaaatatgaaaaattagctgggcatggtggcgcatatctgtaatcccagctactcgggaggctgaggcaggagaatcgcttgaacctgagaggcagggggtgcagtgagctgagatcacgccattgcactccagcctggtcaacaagagagaaactgtctcaaaaataaataaataaaaataaaaaataaattagctaggcgtggtggcacatgcctgtaatcccagctacttgggaggctgaggcaggagaatgcttgaacccgggaggctgaggttgcggtgagctgagatcacgccattgcactgcggcctgggtaacaagagcgaaactctgtctcaaaaaaaaaaaaaaaaaaaaaaaaaaaggataagtaggagtctagggaaagcttgaccttaacctcccttcatccatctaatgaatgtgaacaagacaacagtagtctttactctcatgaagtttatagctcttctctaactcattttctcttctctgtttcttcttttttagatgagagaattgggccagattatctacctgattgatgattataaaaataccttctttggggctgggcgtggtgtctcacacctgtaatcccagcacttcgggaggccgaggcgcatggatcatgaggtcaggagttcgagatcagcctgactaactccgtctctactaaaaatacaaaaatcagccgggcgtggtgacatgcgcctgtaatctcagctactcaggaggttgaggcaggagaattgcttgaacctgggaggcggcggttgcagtgagccaagatcatgccactgcactccagcctgggcaacagagcaagcctctgcctcaaaaaaacaaaacaaaacaaaaccttctttgttttctatgaaatagtaaaactggctttattgattatatttt

SEQ ID NO: 176 - DNA, 4001 bp, Homo sapiens
ccccaagcagggcctgcagctcaacagtatgaagcccacactccgtgacaagctcctggtgctaggaccacttggggaacctttcagtgggtccattctcaaatgcccatcttccttcacctgctgcatctggactaagatggccccactaagaagaatccatccacctttcttatgggacccttcacttcaaggtgcagtttagggttccactgctaactagttgggtgattgtgggtaagtatcatctcttttctgggcctgcttccccatttaaaggggaaaccgtccttaaccaatgtttctataagtccctgagtctcttcttgagatttctcgatgggtcctttctgctactatgtggcatcccaaatagatactctcccaggtccccacccccatgaactcaattttgctccacctgggttaccatagcattgtcaaagttacacccagcttctcaggtcctgcactgataggatggtcacagagcagagaaactgctgtctttggtccttgagcatcttcaaagtctccttggtcagctatgcaagtccctccccttcttagagggcctttgggcaggggttgcccttgtacctcagtttctgggttaatgacaaaaacatcttagctgtgcaaagcagctttttccccatccccctacctctctcctcccccctccctcctctacgccccctccctgtcccttgggaaaaaaaaaatcaattctgagtcaccaaacccgtctgactccatttccggttctcaatgcacccagaccctgacaatggccccatctttgcccacccagcatggggcagccccagggtggcctgggctcccacttaggtctgctctctgatgcccattaacagatatgctcctttctaggatgagaagattgttgacaatcttatataatatccagattatgaggggtcgtgggttaggcacgcaagagacaaggggcagctcccactctaagtccgttaaatgcaagtgcggggaatgatggatagaacgaaactgggagtcggatgtctcagaggagaacaagtgtcattagagacccctccgtgcagtctcctcctccacctcttctcacttgcaaacttcttcaggggcgtgatgcctgctgtcaccccgaaaggccacgaggccaggtgctccctggggcccagaagacaaagatcagaagaaggggctgtaggcccgctcactaaggcactcaggggcctagagaaggtgagagtaagagcagagagccaagaggcagggcaagaggcctgggaaaggacagtgggttggaggcatggatggatggaccgaaggatggagggagggaggatagatggatggacggacgaactaacgcggagagggcgggggtctaaaagcactgcagctgcaggcaaatgccgaaaaggagcaggaggtgtggggcaaaaggcgaaggaacaaggggggtgaggaagggggcacagaagtggggtgcgtgggaaacacgtggaggactgttgcggacagggaaagctggaggcaggtgcaggagggtcgcgagctgaggggcagcaggcaaggagaaagataaaggcaagcctatatgggggcaggtattagcgactggcagaggcagaggttggcagggtgggctgcgagcggtgagcaggcgctaggacccggaggcgcgaaggtgacggagcgggcgggcactaggacccggcgggtcctttgtttggggggccggggagccggacggcggctccagtcggcggctcccctcagctggcgggggcccggaaggggggaggggagatagtgatggggtccccggactttagggtggctttactcaccgtcagccgcgggcaggtcggcccgctccacccacgagctccagctctgtcccgcgaagtcatcgagactcggcacccgccgctccagagcggccattgctgccgccgcgcgttcacgcaccgccatcaccgccgcggacgcgcgcccgccctggcgccgccgccgcgcggccccctccccctcgccccgtcgcgggcacgcctcccctcctccccacctgcctttccagcgcagtctttgcgcaagcgcaacacaggttgcctgttccccgcgccccccccccccccacccactcacagccttctgggaagtgtagtcttggagcggatgctattgcctaccgagcttgcagcaagagtccctccgaaatgcacaattgcagggggaaaagagaagaccaaagctccaggacctcctcttctaacccttatgcacacattatttgtgctaccagtccactctcccaagctcactgcatctctccccagccccaaacctctctgcccagacgcccctctaagccgtgcgtccgccagctggctggcgccccttcccgggctggcggccacgaagcgactccgctcccctgtagatcgaatagggtaggtgcagggaggtgggcgctgtgaatcagaagggcaaggggagggagtctgtaggaggtgctgaaggacacaggggtggtgtgggggagggcctcggctcccgtgtcgtgcctcctctgtgggaaacccacgctgccctgatgcagagcagagggttggcgtggcgttgtctggatttgagaggacctggccaagctgaccaagatcacctgtcatgatgacaggatgacagaaggctgtctccgagccagagccagccccagaactggggtggccccgaggcagctggtgtttgcagcatctctgctgatctgtctctcttctcttgagaactgcgatcgataccctgtacagcctcttcccaaaccctggctggaccctgactccatccatcactttgccttctttttctaatgaatactttctctgctggaagggctgcttctgaagcctcggcatagggagatttctcatcagagctgtcatcttccttgctaaggtctggaaagtaccttaatcatccatttctttcatcttctcagctgataacatttcttcccaccctcacacaatcagacaaaagtctgcctactccatttcccgccccccccccgccgccatcgcattaaaaaagtaatactaatcctttttcctcctcaacctctcacacctcacccccgacgcttgaccctttagctaaggggaaaacaagttggggagcaagacctcagattttcttctccttttcatccagggaaggtgtaagtacttcaagaataatctctgagggcagggaatctcaacctgagacccacagatgatccctagggcatccaggaatcaggtaaaaattaaatgttcaattgtacccaaggtatttttctaggggatgtaaatgtagtgtgtgactctctgaagagggatagaggtgcaagtttgttcaacaagaagctgatagttaagaaagtgaagcatatggccctcaactcctgacaggaagcctgtttgggtcacagatggtaggagaacaaatggaaacagctttgtggaagccactatctctcaccttttgagtttgctccagaattgctaatgagtcccagttactttggtctaattgggtgccaccaaaagaggagatgtcactagaccagagcctgctaggaataactgctctcctctctgcaccccaagcaacagagtctgactttgttgcttggggtgcacagtggaaagcagtagaatgatatcttggtgaaagtcctgatattggttcaagaacttaaagcaagggagaggaagaaaaaataaatccccggaaggactccagtctcagatccttcatggcaagtacttgcagcactgtttattcaaatatataataacaagcaccagaaaacaacatgcaacattctccccccacccctgatctgcaatcccagaagtaggaggctcatgactatgatagtgaaggaaactcatgtccaggaaaggtcctaggtgggcaccctggtgctgggttagagtctagtggga

SEQ ID NO: 177 - DNA, 4001 bp, Homo sapiens
ggccggtctcgaactcctgacctcaggtgatccgcccgcctcggcctcccaaagtactaggattacaggcgtgagccaccgcacccggccattttgataatttttgaaaaaataaaacaatcggccaggcacggtagctcaagcctgtaatctcagcactttgggaggccgagacgggcggatcacttgaggtcaggagttcaagaccagcctggccaacatagtgaaaccctgtctctactaaaaatacaaaaatcagccgagcgtagtggcgggcgcctgtagtcccagctactcgggaggctgaggcggaagaatcgcttgaacccgggaggcagaggttgcagtgagcttagatcgcgccactgcactccagcacgagcaacaagagtgaaactccatctcaaaaataacaataataataatatgccgggcgcagtggctcacgcctgtaatcccagcactctgggaggctgaggcgggcagatcacgaggtcaggagagcgagaccatcctggctaacacggtgaaaacctgtctctactaaaaatacaaaaaattagccgggcgtggtggtggccgcctgtagtcccagctactcaggaggctgaggcaggagaatggcgtgaaccccggaggtggggcttgcagggaactgagattgtgtcactgcactccagcctgggcgacagagcaagactccatctcaaaaaataataataataaataataataataaaatgatcaaatttcttatctataaaaccaggataatgacaaaatctactttactgaattttggtgagtacctgccattgataaagtgtataaagtctcggcaaaatgcctgacacatagaaagcactcaataaaggttaggtattgttgttattatttatacacctcttttcttccctataagactgtgagcaacctgagagcaagaatcttgcccctagtgtctgttttgagcctgttttccgtatgtaaaatgggtatcattacactatctaccatatagaattgtaccaaacaaggtaacatacctaaaacacttagcaccagcataaaatgctcaataaacatgaatgattattatgtcgcacttttgtttctttacagtgactgaagagcatcttgcctaggtgacagacctgaatgtgatttccagctccttctagttaggcgggcctaggttagttactgaacctcagtttcctcattcccagcaagaatgacgacacatataacgcatattcagtatctaatgcagtatccggcacccagtgactgctcagtacataggaggccagctccccttcccatagcttctacttttcccctcaaagttaccggttctgggcaggtagttggcctgcaacttggcaaattgggtggaaacagaccccggggtgagaatttccccaatttgcattcgcatccatctcccaatgctccagcctctactaggacgtctcgcagggactgtggcctcctagggagcctggtcagttcaactgctccgagcgaactttccctccgcctctcccacacctgaaccttcgccgcccctccctgcgcaccgctcctccagaccccccaacagcacgctctttccttccgtccctcccatcctccccaagccccgtttttcaaccttcttcagaccacaatccctctcgcctgtgaatccccaacgctgttcccttctctgtccccgacttcgctttcatcatctccaggtgtcccccaaactcctcccgtcttacgcctccaggccctacctggttcccaacgccctctcatcccccagcgtcccacctgcactttccgcctcttcagcgccgccgcgtccagccacacgccgcaggcctcctcctcggggcctgtccgcctcatggccgctgaggagacgaagccggcaggacgccggcgcaggctcccggcgcctcagggaacgccagaaccgcggccgccgacgttcggatctcgcgccaacgctgggggcggggctacgtcgcgaccgccccgggcgccagccccgccccggcaaggccctggcccccttcgctgtgccccgcccacgcactaactttcgcggccggtcccttgagtgcgtgcggcatatttccctgcgcggaggagtgcgtgttctttctgatccgctctttcaagagcggattcggaagctgctgtgtgaacggttctcgacagcctcagaaatgtacattttctttttgctgtattgaaaatttcttacagtatttcccgggcttaggaatttgttcgtgtcatcgctgaatcttcgcgatcacccccagaaggaagtggctgagccgagatcaggcccgtcgactccagaccaggggtcctcgacctaagtggttaccagacactcgagtgtgcgaacaactttggtaattttttttttttaatgtaagcgtaactacgaagccacatgggagaggattttgaagaggttaaaatttggggtcaggaactagatttcagtcctgctttcaccgtttactgtgccttggattttaaagaggatcaaatgaggttgtgaaagtactttgtgaattcagaaaaccccttggaaatgcaaaaatgttggcacccccacccatccttccgtccctaaccacaatctccatagatggaatatatgtacattatacgtaatgtttacatattgtatatgtaaaaaaaatttttttttgagacggagtctcactgtcgcccaggctggagtgcagtggcgctatctcggctcactgcagccccgcctcctgggttcaagcggttcttctgtctcagcctccctagtagctggaagtacaggcgcacgccaccacacccagctaatttttgtatttttagtagagacggggtttcaccattggccaggctggtctcgaactcctgacctcgtgatacgcctgcctcagcctcccaaagtgctgggattacaggcatgagccaccgcgcccggccaaaaattttgtaattttttttttttggtggagggaggatagaagctcagccacctcttgcccagtctgcagcaggtcagccaggaacctcaaccatctctgcagccagagcctgtcttcatggtggacagagccatctcgctttgtcacccaggctcgggtacagtggcacagtctcagctcactgcagcctcaacctcttgggctcaagcgatcctgccacctcagcctcccaagtagctgggactacaggtgtgtgccaccacgcctggctaatttttgtatttttagtagagatgggttttcgccatgttggccagactggtctcaacttcctgccctcaggtgatatgcctgcctcagcctcccaaagtgctgggattacaagcgtgagtcaccatgcctggcctatatcaaaatatttatttatatacacatattttatgtgtgtgtgtgtgtgtgtgtgtgtgtgtgtgtgtgtgtgtatttcataaggtcccccatgatatttcagcagtgaagtgatatttctaattaatttgggttttcttatcttcccaattttccttcattgtatatatattgctgtgtactatggaaaaagcaatattataaaagttaacatacttcttcggtgcgcatgcgacgaggctcaatatgtgtggtggagtgtgcacgcccctgccccctccactaaaaacaaaacaaaaaaaccctccttaattgaaggaaaaaccaaacaaaaaaagtctttgtcagatcataaagtgggattatcatattttaaacacattattttaactacttataaaactttagtaataaaactgccgcccactcccttgccaaacaaattttgtatatatagatatggtatataaggccccaaccccatcccccagcaaagataaaacaagaactgctccctgcaccctgtgtccactcccaggggccccagcttcctccggaaaacctccagtaatgtgagcaggggcccctcccgga

SEQ ID NO: 178 - DNA, 4001 bp, Homo sapiens
actcagggccccaggagatggcagacatgcctgggaaggccaacaccctggccctgtagccggaaagcttggagggccactggaggatcacgtccacggagcctggcgggcaccatccaccactgccagtggtaccagaacctttcctgccttcccaatgaggccctccccgaccctccactcatgaaatacacctgaatcaccccgtgcattccgggtgctccctaaaccccagtcctgtccccctgtacttctgccatccgggtcggcctccccagggaatgtggtgctcagggaggggctgtgggatctgttcacagtgatcccacagcacctagcctgaactgcacacagcacacatttgctcacagcgaggctggggctcctacaggcccagcaccctctggacggcggccaagagccagctagagagagggacggccaatctgccaccctgctgcccgggtcttctgcaacacctgggactggcagcagcctcaatcctgagagacctcacacccggcaaatggagctccagacccgcaggaaaggctgagtcctctgagaatttattactacggatcacagcagcaacgggcgggaagggcggcgccagactcatttgccccgcaggtagatcttgggggtctgccagccttcgggggcttcctttagccccgccttcagccagatgcgcctcaggtctttctcgaacttgatctgcaagacgcagagagagggaccgccaagtaattcgtggcaaagaaacgtgttctcagcactttgccctcccagggccaagcagggggccactcacctgcttgcgtctcaggcgtccctcctggaccttcctccgcaggaaccgcgtcttcttcaccagcttccggtacttgtggtggttcatcttccgccggcggatcttcagcacgtttttgcactgaatttgaggcgcatccgcgacgccttcatccccctgctcggccccttcccctatctggctgggcggacactggtaggattgcggtggagccacagtccctgcggtcccggtatccagtctgggcaggaagcagcgggccgtgagccagctctccagggggctgacggacatcttcctggggaccagcatctcctccagctccagctgggcccccttgcgagggagagaggccgccctacctgggccggccggcgatgtgctgtaaaggggcccgcagacccggctgcccagcactccagagacgggccaaggcgggcggccgcctgcagaaaaccagacgccacggtcaccgctcgcgagaccacacaggcccgtcgggttgaggagcagcaggttcgtcccagcgaggatcccccgcacctcattcctggcctgaacccctgaggttccctctgtgagcatcggaagcttagaggggaaagagtgtgtgtgtggccaccggccctgccccagcggagctgctgagacccgcactcctaaccaggtgtgcatcctcccatccgcccccgcgcggcttcctacctgcccaaggaacggccctcaacagctgggaagtcaggcgccccaggagcatggtctgtgggcggcggccacaggtcccaggggagctggaacacaagtgcccgttcaggtcaggcggcagcgccttcagtagtcgcgggcgggccgggactggggcgtctggtcccgccgcgaccctcgcttcccttctccctccgccaccccaacccacaaggaggactttgcttccaacacagctcgcgccccgaggctcccaagcccccgacgcgggcggtgtcgcgctcggacgcaccgaaaggtcccagaacggggaggccggccccctccccgggttcacccccgcgcgaatcgcgttgcctggcgcccggaccctctcggctggaccccgggcccgcctgccgcagcgcccggcgccctcaggcctcccgctgacccttcccaagcccgacctcgacgcggctcaaattgaccgttctgcggccgccctcgggcacttccggtccgtccccaagtcggccccgatcggcagcggccacccggcggttcctacgcacagcgcccgctggcgtcctcgcggcccccgattctgcattggctcaggccccgccgggcccgaaaggcgacggtttccggttagtggaatcacggtcccagtcctcgcgcggttcctcagctccgcctggtcccttacggaggcaaaaaactacatttcccacaatcccagggggtgcgggccctggatatacccgcaggtccagaatcgtttccggaccacccaggggccggattcccaacgggccgacggaagtgcgggctcaagactacggaagtgacgtatctggcaacggaagtggagttacgtggaaggcggaagcgtctagagctatttcccccgtttttgctagagaccaaggacccggaataagcactgagcctgcggtaccgggcctccccgactcctcattcctggggttaaaaaaaaaaaaataagacgcaggctgggcgcggtggctcaggcctgtaatcccagcactttgggaggccgaggctggtggatcacctgaggtcaggagttcgagaccagcatggccaacatggtgaaaccccgtctctactaaaactacaaaaattagcctagcgtggtggcaggcgcctgtaatcccagctactcgggaggctgaggcaagagaatcgcttgcgcccaggaggcagaggttgcggtgagccgagatcgcaccactgcactccagtctgggtgacatagatcctgtctcaaaaaaataaataaataaataaaataaaaatcagactcacactttttgtctgagaactaaaagcagcctctctggtggattgggtttggctgagcccctaatgatgctccccagagtaggcgctgccaacgtgtagcttcacctttctactccagacaggcccctttgacctccgtgaggttggctaatatagagaccccagcatggacttgcaggggcgcctggtgggagaggggtgtggagcagagcctgctgggcctgctcggagacttgccttgcaggagggtcttccagggacgcttagcaggaagtggaaaggccaggtcatctgccgggcccagcctggctaagcagtgagtgacaggtaggataggccagtgtgaggacataaagttcaggctccaggcccacctctacaactgaggtccccagatgactctacgttacccctcagaggggctacttgggactccaagcaggaaggtttacgaacgttatttgcgggcccgcccttcacccctgctgcacagcttcccctagtggatttggccgtaaatgagcagactggtgcctccagagcagccctcaccttggtgcccctgtgtttgtcttcacccggctggggtccagggagatgcaaagaatccatcagagaacaggtgagcatgttgagaagaaccagagaaccagaaataacctgggctggcaaccttggccttcaggcttctgaggcattgacgtgcagatataagtacctcccctgagttagggactggtagaagaaacgggatgtggacatttcagtctgagaaagtcttgaggagcaggatgaaccagggtgtccttccccctctcaggaagtaatttcagggaggtgaagtgaggaagaccactctgttggggtccctgtacccaataggctccaggccaaaagggaaaggtcccagctagagcaggacccagctgctacaaggctggggaattatcattcagctacaggagctgcatggagccggcccgggaggcttgcagacagtggccaccccgatgaatgcccgggccagacctgactggctgccgcccacaggagtggcaggaacacttgttggaagcgccagatgcttgtgtgagcagagctgccaagctagatgagctggaactagactaggaagatcaatcctttacaaacatctgaggaagaaaaa

SEQ ID NO: 179 - DNA, 4001 bp, Homo sapiens
ccatccgggtcggcctccccagggaatgtggtgctcagggaggggctgtgggatctgttcacagtgatcccacagcacctagcctgaactgcacacagcacacatttgctcacagcgaggctggggctcctacaggcccagcaccctctggacggcggccaagagccagctagagagagggacggccaatctgccaccctgctgcccgggtcttctgcaacacctgggactggcagcagcctcaatcctgagagacctcacacccggcaaatggagctccagacccgcaggaaaggctgagtcctctgagaatttattactacggatcacagcagcaacgggcgggaagggcggcgccagactcatttgccccgcaggtagatcttgggggtctgccagccttcgggggcttcctttagccccgccttcagccagatgcgcctcaggtctttctcgaacttgatctgcaagacgcagagagagggaccgccaagtaattcgtggcaaagaaacgtgttctcagcactttgccctcccagggccaagcagggggccactcacctgcttgcgtctcaggcgtccctcctggaccttcctccgcaggaaccgcgtcttcttcaccagcttccggtacttgtggtggttcatcttccgccggcggatcttcagcacgtttttgcactgaatttgaggcgcatccgcgacgccttcatccccctgctcggccccttcccctatctggctgggcggacactggtaggattgcggtggagccacagtccctgcggtcccggtatccagtctgggcaggaagcagcgggccgtgagccagctctccagggggctgacggacatcttcctggggaccagcatctcctccagctccagctgggcccccttgcgagggagagaggccgccctacctgggccggccggcgatgtgctgtaaaggggcccgcagacccggctgcccagcactccagagacgggccaaggcgggcggccgcctgcagaaaaccagacgccacggtcaccgctcgcgagaccacacaggcccgtcgggttgaggagcagcaggttcgtcccagcgaggatcccccgcacctcattcctggcctgaacccctgaggttccctctgtgagcatcggaagcttagaggggaaagagtgtgtgtgtggccaccggccctgccccagcggagctgctgagacccgcactcctaaccaggtgtgcatcctcccatccgcccccgcgcggcttcctacctgcccaaggaacggccctcaacagctgggaagtcaggcgccccaggagcatggtctgtgggcggcggccacaggtcccaggggagctggaacacaagtgcccgttcaggtcaggcggcagcgccttcagtagtcgcgggcgggccgggactggggcgtctggtcccgccgcgaccctcgcttcccttctccctccgccaccccaacccacaaggaggactttgcttccaacacagctcgcgccccgaggctcccaagcccccgacgcgggcggtgtcgcgctcggacgcaccgaaaggtcccagaacggggaggccggccccctccccgggttcacccccgcgcgaatcgcgttgcctggcgcccggaccctctcggctggaccccgggcccgcctgccgcagcgcccggcgccctcaggcctcccgctgacccttcccaagcccgacctcgacgcggctcaaattgaccgttctgcggccgccctcgggcacttccggtccgtccccaagtcggccccgatcggcagcggccacccggcggttcctacgcacagcgcccgctggcgtcctcgcggcccccgattctgcattggctcaggccccgccgggcccgaaaggcgacggtttccggttagtggaatcacggtcccagtcctcgcgcggttcctcagctccgcctggtcccttacggaggcaaaaaactacatttcccacaatcccagggggtgcgggccctggatatacccgcaggtccagaatcgtttccggaccacccaggggccggattcccaacgggccgacggaagtgcgggctcaagactacggaagtgacgtatctggcaacggaagtggagttacgtggaaggcggaagcgtctagagctatttcccccgtttttgctagagaccaaggacccggaataagcactgagcctgcggtaccgggcctccccgactcctcattcctggggttaaaaaaaaaaaaataagacgcaggctgggcgcggtggctcaggcctgtaatcccagcactttgggaggccgaggctggtggatcacctgaggtcaggagttcgagaccagcatggccaacatggtgaaaccccgtctctactaaaactacaaaaattagcctagcgtggtggcaggcgcctgtaatcccagctactcgggaggctgaggcaagagaatcgcttgcgcccaggaggcagaggttgcggtgagccgagatcgcaccactgcactccagtctgggtgacatagatcctgtctcaaaaaaataaataaataaataaaataaaaatcagactcacactttttgtctgagaactaaaagcagcctctctggtggattgggtttggctgagcccctaatgatgctccccagagtaggcgctgccaacgtgtagcttcacctttctactccagacaggcccctttgacctccgtgaggttggctaatatagagaccccagcatggacttgcaggggcgcctggtgggagaggggtgtggagcagagcctgctgggcctgctcggagacttgccttgcaggagggtcttccagggacgcttagcaggaagtggaaaggccaggtcatctgccgggcccagcctggctaagcagtgagtgacaggtaggataggccagtgtgaggacataaagttcaggctccaggcccacctctacaactgaggtccccagatgactctacgttacccctcagaggggctacttgggactccaagcaggaaggtttacgaacgttatttgcgggcccgcccttcacccctgctgcacagcttcccctagtggatttggccgtaaatgagcagactggtgcctccagagcagccctcaccttggtgcccctgtgtttgtcttcacccggctggggtccagggagatgcaaagaatccatcagagaacaggtgagcatgttgagaagaaccagagaaccagaaataacctgggctggcaaccttggccttcaggcttctgaggcattgacgtgcagatataagtacctcccctgagttagggactggtagaagaaacgggatgtggacatttcagtctgagaaagtcttgaggagcaggatgaaccagggtgtccttccccctctcaggaagtaatttcagggaggtgaagtgaggaagaccactctgttggggtccctgtacccaataggctccaggccaaaagggaaaggtcccagctagagcaggacccagctgctacaaggctggggaattatcattcagctacaggagctgcatggagccggcccgggaggcttgcagacagtggccaccccgatgaatgcccgggccagacctgactggctgccgcccacaggagtggcaggaacacttgttggaagcgccagatgcttgtgtgagcagagctgccaagctagatgagctggaactagactaggaagatcaatcctttacaaacatctgaggaagaaaaaatgcagtggaagaatcggggagggtgcatgggttatgattcctaatttttaaacaaaggaactctagtctctcaagggaagtacacagttgctgcacatacctgttttccccaaaatacccatttgtcttcaggaaagtttttctttagaaacttcagaattttggtcgggcagagtggttcacacctgcctgtaatcccagcactctgagaggtcgaggcgggcatactgtctgaagtcaggagttcgagaccag

SEQ ID NO: 180 - DNA, 4001 bp, Homo sapiens
tggcagacatgcctgggaaggccaacaccctggccctgtagccggaaagcttggagggccactggaggatcacgtccacggagcctggcgggcaccatccaccactgccagtggtaccagaacctttcctgccttcccaatgaggccctccccgaccctccactcatgaaatacacctgaatcaccccgtgcattccgggtgctccctaaaccccagtcctgtccccctgtacttctgccatccgggtcggcctccccagggaatgtggtgctcagggaggggctgtgggatctgttcacagtgatcccacagcacctagcctgaactgcacacagcacacatttgctcacagcgaggctggggctcctacaggcccagcaccctctggacggcggccaagagccagctagagagagggacggccaatctgccaccctgctgcccgggtcttctgcaacacctgggactggcagcagcctcaatcctgagagacctcacacccggcaaatggagctccagacccgcaggaaaggctgagtcctctgagaatttattactacggatcacagcagcaacgggcgggaagggcggcgccagactcatttgccccgcaggtagatcttgggggtctgccagccttcgggggcttcctttagccccgccttcagccagatgcgcctcaggtctttctcgaacttgatctgcaagacgcagagagagggaccgccaagtaattcgtggcaaagaaacgtgttctcagcactttgccctcccagggccaagcagggggccactcacctgcttgcgtctcaggcgtccctcctggaccttcctccgcaggaaccgcgtcttcttcaccagcttccggtacttgtggtggttcatcttccgccggcggatcttcagcacgtttttgcactgaatttgaggcgcatccgcgacgccttcatccccctgctcggccccttcccctatctggctgggcggacactggtaggattgcggtggagccacagtccctgcggtcccggtatccagtctgggcaggaagcagcgggccgtgagccagctctccagggggctgacggacatcttcctggggaccagcatctcctccagctccagctgggcccccttgcgagggagagaggccgccctacctgggccggccggcgatgtgctgtaaaggggcccgcagacccggctgcccagcactccagagacgggccaaggcgggcggccgcctgcagaaaaccagacgccacggtcaccgctcgcgagaccacacaggcccgtcgggttgaggagcagcaggttcgtcccagcgaggatcccccgcacctcattcctggcctgaacccctgaggttccctctgtgagcatcggaagcttagaggggaaagagtgtgtgtgtggccaccggccctgccccagcggagctgctgagacccgcactcctaaccaggtgtgcatcctcccatccgcccccgcgcggcttcctacctgcccaaggaacggccctcaacagctgggaagtcaggcgccccaggagcatggtctgtgggcggcggccacaggtcccaggggagctggaacacaagtgcccgttcaggtcaggcggcagcgccttcagtagtcgcgggcgggccgggactggggcgtctggtcccgccgcgaccctcgcttcccttctccctccgccaccccaacccacaaggaggactttgcttccaacacagctcgcgccccgaggctcccaagcccccgacgcgggcggtgtcgcgctcggacgcaccgaaaggtcccagaacggggaggccggccccctccccgggttcacccccgcgcgaatcgcgttgcctggcgcccggaccctctcggctggaccccgggcccgcctgccgcagcgcccggcgccctcaggcctcccgctgacccttcccaagcccgacctcgacgcggctcaaattgaccgttctgcggccgccctcgggcacttccggtccgtccccaagtcggccccgatcggcagcggccacccggcggttcctacgcacagcgcccgctggcgtcctcgcggcccccgattctgcattggctcaggccccgccgggcccgaaaggcgacggtttccggttagtggaatcacggtcccagtcctcgcgcggttcctcagctccgcctggtcccttacggaggcaaaaaactacatttcccacaatcccagggggtgcgggccctggatatacccgcaggtccagaatcgtttccggaccacccaggggccggattcccaacgggccgacggaagtgcgggctcaagactacggaagtgacgtatctggcaacggaagtggagttacgtggaaggcggaagcgtctagagctatttcccccgtttttgctagagaccaaggacccggaataagcactgagcctgcggtaccgggcctccccgactcctcattcctggggttaaaaaaaaaaaaataagacgcaggctgggcgcggtggctcaggcctgtaatcccagcactttgggaggccgaggctggtggatcacctgaggtcaggagttcgagaccagcatggccaacatggtgaaaccccgtctctactaaaactacaaaaattagcctagcgtggtggcaggcgcctgtaatcccagctactcgggaggctgaggcaagagaatcgcttgcgcccaggaggcagaggttgcggtgagccgagatcgcaccactgcactccagtctgggtgacatagatcctgtctcaaaaaaataaataaataaataaaataaaaatcagactcacactttttgtctgagaactaaaagcagcctctctggtggattgggtttggctgagcccctaatgatgctccccagagtaggcgctgccaacgtgtagcttcacctttctactccagacaggcccctttgacctccgtgaggttggctaatatagagaccccagcatggacttgcaggggcgcctggtgggagaggggtgtggagcagagcctgctgggcctgctcggagacttgccttgcaggagggtcttccagggacgcttagcaggaagtggaaaggccaggtcatctgccgggcccagcctggctaagcagtgagtgacaggtaggataggccagtgtgaggacataaagttcaggctccaggcccacctctacaactgaggtccccagatgactctacgttacccctcagaggggctacttgggactccaagcaggaaggtttacgaacgttatttgcgggcccgcccttcacccctgctgcacagcttcccctagtggatttggccgtaaatgagcagactggtgcctccagagcagccctcaccttggtgcccctgtgtttgtcttcacccggctggggtccagggagatgcaaagaatccatcagagaacaggtgagcatgttgagaagaaccagagaaccagaaataacctgggctggcaaccttggccttcaggcttctgaggcattgacgtgcagatataagtacctcccctgagttagggactggtagaagaaacgggatgtggacatttcagtctgagaaagtcttgaggagcaggatgaaccagggtgtccttccccctctcaggaagtaatttcagggaggtgaagtgaggaagaccactctgttggggtccctgtacccaataggctccaggccaaaagggaaaggtcccagctagagcaggacccagctgctacaaggctggggaattatcattcagctacaggagctgcatggagccggcccgggaggcttgcagacagtggccaccccgatgaatgcccgggccagacctgactggctgccgcccacaggagtggcaggaacacttgttggaagcgccagatgcttgtgtgagcagagctgccaagctagatgagctggaactagactaggaagatcaatcctttacaaacatctgaggaagaaaaaatgcagtggaagaatcgg

SEQ ID NO: 181 - DNA, 4001 bp, Homo sapiens
atccctaaaatgaccccatatgagaatcagctcattaaagctcatgcataggtactgcatagcatgcatgcacttaaaattatgagatgaaggttacgtgcaagtgcacaagggccaaagtaactaagcaacctacctatcaatcaaaagccagatgctggttaaagattaggcagctcggggaagagaaaaaaaaaacacataaaaaggcccaaagtacaccaaactgacgccgatctcatttcacagagcttagcccactctcccctctccgagagtgttactgtgcttaataaacttttgctactttgctatttgtgtgtgtcacatccaattctttgttcgtggcaccaagaacctgggacttcaccacatcagctggtaacagttcctctctgagcctctgtttcctcattagtaacatgaagaggttgaactggaaatttcagggttttcatgtgccaaccctaattaactggaagtgtctgttgagaaggagctcaaaggcatgtccaggtgcaggagggacaaggctgagagagcaagttcatgggccacaaattgctatcattctatgattttaaagcccatctagcaaactagtagttggtggccaaatgtgctaatggtcatatttcattagtaccacctagtattttaaaattgttagttaccaaaatttttaaagctggaaatttcacgtaaaagatactgacatggcatcggtaggctgaatggaaatcataactgccccttttcacttggagcaggcaccatcttccttcattgccccactagtttgtcacctgcctggccctgggaggcattgtaaccctgacctaatcccccatcctctctttctgtctctcccacctcactgcccccacatagaccccacttgccttcatcaggggcattcttgtcccacacggaccacatctggacactgaagaagggagcccagcaagcgatgtaggccagcacgatgacaaaggtcatcttcactgttcggatcttggcccgtgagatggtgttgatgctgctgacccgagatggcagcccccgagtggtggcagctaaggtggaaggtgagggcctgtcccaagtcctccagccccctcctcccacccgccaggcctgtgtcttgacttttaggtttttacagatctcatggcagatgaggctgtagcaggccgtgagcatggtcaccggcagaacgaagatagccagggtggtccaggtgaggtaggcccgtggcccccaagggaagccgaagtctgcccagcagtccagcacccctgagccctggatcacctcccgcagggaaaaaatgaagacttgagggaggctgaagatggcggccagcagccagggagcagcgatgagcaggtaggtggactggcctggctgctggaggctgcgcagggggtgacagacagccaggtagcggtccagcgtcatggccagcagcatgtaggtggaggcaaacatgctgagcacctgcaggtacttgacggccctgcacaggaggtcggggccctggaagcggtaggtgatgtcccacagcagctgtggcagcacctggaagagcgccacggccaggtctgtcagggctaagtgcagcacgaacaggtgcatgcgggagcgcttgcggcccagctggcccagggtcagcagcacagccaggttgcccccggtcgccagcaccaggacagtggccaggactccgatctccaccttggccagctcctcatcccggcccagccagggtgttgtggcattgggggcagagagggtgccccgaggggtggggttggcatcccacagaggcccagaatccatgagcaaggtttgctgggagggaaggatgaagggagggtgtggatgcaagtggagaggtttgatggataaaatggagtggcaggggaggtggagagaaaggagaagcgttgagaatgacagggagaaggcttgcaaataggcggaaatcgttcagaggactgggatagagaggaggagggaggatgagattcggaaggagaaaatgtgactgggatcgacccaggagagggagaaggaggggtcaggaagatggggaatcaggacgggaagaatgggggacgctgtgcagagtgaggcttctgggagggaaagaaggctggggaggggctaccaccctccaatccgcctcaaattctctttctccaaacttttctggaagccaagagcggaagcccttcagcctgcttggaggcgcggtccggggcagtcggtgtcgcgctcagggcaggaagccccagccaagcccgctcgctctgcctggtgagcagcggctggagcgcagcggcgcggctcgggcgggttttatgggctcccaggccgagcccggcggcctgcggctcgccagttggctcctgcagaggagggaggagtgaggttcgcaggcacccacccggcgggatgaccgagaggccggctgctggagggagggggggcagagggggtagcggacgagggacagggagcgagacaagcaggcgacgcaggccagcgcccagcagccggcaggacacaccgacccgcaggcaggcagataagctcctctgcgcactcaccctggaactctcgggccgtctctccacaggtgcatccccgggggatggtgagaggcagtcactcctcccacctacgcgggggcacttcggctggcggctgttggcgcgccctctgccagccggctagccggtgcaggatccacaatcttcaagggtggccaggtgagcgaggcggcatccctgattgccagtcacctgggagtgacgtctgaccgcagaccctgttgagggactgcgaggcatagggaaaggaagaaaaagtgagggtatatgtgggggtggggagacgaaggagctagacctgagagccctggtgcttgatcggtgggaacagccggagaaattcccggtatttgcgtccccaagggacatcttaacttctggcctatgtgcttttcgtgcttaggtgcttccaagatcctaaacgcagttaaccactcggcgaggtagaaaacaggcccagagaagttcaagaacttgctgtagaagattactgaacgagtaagcagcagaggccggtctagaaccagccccgtgtgcccttctgacagcgcagcagcagcacttaacacctaaccggcttggctaaattctatgtgagaggcactggtgctgacggtaaaaataaaaacaaaacaccatccagtccagaggcagcttacagctcaatagagaaggtattgtgtggtgttggctgtgaaattcacttaatcttcagtatgcaagatggactattgggactctccctagagcagattagaagttaggagtgacagactgggcgcgatggctcacgtctgtaatcccagcactttgggaggccgaggcgggcagatcacgaggtcaggagatcgagaccatcctggctaacacggtgaaaccccatctctactaaaaatacaaaaaattagccgggcgtggtggcgggcgcctgtggtcccagctactggggaggctgaggcaggagaatggcgtgaacccgggaggcagggcttgcagtgagccgagaacacaccactgcactccagcctgggcgacagagtgaaactctgtctcaaaaacaaacaaacaaacaaacaaacaaacaaacaaacaaaatttaggagtgacaatagtagggtcccagactctcagaaagggcagagtctgtgacaggagagaagtccttttgtcttgctttttttttttttttttttttttttgagacagagtcttgctctgtcgccaggctggagtgcagtggcacaatctcggctcactgcaacctctgcctcccaggctcaagcgattctccctcctcagcctcccaagtagctgggatcacgggcacccgaaccacgcccagctaattttgtatttttagtagaggggggtttcgccatgttg

SEQ ID NO: 182 - DNA, 4001 bp, Homo sapiens
ctgttgcccaggctagagtgcagtggcaagatcttggctcactgcaacctctgcctcccgggttcaagtgattctcctgcctcagcctgccgagtagctgggattacaggcgagtgccaccacaccaggctaaattttgtatttttagtagagaccgggtttcaccacgttggtcaggctggtctcaaactcctgacctcgtgatttgagacggagtctcgttctgtcgccaggctggagtgcagtggcgcaatctcggctcactgcaacctccacctcccgggttcaagcgattctcctgcctcagcctcctgagtagctgggactacaggcacgagccaccacgccccccctaatttttgtatttttagtagacagagtttctccatgttggccagaatggtctcaatctcttgacctcgtgatccgccagcctcagcctcccaaatgggattacaggtgtgagccactgtgcccggcctatttatttatttattttgagatggggtcttgctcttgtctcccagactggaatgcaatggctcgatcctggctcactgcaacctcacctcctgggttcaagcgattctcttgcctcagcctccagagtaagctgggactacaggcgcgagccaccatgcccggctaatttttgtatttctagtagagacgggatttcatcatatttggccaggctggtctcgaactcctgacctcaagtgatccgcccacctcggcctcccaaagtgctgggattacaggcgtgagccaccgcgccctgcctcactattactttttccaaagttccttaaagccaaagaccaggaaccaaaaaatacgtaactattgatatttaaaataggttgaatttaaaatcatatataaatcaacatttgaaaaaaagtataaactgtatttagatggagtagtgaaacagtactctgactcaaaatactgtaaaaggaatgacttcttgctttatttaagcaagtgtgttagaaaaatgtagccaatcaaggtattctgaatatcagatttaaaaaaccggtgaatggaaggtgatttctgtcttacggccatgactgtttatgacttcagaatcaacgaagtttacctcttgtcccttccttggctacagacacttttaactttttgctctcagatgttgatgtagagtttagcggggtggagggcgttttcgggagagacataataaacaatgcctcctatctctttagtaatttgaaatagtcctccggaaagctaatttagacacaaatcagcgccgcactgggacttgcaggctgccacatagtcctgcaggcagaggaaaaaagatttaaaaaaaaaaaaaaagatgacaactattgagtacttaggttcagatcgcagtttagaattcatctagcatggttctccttcttcggggcgacctctatgttctggggttatgtgtagcgactaagaagccttagtggaccgtcaggtcggggtcaaggagcagggcaggaaggacccgctcggcggaccccgcagaccgccggcacccctggtgggggacactcgctgcaggcggctcggctggggaccataccttccccacaggcagcgctctcgcgcgccagttccacaaactcgcgagttgggcaggcctcgcactgcttcttggtttaaaatgacgggaaagggacacccgcgatcctacccacacattgcgtacccgcccagcatccgctcacttcctcctttgctggaacgcctgtttgtcgtcatagaaacccagggccccgaggtttagcgccctccataggggctgccttcagcggtgccggcggaggagggagacagctaagacaatccctacaccctcttggagtttcttatgttctaagtcacagcataggttcagtagcaaaggagaagaaaaacgtttaatcccgccgttgtcacggaatccgaaagtgtctcacgccggggcttcctgccgcgggccaggccagtgcgcaggcgccggtgggggttagctcgaggggccgacccctgtagcccgtgacgcacgcgggttaagcaagggtcttctgagttgtttccatctttctagctctcttttttgttgctttgcatatttttctttctctttcttcctctttttctttctttctctttttttcccctgagacggaatttccctcttgtcgcccaggctggagtttaatggtgcgatctcggctcactgcaacctccacctcctgggttcaagcaattctcctgcctcagcctcccaagcagctgggactacaggcagacgccaccatgcccggctaattttgtagtttgttttttgttttgttttgtttgagacggagtctcgttctgtcgcgctggctggagtgcaatggtgcgatctcagctcactgccacctccgcctcccaggttcaagcgattctcctgcctcagcctcccgagggactacaggcgggggccaccatgcccggctaatttttgtatttttagtagagacggggtttcaccatattggccaggctggtctcaaactcctgaccgcgcccgcctcggccttccaaagtgctgggatcataggcgtgagccactgcgcccggacgctttgcatatttttctaaaagccagactcagggggatgttgggtaataagaaacgctgggtcccttattgggtaagccgtccagtgctttacatttcggtcacgtcttccttggacccttaaatgcctccccccagagcacaaggaaggcctcctgggcccagatttttcacccccttggggcagggaaggaggattgagcttaggtggaaccagctcaggtataattgtcggggcttctggcgtgaaaatctgccctcaggaaagaataccatcagcggccggtggctcacgcctgtaatcccagcactttcttaggccgaggcgggtggatcacgaggtcaggagttcgagaccagcctgaccaacatggtgaaaccccgtctctactaaaaacacaaaaattagccaagagaggtggcgcgcgcctgtaatcccagctactcaggaggttgaagcaggagattcgcttgaaccggggaggaaagggttgcggtgagccgagatggcgccaccgcactccagcctgggcaacagaacgagactccgtctcaaaaaaaaaaagagtatcatcagagccttcgcactgaactgaggctcggttcggtgagggatcatttcttttcttttcttttttgagacggagtttcactcttgttgcccaggctggagtgcaatggctcgatctcggctcaccgcaacctccgcctcccaggttcaagcgattctcctgcctcagcctccctagtagctgggattacaggcatgcgccaccacgcccagctaaatttgtgtttttagtagagacggggtttctccatgttggtcaggctggtctcgaactcccgacctcaggtgatccacccgccgcggcctcccaaagtgccgggattacaggcatgagccggatcgtttcatattaaggcagagatttagtgccaaataatgaatcgctgggagaagcccagcgtctagttgcttccagacagggaggaaactttatcttattcaatcaccatattccttagcaccaagtagagtgcctggacaaacatgaaaatcagttggacagttctcttctgtgttgacagaattacggctattttctggttttgagtgtaatagctgtgagaaattcgagcaaagggttcaaaacaagtctacatggtccctttgaactcttccgatcaaacatgttgggtgtgttagcattttagcctttagccttatctcccattaccctaatttttcaaagaattaaaatacacataatagcattatagagcacacaaaattatccatcttttgtattcttaacctagttcaaaaaaatccaagtacagtattaagaaagcagatagaaataagtgaacacat

SEQ ID NO: 183 - DNA, 4001 bp, Homo sapiens
agatgttagatggcagtttctacaaggtgcaatgcaggggcatggagaaagaaaatagaaaatctgcctggggcgatcaggaaaggcaacactgatgagaagcaaggaatgactagaaaggggtaaagaggggagaggctgagagaaggatgctgcaggcagaaggaacagcctgggcaaaggcatggtaatagcatcattgggcacacagcatcattgggaaatgcaaattgagtcattcagctccgaaggagcataatatatactgtggggaaagctgggaatggggctatggaggcagggaagctctgacttgatcctgtaggcagtggagaattgccaaattcagattttgaacaggactatgatacctttggagggggtggcatgagaccgggagatcagggggcctttggagagaggaagactgaactagaaagcgaggttccacataagcacactggaggcttatttaaggaggcagaattcacagagcttggtaatgcctagatgtgggcggtgagggagagggggcagcaggaaaggaatcccccgtttctgaccttggagggctgggtaaaaaggcaacataggaggggcaggtttgggggcaaggacaaagaattggggataaattgagcccctctcttgcaaatagcaaggattgcgtaccaaataagcgaaaggataagatgagggccctagggacccttcctgaggaggcagctgatctgtacaggggaccggggacccacccccattcccagcccctcaccgtggtggcctgtgaggcccccagagtgagttccttcagcaggtctcgggtactgaagccctcctccaccatcacaaagtccgattcactcaggtagccagccatgccttgcaggaggagctgacgggctggatggagccgctgctgcagccgccgccttagaaagtatgcaacacactgcggggcgaggggagatgaagggaaccgctggggggccggctctgctgccccactcgcctcccgaggccagggatcccaatcccgtcacaacccgcccccagcacaagcccggggttcactgggcaagggtggagaaagtcaagaatcccggatttcagacggagacaaggcaccgtatgcccaaatgtcactgcctctccgagtcagttgctccctctgtaaaatggatgaattgttttggagagccttcccagttctgaaattctggatttcaggaaagagtgagagagagatggaacagaaaatctgagaaacttgggtggggaagtttccagggcgcccccagtcttgaccacgcccacctagagggtagccggtggccacatcaaggcgtctcagcctaagagcaagagcttaagttcgagtccgctctctactgcttgacctcgggtaccctctgaccctttcggagccgcagtttccccaattgtaaatgggggctggactgatcctgaggtgctagaattctaggcgtgcctggggacgccacgcggtgggtgggggccgcaagctcctgggagagaacggaaggccgaggttttttctgtccgagtgactcctacagagtgcagggctgaggtccccccaacccccagggccccttaccaaactccgtcctccttcgcgggggccagagccaggcgcgctgctagggggggtcgccggtgacctcgaaacttgtgcaacaccccgaggaggagtggcagttgcggagccgaggcctctgctgacaggaggcagaaggggcagggaggcaggtcagcaccagggcggagggcgtccgctccccgaggctccccaggccactttccgcactcgccttaaaacgcatttacacggcttcggcccataggtctccccagggagtgaatcggatcctcggcgcctccgctctctcgcttccccgggctcgggtcccgcggcctgcgccccgccagcccagcagccacagacccccacgccccgccttccgcccgccgctggcttatataaccccgcccaggccccgcccatagtgccgaggccctacctccgcttggccgtagccctggcaaccgggtgccgccatcccattggtcgattccgacataaagcattcagctctgctcgcccttactgtagtcttctcccccggaggcctggcggtggctacctcacgctggaagtcagaactacagggccgccgccacgcaggtgagacacttagaccctgcatcttaggtcttagagagtgggcaggaccaggaagccttttctgcctctgcctcaacttacttcgtggtccagctcttgtctgcgtcaggaactgctcactcatctctcgaaacccggttccaatgacatgtccttgtattacttttgtaataaaattctttttatttaattgcctcttccaggcatcttccccgactccaactcaaaacgcatctaaaatgtcttcagagaacctttttgtgactttcccagttcagggcaatccctccctttatcccatcctgtgaacccggcaaactcttactcatctctcaatagaaatgtgtctccttctccaagaagctttcccggacttcctcaactcaaagcatttcttctataccgaaagctgctgctcacccatcaaagtcctgtataatgtcacctctgttgaaccttccatgacttgcctggccccaaggaacacagcatttagtctgtctggacccctcactcatttggttcttgttacccatagcgtgagattcctgttgttattttacacttcttgtttggttacactttgcatctagtttgtgatttcccaagggcaaggactgaataccctgctcaagagcctggtgcctggcatagacaagaatgctgaggaagattcaatagctgtgttactcaaaagctgatataaaagttcatctggaaaagtaagtgtacaagaacagtcaagacactctttttgcccaggctggagtgcaatggcacgatctcagctcactgcaacctctgcctcctgggttcaagcgattctcctgcctcagcctcccaagtaactgggattataggcgcatgccaccacgcacagctaattttgtattttcagtagagatggggtttcaccatattggccagggtggtcttgaactcctgacctccagtaatctacccgccccggcctcccaaagtgctgggattataggcgtgagccaccgcgcccggccaaaactacagtctttaaaacagtatggtgctggagcaggaagagacagtggtaaaacagaacagggtctacaacagtcccatatacattggagattggtacacaatggaggcagcatttcaaatcaatgaagccaaagggcttttggtctaccatatgtcttcatgtcccctgctaggctgtgggcttttttttttttttttctcttttgagacaagatctggctctgtcacccaggctggagtgcagtgacatgacctcagctcactgcaacctccacctcccaggctcaagtgatcctccaacctcggcctcccaagtagctgggactacaagtgcatgctaccataccttgctgatttttgtattttttgtagagacagggtttcgccctgttgcccaggctagtctcaaactcctgagctctagcaatctgcctgcctcagcctcccaaagtgctgggattacaggcgtgagccaccatgcccagtgggctgtagacttttttttaaatcagaggcacttcttgtcccgccttagtatctccctaggacactgcacaacctagttagaacatgctcagtacacaaatggtgtggggcagggaccagaagcaggagagccattttctgctccctacccagctgggacatataattgctgggtgtccttggctgagtcaccctaactggatctgggtcacttctgcctggcttgatttccccctgtgaactgagaggtttcagactgatttctctgggcccttctgcctggaac

SEQ ID NO: 184 - DNA, 4001 bp, Homo sapiens
tgtgtgttcagtgggcatggagggtcagtgcaccgtgcgggcagggctcaccttgttggcacagctaaagcccagccccagctgggccagaaccttcagcacacctgggctgctgttgcacttgacagcataaaagggccggactcgtggcaggcacttcagaaagcaaaagtgcttcctcactatggcacccaggtcagccacgaagaaggcagctacctcgtcctgaatgacaagaagtggatgaatgtgagaccccatccagctcgcaccctgtgcatgccatccgtgatccttccaagtacctgacccaggttcagtactggccacagagctaccctgctgctaagttttctgggcctccccaagcctacagggcagaaggcaaactcctcagcctggcattcaaggctctgatctagccccaatccctcccctcaatgcggctaaaactccagctgtaggctggatcattttcccaccttcaaacctttgttcccaccatgtcctgcagaataccctccccactcctgtgtctggcaaaatccttaaagtttcactcaaatgccaccttccccaaaccaataaggcaactctgcttttaaatgctcccactgcatttgcatatgcttccaaggtatcagaactgcatatgcatctgtccattctagaaaagggtaaactccctaaaggcagaagctatgacctacagctcactgccttccaaacacaggtgctcaatgaagccttaagctagtcccactgacactgcaacctatccctatggacaactgttcattgtagatgtgctaaaggccaaacatgtatgaggctgtgggtgagaccacattacttaaatgtggaagggacccttccagagttgcttccctgggactcagtttccctttcatgcaacacttttttactcatgcccacttggtgccaaacgttatgctaagggacagagatgaccaaacagtactgttgttctgaaggagcttgggtctggaagaaaaggaaccccttaagtacttacaagtccattcagcagatgttagatggcagtttctacaaggtgcaatgcaggggcatggagaaagaaaatagaaaatctgcctggggcgatcaggaaaggcaacactgatgagaagcaaggaatgactagaaaggggtaaagaggggagaggctgagagaaggatgctgcaggcagaaggaacagcctgggcaaaggcatggtaatagcatcattgggcacacagcatcattgggaaatgcaaattgagtcattcagctccgaaggagcataatatatactgtggggaaagctgggaatggggctatggaggcagggaagctctgacttgatcctgtaggcagtggagaattgccaaattcagattttgaacaggactatgatacctttggagggggtggcatgagaccgggagatcagggggcctttggagagaggaagactgaactagaaagcgaggttccacataagcacactggaggcttatttaaggaggcagaattcacagagcttggtaatgcctagatgtgggcggtgagggagagggggcagcaggaaaggaatcccccgtttctgaccttggagggctgggtaaaaaggcaacataggaggggcaggtttgggggcaaggacaaagaattggggataaattgagcccctctcttgcaaatagcaaggattgcgtaccaaataagcgaaaggataagatgagggccctagggacccttcctgaggaggcagctgatctgtacaggggaccggggacccacccccattcccagcccctcaccgtggtggcctgtgaggcccccagagtgagttccttcagcaggtctcgggtactgaagccctcctccaccatcacaaagtccgattcactcaggtagccagccatgccttgcaggaggagctgacgggctggatggagccgctgctgcagccgccgccttagaaagtatgcaacacactgcggggcgaggggagatgaagggaaccgctggggggccggctctgctgccccactcgcctcccgaggccagggatcccaatcccgtcacaacccgcccccagcacaagcccggggttcactgggcaagggtggagaaagtcaagaatcccggatttcagacggagacaaggcaccgtatgcccaaatgtcactgcctctccgagtcagttgctccctctgtaaaatggatgaattgttttggagagccttcccagttctgaaattctggatttcaggaaagagtgagagagagatggaacagaaaatctgagaaacttgggtggggaagtttccagggcgcccccagtcttgaccacgcccacctagagggtagccggtggccacatcaaggcgtctcagcctaagagcaagagcttaagttcgagtccgctctctactgcttgacctcgggtaccctctgaccctttcggagccgcagtttccccaattgtaaatgggggctggactgatcctgaggtgctagaattctaggcgtgcctggggacgccacgcggtgggtgggggccgcaagctcctgggagagaacggaaggccgaggttttttctgtccgagtgactcctacagagtgcagggctgaggtccccccaacccccagggccccttaccaaactccgtcctccttcgcgggggccagagccaggcgcgctgctagggggggtcgccggtgacctcgaaacttgtgcaacaccccgaggaggagtggcagttgcggagccgaggcctctgctgacaggaggcagaaggggcagggaggcaggtcagcaccagggcggagggcgtccgctccccgaggctccccaggccactttccgcactcgccttaaaacgcatttacacggcttcggcccataggtctccccagggagtgaatcggatcctcggcgcctccgctctctcgcttccccgggctcgggtcccgcggcctgcgccccgccagcccagcagccacagacccccacgccccgccttccgcccgccgctggcttatataaccccgcccaggccccgcccatagtgccgaggccctacctccgcttggccgtagccctggcaaccgggtgccgccatcccattggtcgattccgacataaagcattcagctctgctcgcccttactgtagtcttctcccccggaggcctggcggtggctacctcacgctggaagtcagaactacagggccgccgccacgcaggtgagacacttagaccctgcatcttaggtcttagagagtgggcaggaccaggaagccttttctgcctctgcctcaacttacttcgtggtccagctcttgtctgcgtcaggaactgctcactcatctctcgaaacccggttccaatgacatgtccttgtattacttttgtaataaaattctttttatttaattgcctcttccaggcatcttccccgactccaactcaaaacgcatctaaaatgtcttcagagaacctttttgtgactttcccagttcagggcaatccctccctttatcccatcctgtgaacccggcaaactcttactcatctctcaatagaaatgtgtctccttctccaagaagctttcccggacttcctcaactcaaagcatttcttctataccgaaagctgctgctcacccatcaaagtcctgtataatgtcacctctgttgaaccttccatgacttgcctggccccaaggaacacagcatttagtctgtctggacccctcactcatttggttcttgttacccatagcgtgagattcctgttgttattttacacttcttgtttggttacactttgcatctagtttgtgatttcccaagggcaaggactgaataccctgctcaagagcctggtgcctggcatagacaagaatgctgaggaagattcaatagctgtgttactcaaaagctgatataaaagttcatctggaaaagtaagtgtacaagaacagtca

SEQ ID NO: 185 - DNA, 4001 bp, Homo sapiens
tttctacaaggtgcaatgcaggggcatggagaaagaaaatagaaaatctgcctggggcgatcaggaaaggcaacactgatgagaagcaaggaatgactagaaaggggtaaagaggggagaggctgagagaaggatgctgcaggcagaaggaacagcctgggcaaaggcatggtaatagcatcattgggcacacagcatcattgggaaatgcaaattgagtcattcagctccgaaggagcataatatatactgtggggaaagctgggaatggggctatggaggcagggaagctctgacttgatcctgtaggcagtggagaattgccaaattcagattttgaacaggactatgatacctttggagggggtggcatgagaccgggagatcagggggcctttggagagaggaagactgaactagaaagcgaggttccacataagcacactggaggcttatttaaggaggcagaattcacagagcttggtaatgcctagatgtgggcggtgagggagagggggcagcaggaaaggaatcccccgtttctgaccttggagggctgggtaaaaaggcaacataggaggggcaggtttgggggcaaggacaaagaattggggataaattgagcccctctcttgcaaatagcaaggattgcgtaccaaataagcgaaaggataagatgagggccctagggacccttcctgaggaggcagctgatctgtacaggggaccggggacccacccccattcccagcccctcaccgtggtggcctgtgaggcccccagagtgagttccttcagcaggtctcgggtactgaagccctcctccaccatcacaaagtccgattcactcaggtagccagccatgccttgcaggaggagctgacgggctggatggagccgctgctgcagccgccgccttagaaagtatgcaacacactgcggggcgaggggagatgaagggaaccgctggggggccggctctgctgccccactcgcctcccgaggccagggatcccaatcccgtcacaacccgcccccagcacaagcccggggttcactgggcaagggtggagaaagtcaagaatcccggatttcagacggagacaaggcaccgtatgcccaaatgtcactgcctctccgagtcagttgctccctctgtaaaatggatgaattgttttggagagccttcccagttctgaaattctggatttcaggaaagagtgagagagagatggaacagaaaatctgagaaacttgggtggggaagtttccagggcgcccccagtcttgaccacgcccacctagagggtagccggtggccacatcaaggcgtctcagcctaagagcaagagcttaagttcgagtccgctctctactgcttgacctcgggtaccctctgaccctttcggagccgcagtttccccaattgtaaatgggggctggactgatcctgaggtgctagaattctaggcgtgcctggggacgccacgcggtgggtgggggccgcaagctcctgggagagaacggaaggccgaggttttttctgtccgagtgactcctacagagtgcagggctgaggtccccccaacccccagggccccttaccaaactccgtcctccttcgcgggggccagagccaggcgcgctgctagggggggtcgccggtgacctcgaaacttgtgcaacaccccgaggaggagtggcagttgcggagccgaggcctctgctgacaggaggcagaaggggcagggaggcaggtcagcaccagggcggagggcgtccgctccccgaggctccccaggccactttccgcactcgccttaaaacgcatttacacggcttcggcccataggtctccccagggagtgaatcggatcctcggcgcctccgctctctcgcttccccgggctcgggtcccgcggcctgcgccccgccagcccagcagccacagacccccacgccccgccttccgcccgccgctggcttatataaccccgcccaggccccgcccatagtgccgaggccctacctccgcttggccgtagccctggcaaccgggtgccgccatcccattggtcgattccgacataaagcattcagctctgctcgcccttactgtagtcttctcccccggaggcctggcggtggctacctcacgctggaagtcagaactacagggccgccgccacgcaggtgagacacttagaccctgcatcttaggtcttagagagtgggcaggaccaggaagccttttctgcctctgcctcaacttacttcgtggtccagctcttgtctgcgtcaggaactgctcactcatctctcgaaacccggttccaatgacatgtccttgtattacttttgtaataaaattctttttatttaattgcctcttccaggcatcttccccgactccaactcaaaacgcatctaaaatgtcttcagagaacctttttgtgactttcccagttcagggcaatccctccctttatcccatcctgtgaacccggcaaactcttactcatctctcaatagaaatgtgtctccttctccaagaagctttcccggacttcctcaactcaaagcatttcttctataccgaaagctgctgctcacccatcaaagtcctgtataatgtcacctctgttgaaccttccatgacttgcctggccccaaggaacacagcatttagtctgtctggacccctcactcatttggttcttgttacccatagcgtgagattcctgttgttattttacacttcttgtttggttacactttgcatctagtttgtgatttcccaagggcaaggactgaataccctgctcaagagcctggtgcctggcatagacaagaatgctgaggaagattcaatagctgtgttactcaaaagctgatataaaagttcatctggaaaagtaagtgtacaagaacagtcaagacactctttttgcccaggctggagtgcaatggcacgatctcagctcactgcaacctctgcctcctgggttcaagcgattctcctgcctcagcctcccaagtaactgggattataggcgcatgccaccacgcacagctaattttgtattttcagtagagatggggtttcaccatattggccagggtggtcttgaactcctgacctccagtaatctacccgccccggcctcccaaagtgctgggattataggcgtgagccaccgcgcccggccaaaactacagtctttaaaacagtatggtgctggagcaggaagagacagtggtaaaacagaacagggtctacaacagtcccatatacattggagattggtacacaatggaggcagcatttcaaatcaatgaagccaaagggcttttggtctaccatatgtcttcatgtcccctgctaggctgtgggcttttttttttttttttctcttttgagacaagatctggctctgtcacccaggctggagtgcagtgacatgacctcagctcactgcaacctccacctcccaggctcaagtgatcctccaacctcggcctcccaagtagctgggactacaagtgcatgctaccataccttgctgatttttgtattttttgtagagacagggtttcgccctgttgcccaggctagtctcaaactcctgagctctagcaatctgcctgcctcagcctcccaaagtgctgggattacaggcgtgagccaccatgcccagtgggctgtagacttttttttaaatcagaggcacttcttgtcccgccttagtatctccctaggacactgcacaacctagttagaacatgctcagtacacaaatggtgtggggcagggaccagaagcaggagagccattttctgctccctacccagctgggacatataattgctgggtgtccttggctgagtcaccctaactggatctgggtcacttctgcctggcttgatttccccctgtgaactgagaggtttcagactgatttctctgggcccttctgcctggaaccatcttgttttctatg

SEQ ID NO: 186 - DNA, 4001 bp, Homo sapiens
caaagttaattaacataactagtattgatcttcttacctacgttattaccctgttcctttctatggtctacttcttcatttccttaatctagcctggtctaactactggatggcagataaaggcatcatccttcaagtgcagtaagggagtaggaaaaacttgtctcaaactagaaaactgcctagcaagtctactaagatttcagtttgaagtctactaacatttcagtttttgtttgttttactgaaccctaaacaaccattaaggccataaacagacttaatgacgctctacaaggagattccagcagggctcactcataacaaaagagagaaacctgtaacacacaagcagctgttacaaagcattttttatatatggcgttctcttcttagttcacttcacaaaaacctaaaaaacactgagcaaaaccctgaccccatcaactggttaagtgcatagcaacactgtactttcattaaatcacttaaatagtgtttaattctattcaggtcacacaaatccttttcaaagagctagtgatctaataggaaaagagattgttaccaaaataacctcaacataatttcatataactgagactgttttgaggattgccgaatactttctacttataaggcatagagtgctgaactgcaaacactcaattctaattttaagaacttttggattagaaaacagctgttttggggagagatggtaagggaaaaaagtcccagtatagttacaaaattaagtattacataatatttaaaagagctttctaggtttctttcatgttctagggcaagcccttaaagaagaagacaagagatacagggaaagctaaagtagtgttcagggtggtggaacccactaacaaaacaatccgctgggcaccgtaagtaaagcattctattaggctgtgacgcgaaacaagaacaaaggtttcattcctacgagagattaagttttagagcaaatggacacgatcgttaaagaatttgatatttccatgtaaactgcattagcaggttatgcgatccaaactcacaggaacaactccaactctcggccatgccctatttcatgtctagatttgtttaaccgacttacatcataatccaagaatacgaactacagtatattcttacagcaaagttattccttaaaagcaaaaccgagccacctttgaaaacacgcacacacattatccacggcactaaaaccccagtcttgaccgagaaagaccaacaacttgggggggaagaaaacaacttcagagccagagctcccaaagcagaaagcgctggcggctgaagggcacacgaggttccgctcccgggcgaacgggcggcgtcggacatcactaaccaggcctggggacaggcgaaggacttgcaactgcgggcgccggctctgcgggcgttaagggaaacggggaagtgagaagaggcggggacacgaaaagagaaaagctccctcaagtttgcccgatgttaacgctccaaggatgaaaagagccgtttgtttcgtctggggaccgtcgcgtttggcccttcccccgcctccaacaattcccggcgaagccccgcggcaccaagccgggcctcccacccccccggcggccgccaacccgcccggccccaggacctcacctgcagggccggccccggaggcgcaggcgggcggcggggagcgcagccgcagccagaggtgcagcgcggccccgagcacacacgggcacagcagcaccagccagtttcgcattggccgcccccgccgcgagccgggctctcccgcgtcccggcggagagggaggggacctgcaagtgcggagactgaggggcggcggctgacgagcgaccactccgagcacgcccgccctcgcgctcggcgacgtctggggggctcctcgcagctcccggccccgctcctccggtccctcagaccgcgggtggccgcggcttagccggccgaagccccgccccctccgcctggccttcccaccggctccgcccaccttttctcccactcgccccgccctctcctcccgcgtttccacacgcgccagccagccggccgggagctgaagtcccgctctgggcccaggcagggggcgcccgcggtttagaaaccacatttcccatgagcctaagcacgcgcttccgtcactcggcggccgcgggggcgaagggcgaggccccacacagagcatgcgcatcccccttgacgtttgctgccaccccacggcccaggggaggtagtgccggagacccggtgctcggaggctgcccggagccgcgaagggaaatgcgctttgcctcagatttgaaggaaatccgagtggctcttgtgtgaaatcacgcagagctcctttgttccgcgtgctctcttgctcgactgctgtgggaggtgggatcctgctgacgtctccttggcccgtagagtggggcgaggaagcccgagtgtccgcgcctggagcggtgactcatcagggattagctctggtgccgtgggttcccggctctttgcccggttctgtgctctgggaacgcagggtgacagacagcgagctggggactaggctgtggaacacgatgatgacgagccaatcagggtagaactgcacgtgctccgggttcatactggagctgggagcgaaacgggagccgggcgagctgggagaacgtgggctccggggacctggggaagggtggccgcagcgagccttccagggagaacgccggccccgcgtcttgaggctttgccccgggtgggagccctcctggcccaccaggcccgcgccgaggcagccggaaagcggggacggggcggtgaaggcactggggtgaggatgggagagaaggatgagaacgagcggctgggctatggggcggtttttgtttctgcttttgtttttgagacggagtctcactctgtcacccaagctgtagtgcaatggcgcgatctcggctcgctgcaacctccgcctcctgggttcaagcgattctcctgcctcagcctcctgagtggctgggattacaggcgcccgccactgcgcccagctaatttttgtattttttttgtagagacgaggtttcgccatgttggccaggctggtctccagctcctgacctcaggtgatccgcccgcctcggcctcccaaaatgcttggattacaggcgtgagccaccgcgctcggccgcggtttttttttttttttttttaagtttccacaagtgtggaaacagaaggtgactgtattattgaaaaaaagtcttggatgacagaagacccaactcaaacaggcttaagggaaaaaagtactttggctcgccgtggctcatgcgtgtaatcccagcactttgggaggccgaggtgggcggatcacttgagggcaggagttcgagactagcctgggtaacatggtgaaaccctgtctctactaaaaatacaaaaattagtctggcgtagtggtgggcacctgtagtcccagctactcaggaggctgaggcaggaggatcgcttgaacccaggaggcggaggttgcagtgagccgagatcgcgccattgcactccagcctgggtgacagaacgagactctgtctcaaaaacaaacaaacaaacaaaaaaaaaataaaaagaaaaggcaagaaagtaataattggttgccagaaaaagtatactatttttatcctcaggaaaggtagtaaatggcctctgttgatattgtaaaattttcattttgtgaattagaatgagttatcctaaaaagaggactaatccctcatttcagcagagctagtcattcgacaaatacttattgagtgtctattatgtaccagacacttttgtaggtactttagatacaccagtgaacaaaataaagatccctatcctgtgttgatggggagtagggcgcagactatagacataataaagaaatatactcaaccagcatgttagaaggttattcctgctctggaaaatataacaa

SEQ ID NO: 187 - DNA, 4001 bp, Homo sapiens
tggtgatggtttaatagaaaaacttacacttttgttttgagatgtatagcttataaaactgcttaattggtgacttcaatattgagagattaaggtaccaagagggacttgaaatttttacaaccatattttttagtactatttattattagtctttattagaataaaaattcatgggtgagagtgatgttgaggtgtaatagagtctggtaaacttgtttaatcttcattttggaatgcagtacttacatatttttaaaaaatgtttgccttttgtgattattagataattactgagttgtgttgtgaaattgaggaaaaatcaggatctttgatagatttgtagaattttagaaatatctttaagttcttgagccctgagttgctgttctatgattgttgctaaaatagtttatttggtttatctgtgccctgcacacacatatagtggcggtagttcattactgcatattaatatagcctggaagcatagtagctacatttatatttaattttttgaccttgtattgccatttgtggatatttttgtatcaaagtatttccatattatgtttttgaatttcacttctgaaatgataatcagagacaacgttaaatttgatcatttggaatcagtcttttacataaaatgtaagctatttaaaatagttaatttttaaagccactattgatgtccctttgtttaaagttctattcatggtcactataataacacgaggctctattgtggggttatgcataaactcacactaccttatgtgatcttatgttaatgctttccttttagtatcttcttgtagcttggtaatatttaaaatttgttgatactctctttggttgtgttcattatcttcatttagggagatgttggggaagattttgttactaaaagctgttacatattaaggttttgttttaaaaggactttgaaaaaaaaactcttaaggttttccttgctactatttaatgaaatttcactgcattgtgtcttttgatagccatttttaagagagcatttaatttactagataaggattcagtttgacctaatttgatagaatattgctgtgttttttgtaaagggctacagatttttttttaagtttaatttcttaaggaatcctttaaacacatcttcttcttatttgccttttccctctgatgtctattacccagaattactccaagctacatatttagctgcataaagcagtgacagcttgtcttctaaacaatgacaaattttaaaatcagatattaagaaaccttttcatagtttcaagggcagtgagctgtatgaacttgcttatcaggtattagtgcctccagggctataaaaaggtaacacatttaaatgactatcatacacaagatattgacataccttccttggtcaggccatttatgtgaagaggattatgcccactgaaaatacttttggcacgccatcacttcagcaaaaaagatgctatcgaacatgcgcacatcccccaacagtctgcctcctgcgattgcttttcacagtatccaaagtgtccatctgtctgcttgtcttcgagttaccctccttgttcatatgggtcctagtcttctgaaattttccctttctttcattttctctctttcgttaaacaaaagagctgtagttgcccgttctgcttgtagcactgttgactcttcccgacagttgatgcattgaagctttttacatctgctattttcctggctggacaatgcagtgctgtgttctcgtctcagtatccatatttctactaataacactgagctgcaatgtaaagcagccagagctaaaatgtagtgcttcagttgtattggaaaagaataggatttacctctcttctttcgttgttgcctggcagctgcaggaaggattttgagcagttttaatggggttttagtctataatatgaaatccacggttcctcagctgctgcacaggcaggcagcagtttaaatgtgggcttgacagatgctctctctgacagagcagaatttaacgtcactgcttggctgaatcccacgtgattgtttgcattcattttgactaaaaacctaaggtagggagaagcttagagattttgcttttatgtgataaattatatatgttgaatgcaagtgtagtgatgagtgaataatttgaaaatgtgatgattatgaaatggttatgattttattttttccagcttacttccttttttaactttattcttaagtacaggctttctaagtgttttctgtgttagatgttggttttcatgtttcttacatgcttttgtagggtgtaagcagtataagcttttgtgtgtaagttggtgtaatttaaccccttcagtgcattctcttcttgaagttttttttctctgctttcaaattgctcttgattttttactaatatgtagttaagacctatggtttctattgaaaccatgtatctttgtaatttagatccccccccccgttttctggggtttgtataaataagctgtcttggattactttactaatgcatgatgtgatacagcccacttcttttttgctcttatgtggtttttggtgttcttgatggcagaaaactttattttaaatcactttttaatgttgtcatttattttttatttatttttccttccctttaaaattacatgtatcgtagaattcagtaaaatgatgtaatagatatagcacacttgtacaggatctgggggtaatgagattttactaattatgtttacttattctaatgtttcagaaagatttaataacttgccatgaggcagattttattaacactacacactcactgagatttttctaatatggttagtttctggggctggcaccttcttttcttactgcagagcagtagggaaggtttttttaaattttttgttgtagtaaaaagcctttattatcagtttttcctctgtgactctagggacagtaattcagtcctagaaagttatagttttggagcttaagctaaaggttaacagttatatacatattcttcatctcactgcctccaccattaatatatgctatttcaaatgaatatgaatttgttttctctgatattaaaaaaaattttgtccacatatttttgagctttgctgatgaaatgtgctttgtagttttaagaaccccactgtattagaaatgttagaaggatcgttaaagaaaaaaaagaattttataaataggaaacctaaagcctagactgagctttgacttttcctagttaagtttgaaggagaggactaaaacccaacttccttgtagtctatatccacccatactgcaattctcactcactaccgttttgtttttaaaattagtttactagttaacagagtaatgcttaagaacttacttaaaataacttattttccagaagtacagatgtgtttttgtagatcagtatttatttatcagtgattctttacataggatttgactatgaagctagccacaatgaccatttatggagtatttactgaaaatcagattgcgtgctaagcttacttgagctgttatgcaaatggctcttttctaataattttattattgtaatacccacttaaaagatgcagaaccagtgcctggagttgtaaaatagtccaaatgtcagataaatactgataagaatagaggccaagctgggaattgaagcaagattatctaaattcttatcctctgtgtttttgttttctttttaaatctatctagtactatcattattctctgttcttaaactttttattacatggcactgctagagaaattgtgggattttttttttttctgaacactggcgcagcatacccaggaatcattaatagaataataaatgaatgtttatattttcactttttcaacaggtacatattgattaactactgtgtaccaacatgtgcatttaggcatagcttattaagtataggggatacaaagttgattta

SEQ ID NO: 188 - DNA, 4001 bp, Homo sapiens
acaacaaagaccacagcggggaccacccaggtcccccagagagaaaacccgcgtcggactccagggagctcatggtaaccccttgtcctggggcagcttcattttactttggcaaggaccgcagtgttcgcttttctcattaaacgaggggctttcaaggatgtgttaaagtacgtgagagacgggcctggtgccggctggtcctgttttcttaaggcggaagttggggaaccgcgtcagcactccggggttcggattcctggaacctggggcagagtctgaaataaagcagcaccggccctgtgtggcgcggacccatgggaagccttgaaaggaaagtctcttcagaaagaaacaatgggttcagtgacttgtacactgaaaagatagatggccagttttaaagttctcctgcgtttaaacacgggcagcagcggggttgacggtacaggcaccaagttctgacataaaagtctttccttaaatcatgtaaaaaaaccgagacgtgcgcactgccaacttacactcatcgacacaaacttacaatatttataaataagtcgcaagcaaacactgagttacatttaccacgaagtcactggacagagaccaaaatcccatgaaagcggattgatgtgaaaccacgttagatctgagacgcagacgtgagaaacgccactgataagagacacggaagatcggagcccagccccgtgagccggtcggggacagcacgggggtcagcgtgcggccgggcccggctcaggctcgctgaggtccaggaacgggcacctccacctggacacggcgcgctgccccggcaacccccaggggtctcccaaacgcagaccgggacgcagcgaccacaagcgtggctgcgggacgggggccttggggcccgggcgtagtgcgcccgctcggcacctgccccaaggcgccgccgggtgaagcaggtgtcccggagggccgggccgcggcggctcaggggatgccctcccttctctggcagcactgcgagggcggcgcggaccagtcgtacacgtaggacaggcgcagctgcacctcgcgcttgcacaggcggccctcgcgcgccagcgtcgcgtgcttctccagcatgtcctccaggctctgcttgtgcgtcaccaggtactggttgctgcagccgcgggaccggtattcggtgtcgaagcgcgggtcgtgctcccgctggacgtccaccggcgccagccaggcgcccagagacacgtcctcgctgtgccaggcgcgcaggtagtcgcggctgaggcgcaggtagtgcaccaggtcggccgagagcacgtagccgccgcccagcgcgtagggcaggtagtagtcgcagagttgccaggcggcctcgcgccagcgcccccccggcttgacgcggccgcggcccgagaagaagccccagtagaggcggcggcggcgcgcgggctcgcgggcgcgcagctcggccagcagcgcgtccagccgcgcgaaggagtcgtcgtccgccttgagcacgaactcgaaggccacgtgctcgtccagccaggccagcatggccagcaccttggccgtgaggttttcgtaggcgtcgcgcagcgcgggcagcagcagcaggtccccgtgccgcgcctgctcccgctccagggcgcgccgctcctcggcgcccaggccggccgtgcccacggcaaagcgcgcccacacgtcgcccggggccccgcgccgcgcaagccacgtgctgcggatcacgctgcggcgctcggcggcgcggggcgcgctggccaccagcactgccaggaaggcggcggcgcgcgcgggcgcggggggaggcgggctgcggcccgacatcgccctggggtccccgggctcggccgcgcagcgcgccaggtagagcagcgccgccccgcacagcgccagcgtgcccaggcctagcgccgcccgccgccgccacgcccgccgcagcagcttcatggcgcccgcgccgggccggcggcccaggccggactcgcgagtgcgcaggcgccgccggctcggggcggtgcgcgtgcgcacggcgctcctgggagcgcgccggggccttccgcagacgccgagccccggggcgctcggaggccggcggccaatcggcggccgtcacgtggcctcgggcacccttgtcattggtcaacctcggagcggccccgcgaccgcttccgcccggaggagagatggtggcgccggcgtcccctccgtgaggtcgcgcccgttcgcaccgcccccgcccgcaagaaagatggcagtggcctgatccgggcccgttggcggcgtcactgacgcttcgctccggtcctcggatcccgagcgcggggaggcagaccggtgagtgaggggcccgggacggccgctgcaggccgcggggccaagtgtacgccggccggacggcgagggcgggtctggaggccgccgccgcctcccgccttgggctggggcatcgtccgtccgctcggccttgagccctggcgagactccgccgccaccggggctcccggggttcccgggggcagggacaggccgacgacgctggcctccccggccgccggcacgtctggtctcctactggccaaaacctacgaatgccaccgggaaacggaggcccaaggggtctggttggactcgcgtttatcggcgaggcgaccttggacaagctgccccgcttccctgcgcctgcgcttccgcttctgaaccgcgtggaccctcatccccagttagtaggatttggagatgtgaagtcggctgtgtggagcccttgatgtctggctcagaggcggtgttatgaaccctgttgagcttttagaatctaaccgtgtgtgttgttaactgccagaaatagcctcgttccaccagagctgaagcccagggatggcaaagaaatagcgtctctgcctaagctgtttcccacgtccgttttgcaagggtgtgttgattccttgctgggaactgagctgctaggggatggcgaagtcgaaaccccattccggtgggaccggcccgctccgctgtgctgcgaacctggcacaccgtgatgaatagatactctgaagccaggagaggaagcgccacttgatggactcctgatatttatagttacttttgggttactttttattccccctttttcgagacagggtcttatctttttgtttttgttttttaaagagacgcagtctcactgtgttgcccaggctggtctcacgatcctcctgcctcaagtaaaccgtgtaactcatcaagatatgtagaatcaagaactagctttattttctctaggaacaaagtacagtctctttgcacacagcgtgtgttttacgactgtagttagtggagtcagcaccaggaggaggtgtcttggttcttatccaggactctcccctggtcaggcgatctgggacgacaggaatagaattatgccaccactagggaagggaaaagccctcagccatgttcagaaaatcaggccgggtgcatggctcacgcctatagtcccagcactttgggaggccgaggcaggaggatcacttcaggtcaggagttagagaccagcctggccaacatggcaaaaccccatctctactaaaaatacagattagtggagagtggaggtgggtgcctgtaatcccagctaactgggaggccgaggcaggagaatcacttgaacctgggaggtggaggttgcagtgagccgagactgcaccactgcactccagcctgggcgacagagtgagactctgtctcagaaaaaaaaaaaaaatcagacatgagcccctcacccagggtttccttccttgggggaactcaggcttgtacccctcttggtttgtggcagactgcactgacttcaggaccactttcatggcggccccactggtgtttctcgatacctggaggcagcattttttcgtttaatattacccagggtagcattcgttgagcgcctactgtgtgcaggcagagtggcaggtgcc

SEQ ID NO: 189 - DNA, 4001 bp, Homo sapiens
ccgcatgggcacctggttgatgacatagacgccgtagcgcagccgctgccgcctcaagatggggtgtagatagtggagccagtagcgcaggtggtgttcccggtgtctaaaggggatgatgaccgccaccgtctgggctggggtgcagtcgggcggtgtgtatcggccgcccatgagcacgcctgggttctccctctgcacccgctccaggggcatgggtgaggtgaactcgatcagcagtctgcccactgcagacaggacagtgtcaggaatcagggcattggccagaatccacagataccagcccccaccctcagcctgggggtgggctagggaaccccaagaatagccctcttacaacagacctggacccctggcacacccctgggtccagatgccatttctctagtcaaaccaataaaaccctgtttccccacaggcaggccctaccctccaggctcaccaagaccaggtggcgagtcaggacagggtggcagcgtgggagccgtgggaccgggcagggcactggggacctcagggagcccggagctagaggcggtggcgttgggccgggagcagttgctgctgctgctgctgctgctagcagctgggtggagggcatgggcagggcctcgggcactgaagcggctgaagaaggccaggtgctgggcgtagacgtcaaagtagaggatgacggccacgaggaagtgcagcaggcagagaaggagcacagccttgcagacgcgctccagcgtcccccccagcagtctgctcatcccgcaggcggccactggcccgcccagtgggcccgggcatccggctgctggcctgagcagggtgggagggaaacagatccagcaggtcagggcaggacaggcaaggctgcccacctacctcccactcagctgctcacactcgtgggccacacctcacactgacctgctcataccctttcacactcacagactcaagaatttacctccaaacagacacccaggcacagttcccggcaactcagtactcacatcctcaagcacaccccactactaagccacatacatttaccttcctccacctcactgacacacacactcaggcactcacccttattgcacaactctacacacacactcacgcattcccaggaacacagacacgtgaactctaaccacactggtttgtacctaagcatggagacatgtttacctatagacccccatgtgcccctgtgcccctgagaacagacacctcacatggcagcatccttaacccagaactcatggcttggggaagagggaagagacggaatactgtgcacctaccatgcaggagcactttatactcatgacttcatttagtccttccaggagccatggtgggaagtggtttggtcattcagatcccagcgacaagcaggccaggccaactgggaccaggctgggaagttgccctcagcatccggggggcccaaatacagactggatgtttacagaatcccttcccactggagcaaaacgtcaaaatacggggcaaggcaggggacacccctcacttaagacctcaaagccagccccttgggactgggaccaagactctgggtcctgcccagcacagctggttctgattcccggaacgggatgcttgggcctggagatgggcacagcactgggcatggcaggaagggggtcttgcctgggcgatggctccagctgtggttccaagagagcggcagccacttctggcagtgcttcagggagcagggtgagtctcacaggcacacagaatcacagggacaccctggtcccagctggtcacccacactcagacacacagagaactacagtcacagacacacccgggtgacagtaacacactaagtcccacactcacaaacaaggccactgctcctggacttccacagccatacatccagactctcagacagctcacacccagacccacgtgcagacattcccaccctccctccggcgcaggggttctgggtcaggctggcggccaggctgaggggtgcgtttgggcggggctggcaggctgaacacgtggcacccgcggacgggcaggccgcacagaccgggtgggtgtggagcctgggggcagggggagtgggtggagggcagcggatgaggcaaaggccaaggggaaacgtgtatggaacgcctccccgcgccacgaggccggggcgagcgaggacaatgagggaggccggctggacgcgggcggagaagcccaggaggggcgccggagtgggggcggggtgggggcagccaggccggggtctggccgccggcgcctctctcaccggctcctgggttgggatctcggggccgcgctcggggtgcccctcgcggggctgggtctggaatctcggggccctgggtgggggccgcgcgcgccctcctctcacccggcgctcggggctcagcaggggacgccgctccgacttgggcagggctcccggctccggcggctgcggacggttccgtcccccatggcccggccccgccgcctcccgccgcccggtcagcggccaccgcggcccccgggtcgcctcccgccgccgccgccgccgccgccgccgcgggccatggagccgagccgccccggggggcagggcggggccgggcggccgggcagacccacggaccggcggacccacggaccacagcgccgccgcctccctcccgcgctacggcgcctcggaggggcaggcccggcccgcgcgcccgcgcgcgcgcccccgcggcccccgcctccagcacgcccgcacccgccgcgcgccgctgcgagcccgccctgccggcggccgaacccgggcacccaggaggcacggacctgggagcgcgggaggaaatgggtcaggctcgtccaaagggtgggcttagaggtcggaccggcgagcgggtgcagaccgtggagtcccttagcggggagtggggattgcattggagcgcgaactccccaggaaggggacctggaggttgggcggactcaggctgcggggctagggatttgtcaactctttaattggaccaagattcaaggtcggccagcagagagggggcaggacccttaaaggcgtgggctggaggtggctggggcttctggggtaacaggaaacagggtcagggaaggagaaaacgagattggatggggtgggaggagctgccctgggccctgggaacaaggatcagagtagaggtttctgggaggggctgctgctagaaggacaggaccatcactggaggcagagaccactgcctaggctccaggcctcacaaggacggagatgatggtgcccgactgtacaaccaggtaagtagatgctgtcagacaattcgggcatggtggtcagtcagagccctgagcaaacgggcctagaaggactacaggcacaaacacacccaggggcccctatctgcacactccctcatccccaaacaagtctgtttgggggttagagtccacccagcacccgtgcctccccacctaggagcaagctctgtgcagatcagaagtgtgcagtcagaaagctgacaagggattggcatgaggctgaggcgtacaggcctctttacccttcctctgtgaacggtgacgcaagagggcaacagaagctgcactgacccagacaaataccaagtttatttcacaaacactaggaagatgggttgagggtggaggtgggggacacaggtgcgcagctgcacagagtcagcagcagcagcctgctccccgcactgaggactcggcctggactgcagtgcctccaaatcaacacgcagcaagaggggagtgcagggagggccctgaacaccaagcctctgaaaggctaagggacacagctccagctgtcccaggaaaaccagcaataaataaaagtgaggcacggccccacccacacatatcatctagtcacccatcttcactctggaggtctgcaaaaaaagaacaggagaaatcaggcagggacagaggaatag

SEQ ID NO: 190 - DNA, 4001 bp, Homo sapiens
cttgcagacgcgctccagcgtcccccccagcagtctgctcatcccgcaggcggccactggcccgcccagtgggcccgggcatccggctgctggcctgagcagggtgggagggaaacagatccagcaggtcagggcaggacaggcaaggctgcccacctacctcccactcagctgctcacactcgtgggccacacctcacactgacctgctcataccctttcacactcacagactcaagaatttacctccaaacagacacccaggcacagttcccggcaactcagtactcacatcctcaagcacaccccactactaagccacatacatttaccttcctccacctcactgacacacacactcaggcactcacccttattgcacaactctacacacacactcacgcattcccaggaacacagacacgtgaactctaaccacactggtttgtacctaagcatggagacatgtttacctatagacccccatgtgcccctgtgcccctgagaacagacacctcacatggcagcatccttaacccagaactcatggcttggggaagagggaagagacggaatactgtgcacctaccatgcaggagcactttatactcatgacttcatttagtccttccaggagccatggtgggaagtggtttggtcattcagatcccagcgacaagcaggccaggccaactgggaccaggctgggaagttgccctcagcatccggggggcccaaatacagactggatgtttacagaatcccttcccactggagcaaaacgtcaaaatacggggcaaggcaggggacacccctcacttaagacctcaaagccagccccttgggactgggaccaagactctgggtcctgcccagcacagctggttctgattcccggaacgggatgcttgggcctggagatgggcacagcactgggcatggcaggaagggggtcttgcctgggcgatggctccagctgtggttccaagagagcggcagccacttctggcagtgcttcagggagcagggtgagtctcacaggcacacagaatcacagggacaccctggtcccagctggtcacccacactcagacacacagagaactacagtcacagacacacccgggtgacagtaacacactaagtcccacactcacaaacaaggccactgctcctggacttccacagccatacatccagactctcagacagctcacacccagacccacgtgcagacattcccaccctccctccggcgcaggggttctgggtcaggctggcggccaggctgaggggtgcgtttgggcggggctggcaggctgaacacgtggcacccgcggacgggcaggccgcacagaccgggtgggtgtggagcctgggggcagggggagtgggtggagggcagcggatgaggcaaaggccaaggggaaacgtgtatggaacgcctccccgcgccacgaggccggggcgagcgaggacaatgagggaggccggctggacgcgggcggagaagcccaggaggggcgccggagtgggggcggggtgggggcagccaggccggggtctggccgccggcgcctctctcaccggctcctgggttgggatctcggggccgcgctcggggtgcccctcgcggggctgggtctggaatctcggggccctgggtgggggccgcgcgcgccctcctctcacccggcgctcggggctcagcaggggacgccgctccgacttgggcagggctcccggctccggcggctgcggacggttccgtcccccatggcccggccccgccgcctcccgccgcccggtcagcggccaccgcggcccccgggtcgcctcccgccgccgccgccgccgccgccgccgcgggccatggagccgagccgccccggggggcagggcggggccgggcggccgggcagacccacggaccggcggacccacggaccacagcgccgccgcctccctcccgcgctacggcgcctcggaggggcaggcccggcccgcgcgcccgcgcgcgcgcccccgcggcccccgcctccagcacgcccgcacccgccgcgcgccgctgcgagcccgccctgccggcggccgaacccgggcacccaggaggcacggacctgggagcgcgggaggaaatgggtcaggctcgtccaaagggtgggcttagaggtcggaccggcgagcgggtgcagaccgtggagtcccttagcggggagtggggattgcattggagcgcgaactccccaggaaggggacctggaggttgggcggactcaggctgcggggctagggatttgtcaactctttaattggaccaagattcaaggtcggccagcagagagggggcaggacccttaaaggcgtgggctggaggtggctggggcttctggggtaacaggaaacagggtcagggaaggagaaaacgagattggatggggtgggaggagctgccctgggccctgggaacaaggatcagagtagaggtttctgggaggggctgctgctagaaggacaggaccatcactggaggcagagaccactgcctaggctccaggcctcacaaggacggagatgatggtgcccgactgtacaaccaggtaagtagatgctgtcagacaattcgggcatggtggtcagtcagagccctgagcaaacgggcctagaaggactacaggcacaaacacacccaggggcccctatctgcacactccctcatccccaaacaagtctgtttgggggttagagtccacccagcacccgtgcctccccacctaggagcaagctctgtgcagatcagaagtgtgcagtcagaaagctgacaagggattggcatgaggctgaggcgtacaggcctctttacccttcctctgtgaacggtgacgcaagagggcaacagaagctgcactgacccagacaaataccaagtttatttcacaaacactaggaagatgggttgagggtggaggtgggggacacaggtgcgcagctgcacagagtcagcagcagcagcctgctccccgcactgaggactcggcctggactgcagtgcctccaaatcaacacgcagcaagaggggagtgcagggagggccctgaacaccaagcctctgaaaggctaagggacacagctccagctgtcccaggaaaaccagcaataaataaaagtgaggcacggccccacccacacatatcatctagtcacccatcttcactctggaggtctgcaaaaaaagaacaggagaaatcaggcagggacagaggaataggtaaggcagtgacaaatgatagaagatgacatctagcacatggttggatggacagaccacaagagatatatgactaaccaggatggacacactgtgacagacaaggcagacagggacagacaaccacagagttacgctgtgggacagacggagagaagtggcatatggataaagctagtcactaagaatcaactcagtcaagcacccacagtcacactcagaccctcaggctgatccttagtcacaaactcacacactgtcagacagactagacacacacaatttagacaatggtgtcctactgacaggcatgtgagagggagatacacatagctccgagagacagtcaaacacaccatgacagactgatatagacagacaaaattccattctagtctagatcacaaatacagactggagacatgaaaagcatggcagataaaatgagagaacagaaagagggaggactaagtgctatacagatacaacgcattagaaaggggggaaaaagaacagggctgttgtcagtgacaccaaatcagagacaaaaatagagagcccctgtaggagaaaaccagaagatggaaatgaggaggtggaagctgtttgggggaatctatagttataggtagagaaggagagcacttcagcttctccagaaggagggtaaggctaggttggggacaaggacacagaggcttcccaaggggattcatcacctgaagaattgcgac

SEQ ID NO: 191 - DNA, 4001 bp, Homo sapiens
gggctggactggggccctctgtgctcccacggccccctgctccacctccacttgtgtcccatcatacgggagggacccatgtccaagtctaggaggtctctgtggtcggcgggggcgggggggcctgcatcagaggtcccttctgggacctagtggccagccctagccaggtccaccaaaggccttaagatgctgagctgagtgccctggcctcagctgtggctggcacctaccccaaagggttctacaggcttcatccttctttcagggtctaactccctctcctcagggccctcaacatctcctcctacagcatacccaaggcctgcaccaccatggggtgaggcctgccaagggtagagagtggggctcaaccccttctgagaccatgcacacacctgccagtgtgcatgccaacattcacatgcacacactgtgcgtacacattcctgtgcacactgacaaacaccgactacccacgcccaggtccatccacatatccacacgggcagacaaggacccacaaacgcccccaacccacatatatacaccaacaggcacatggacccccgcatgggcacctggttgatgacatagacgccgtagcgcagccgctgccgcctcaagatggggtgtagatagtggagccagtagcgcaggtggtgttcccggtgtctaaaggggatgatgaccgccaccgtctgggctggggtgcagtcgggcggtgtgtatcggccgcccatgagcacgcctgggttctccctctgcacccgctccaggggcatgggtgaggtgaactcgatcagcagtctgcccactgcagacaggacagtgtcaggaatcagggcattggccagaatccacagataccagcccccaccctcagcctgggggtgggctagggaaccccaagaatagccctcttacaacagacctggacccctggcacacccctgggtccagatgccatttctctagtcaaaccaataaaaccctgtttccccacaggcaggccctaccctccaggctcaccaagaccaggtggcgagtcaggacagggtggcagcgtgggagccgtgggaccgggcagggcactggggacctcagggagcccggagctagaggcggtggcgttgggccgggagcagttgctgctgctgctgctgctgctagcagctgggtggagggcatgggcagggcctcgggcactgaagcggctgaagaaggccaggtgctgggcgtagacgtcaaagtagaggatgacggccacgaggaagtgcagcaggcagagaaggagcacagccttgcagacgcgctccagcgtcccccccagcagtctgctcatcccgcaggcggccactggcccgcccagtgggcccgggcatccggctgctggcctgagcagggtgggagggaaacagatccagcaggtcagggcaggacaggcaaggctgcccacctacctcccactcagctgctcacactcgtgggccacacctcacactgacctgctcataccctttcacactcacagactcaagaatttacctccaaacagacacccaggcacagttcccggcaactcagtactcacatcctcaagcacaccccactactaagccacatacatttaccttcctccacctcactgacacacacactcaggcactcacccttattgcacaactctacacacacactcacgcattcccaggaacacagacacgtgaactctaaccacactggtttgtacctaagcatggagacatgtttacctatagacccccatgtgcccctgtgcccctgagaacagacacctcacatggcagcatccttaacccagaactcatggcttggggaagagggaagagacggaatactgtgcacctaccatgcaggagcactttatactcatgacttcatttagtccttccaggagccatggtgggaagtggtttggtcattcagatcccagcgacaagcaggccaggccaactgggaccaggctgggaagttgccctcagcatccggggggcccaaatacagactggatgtttacagaatcccttcccactggagcaaaacgtcaaaatacggggcaaggcaggggacacccctcacttaagacctcaaagccagccccttgggactgggaccaagactctgggtcctgcccagcacagctggttctgattcccggaacgggatgcttgggcctggagatgggcacagcactgggcatggcaggaagggggtcttgcctgggcgatggctccagctgtggttccaagagagcggcagccacttctggcagtgcttcagggagcagggtgagtctcacaggcacacagaatcacagggacaccctggtcccagctggtcacccacactcagacacacagagaactacagtcacagacacacccgggtgacagtaacacactaagtcccacactcacaaacaaggccactgctcctggacttccacagccatacatccagactctcagacagctcacacccagacccacgtgcagacattcccaccctccctccggcgcaggggttctgggtcaggctggcggccaggctgaggggtgcgtttgggcggggctggcaggctgaacacgtggcacccgcggacgggcaggccgcacagaccgggtgggtgtggagcctgggggcagggggagtgggtggagggcagcggatgaggcaaaggccaaggggaaacgtgtatggaacgcctccccgcgccacgaggccggggcgagcgaggacaatgagggaggccggctggacgcgggcggagaagcccaggaggggcgccggagtgggggcggggtgggggcagccaggccggggtctggccgccggcgcctctctcaccggctcctgggttgggatctcggggccgcgctcggggtgcccctcgcggggctgggtctggaatctcggggccctgggtgggggccgcgcgcgccctcctctcacccggcgctcggggctcagcaggggacgccgctccgacttgggcagggctcccggctccggcggctgcggacggttccgtcccccatggcccggccccgccgcctcccgccgcccggtcagcggccaccgcggcccccgggtcgcctcccgccgccgccgccgccgccgccgccgcgggccatggagccgagccgccccggggggcagggcggggccgggcggccgggcagacccacggaccggcggacccacggaccacagcgccgccgcctccctcccgcgctacggcgcctcggaggggcaggcccggcccgcgcgcccgcgcgcgcgcccccgcggcccccgcctccagcacgcccgcacccgccgcgcgccgctgcgagcccgccctgccggcggccgaacccgggcacccaggaggcacggacctgggagcgcgggaggaaatgggtcaggctcgtccaaagggtgggcttagaggtcggaccggcgagcgggtgcagaccgtggagtcccttagcggggagtggggattgcattggagcgcgaactccccaggaaggggacctggaggttgggcggactcaggctgcggggctagggatttgtcaactctttaattggaccaagattcaaggtcggccagcagagagggggcaggacccttaaaggcgtgggctggaggtggctggggcttctggggtaacaggaaacagggtcagggaaggagaaaacgagattggatggggtgggaggagctgccctgggccctgggaacaaggatcagagtagaggtttctgggaggggctgctgctagaaggacaggaccatcactggaggcagagaccactgcctaggctccaggcctcacaaggacggagatgatggtgcccgactgtacaaccaggtaagtagatgctgtcagacaattcgggcatggtggtcagtcagagccctgagcaaacgggcctagaaggactacaggcacaaacacacccaggggccc

SEQ ID NO: 192 - DNA, 4001 bp, Homo sapiens
aagccccccagtgacaggtacatcatgacagccagctgggagcccacaagcagggccagcgtgcaaggccgctccagcagcctccgcaacatcctgggggtgagatctagggagggagaggggaattctgggggtaggcaggaagagagcaagccagcagagaggtcagtaggtagggttgaaggtgatgccaggggtaaagaggaaaaagcagaaaacaaagtcacagaagggagcacacaggtgcacagtcacgcaaggaaacagaatgtaaccaccagtaaccctaccacctgtcacttcagcccaagtttcgctctcctctacctccccccaaaccactcccaccatctactgtcagtcctcacccccaaaaatgtttacatcattcaaatctcatgttcatttcagaaagtctctagagaaccccctcttccaattttagaagggaagagatagactcacctaggttcaagctgtcttcttagggatcatgggggctccagggggtcccggggggacagagatgtgaggcattatctaaaattggaaatgtcacagagggcagagaaaggctccatccagcactccagcagcgaatctgggaccagctggaacagaagtggtaaaggataactagctacctgcaccgccagagatcaggatcagggtgaagctggtttcccagcaggcgaagtgaaggaaagtggttggaaaggaagaggaggagcaggagatggtaggtccctcgcctatctcccgtgctaccctggaatgataagtgtcaggttcatacttaaccacccccgtacccccaccccaacaggacagattggggagtggggacaggacagctaatggaaacattgttttcccccagaccaagaaccagttgaagtggcgacagagtcatgacaggaccgtggagtggcctaaggagtacccagggcgaagtaggaaacaggctccttctattcttcatgtgcctgggtgccaactcctcaggtgcagggaccgtgaccacctgggggctgtaagcgaacagccccggagctcggcggagagtagggtgggggtggcgtcctctaccttttctacctttcccctcttctagcgggggtggggaggagggttactgctgaagagaaagggagagggagagcaggggcagagacagtcaggggtggctggaagggctcacctagaggggcgtggtccgcgctgtggagggggttaaaacccagctctttcggagcacgcccatcctatcccagtctcttgcttttgccctacctactagcaacgtgagcccgcccggcccccgtccatacttccacctaggaccccgtccctgctcaggctcgtctccaggcgttacccaaaacttctcactctctcgaatgcccaaacctttatcccaggcctccgtgtcgacgcattcccagcgcacatacctggtcttttgctgcctgtcgtcaccgccaccccaacagccgggcaggcatcgctgccgccatcttggaagcgggcgctgcgggggcggggtctcgcgtcatggggcggggcctcggggcggagccacccgggctgactaggcacccggtcccagacaccgcgtggccgggggcttgtgagggagcagcgcctgagcctgcccacctggaacgcgttgtaggcgaccccctggggagcgggtgctagggttcaactccactacgcagactgctagtgggatttcatttcctgcccctcagatttgtaaaagcagaagctcaagcccttcattttcctctgggccgagactgatcaggaggctagtgagccggtttctggtgctccgctgacctcgttatcaccttgtggttggctgagccctctcccagtgtgtcagtggcaccccctgcagcctagtgccacttagtatcaattgttccttacgcaggctacagcgttgcggaccgctctagcgcatttttgtattcccgttgtatcccgcaggcctggaaataaaaagcgattagttaataaaacaatgaaacattgaaggtggagggaaagacagcgtcttctttaaagtcaaatgatgtttccccagatattagagtaaaatggatgctccgttaacatgcaatatgtttaccttacgacaaacactaccgcctagcatattgtgttccttagaagcagatattcacgctgaagaagcaatcagagacttgaataactcacagaatctgccccaaaaagcccatggtcttgtgtatcttgtatggagggagggatgtaaacaatataacgtgataaatatgctggcctagaagtggcaactcattcatacgtggagattctagaaaggcttcccagaagtgatggctaatgggaaacctgaaggacttgtctatagcatatccttctgctttaaagattctgttttcatgggagttattttacaattcatgtaggtaactgatctgtatgcaaattctatcctgtctggtagaggttcaattaacctgctgttccccacactgtggggaaaaaaagcagttttggcgtccattttcatattcatttctgttttcctgatccataaatatgtccgttctctagattttctcttgtattaattataacatctgctagtttcttcatgagttaggtaaaataaacacgtgttcattcttttcttaatttcttttttctttactttttttttttttttttgagagggagtctccctcctgttgcccaggctggagtgcaatggcgctatctcggctcaccgcgacctctgcctcagccttcctcagtagctgggattacaggcatgcgccaccacacccggctaattttgtatgtttagtagagacagggtttctctgtgttggtcaggctggtctggaactcccgacctcaggtgatccacccgcctcggcctcccaaagtgctgggattacaggtgtgagccaccacgcccggcctttttgtttacttttttttttttaatttaaaaatttgtgacagggtctcactctgtcacccaggctggagtgcagtggcaagatcacagctcactgcagcctcaacctcctaggctcaagggatcctcccacctcagacccgtgagtagctgagtagctgggacaacagcacatccagctaattgtattttttgaagacacagagttttaccatgttgtccaggttggtctccaactcctgggctcaaactatctgcccaccttggcttcccaaagcgctgggattacaggcgtcagccacagcatcaggcctcttaattttatttctctttttccttccttccttccttccttccttccttccttccttccttccttccttccttcccttcttcctccctccctcccttcgtcccttcccttcccttccttcttttttttcctttcctttcctttttttttttcccaaatacccagtcttcaaggagaatttttttttttttgagtcggagtcttgctttgtcacccaagctagagtgcagtggtgcgatctgagctcactgcaacctccgcctcccggattcaagcgattctcctgcctcagcctaccgagtagttgggattacaggctcccgccaccaaacccggctaatttttgtattttagtggagacgggatttcaccatcttggccaggctggtcttgaactcctgacctcatgatccacctaccttagcctcccaaagtgctgggattataggcatgagccactgcacccggcctatgtgttcatttttatgttggtattgacaaagaccatctccttaaccagactttcaacaggctcctctaaggcctctttttggctaggtcttgtccttatgcgctgtcttgggcctgcctagccagttatagcaagaatcctgccaagtcagtttagggataattccctgcccgcttctccacccttgatagctgatctatctgatcaccctcacctgccttcaggaaagatcctgt

SEQ ID NO: 193 - DNA, 4001 bp, Homo sapiens
gtgggaagggagggagggatgggggcagataccagatggaacctcactttgtgttacagaaatgcagaccacgcacgcacaccccagactagacatgtccttttgaagagtgatacagaaagggggcagaagagagagcggaaggaggagagagggaagaagaggggaagatctcttctctcaatcttggtccagagaagaccctccctaacctccccactaccatcaccaggacatatcctgcgcagagtccacactgcccctcaccccagtagcagtgcagaggatactccccaggtgcttgctctgtcccagggtcaggtggattcccccacaaccgactccatgcgcaagccaggcagagcccacctttgcccccagccctcacctcatgggaaatgccatggggtagaggctctctggcaacacctgaccaagcacaaacaagcccaaccaggcgtcctggagcccgcggccaatcctgctggtctgtacgtgaaggctcaaaggactcttgacttgctgctggggtgagccctccaccccaccccaacccatcccacccccagaacatatggcctgacaaccaggagtgtttgggcatggctagcacgaggaggcacctggcctggcccaccaatctcctctccccagggatttcccagcgtcagtcctgcagccaccgctgatgctctggctgcggaaacccggggttgcccgcgggagaaggggtggcgggtcccaggcttcgggcagggggcgccagaggacgcccaggagcccggccggcagctggcgaggcgggcaggcaggcggcatctctcggcccgggcgcccctccccccggcgggcaacagacccgtcgcctgctctgcacgggccgcggcgcggaggacttcccccggctgtgccctcggaccaagctgactgcgggagtggccgccaacttcacagcctacaaccccctccggatcatgccggccctggggctgcgggagggtgcgtctggtgcccagctctatgaccaggggtgggaggatagggatgggggatggacagatagactccggccaaagatggacacgggagtcagggatgcgggtccagtcgggatctcagctggaggggagggggcgcggagcagacacgggggacacggccccaattccaagctgaggggaggggacttgcagcaagattggcgagggaaggcgggactccggtcagatagatatgggggagggggcgctaggggcagaaatagagaagaagcatggtcggggtacaggcgcgggggagggtagaaactatgggcagacatggatggggacaggaaagactccgggcagtgatgaagtggaggagaggagcagggtccggcattcagaccgtgacgggaaatagagggggagacacagttgagctgcaggttaatgggggggctctaataaaggtggggggcacactgcccggatccaggccgagatagggaaagactcgagacagcaagcacggtctgtgtcagaattctggagggggagactttagcatagatgggtaagagggtcggtccaggctgggggagggggggggccgagattagagattcaccagcgattaagggggcctcggccctaggtttgggagttccccagaagatgggggtgggcgaacgctgaacgaactcagttcgggctgggggagaattcagcagagacgggttaggagagcgccccgagtccgggccggtgcggaaactcgggaccgcgccggcagggctcggtgcgaggccaggtcggggtctggggccgagcactcacctgggcgccgtcagcagcaggagcgggggccggcgctggcgggggcggccacggggcgcaagtttgccatccctaagtcggggaccgggccgggcgcagggtaggtagctgcagccgcgcggagggccgaggctcccgctctcccgggcggcgggtgcagaaaaggcgccgcggagcagcgcggggcgggcgggcgggcggcgccgggccgggcgcgggctcctgccgccgccgccgccgccgcctccttgccgcgccgccccccgctcccccgctcccccgccccgagcaccgcccgcgccgcgcgccgcctcctatttgcgggcggcggccgcagccccgggctctgagagccggtgccgcatcctcttcggtctctgagcgccgccgccgctgccgccgaacccggttcctccggccgctccggccgctgcccgcagcgcgcgccgggccgagtgacggccgaggcgggacgcggcgcctgcgcgggccgggcccgggagggggcgcgcgccgggccgggcgcgaggagccgcgggagaaggggcgggggcgacgcgcgccgcctcctgttaaagggggaacagcgccagccgagccgatcgtgccccccacctccccgccttgggccccaggcgccggcgcgggagaagccctgggtaagcccccgcccagcccgctgcttcttggaccgcagaatgaggcgatccgcgacgcccctccagctatacccatgccggaggcttgtcgcgccgccagggtgtcccgggccctgcaggctgaagcatttgctcaccttcccatgtgcattgcatattgcatgtccctgtgcatgcaggtgccagtcatgtgcgctgaactttgcatatgcatacaggtgccctaagtgtgcactgccatgttgcctgggtaggtgcatgcaagtgccacacacatgcacggtgtattaacatgtgcccaagtcctgaatgcatgttgcttgttcctgtgcgcagggatgttatatgtatgcaagcttacaggtgccacatgtgtgctgaggactgtgggtaactcatgtagcagccacatatgtatactgcaatgtgacatgtttgatgcatactgtaaactgcaatgttgcacgtccttaggcacggggatgctacacgtgtgcagtgtgttacatgttttcctgagtccctgtctattcccacaagtgcctttccctgtgccaggggcgcccccatgttgcatctgtttgtgtagaagcagcagagatgtacagacccaccccttccccatcttggcactaagcccagaaacagttgggtggggcctgagccctcatggttcaggcggtacacagggagatgcccatggttcagggctctggtcaggcagtttgtggcctgggcatgttgccatcagtaaggtaggccgaccagggacgcaccattgcagccaacacaagtaggttaatcccatggctttggtcagaggagaaaccagcagggggcagctttgcaataagggtgggatggtttcagctttgcgatgagggtgggatggtttcaggaccatactttttgaaggttcactagccaggaagggccaaattttcagtgcaaagaagtcctcatttcagcaaataccaaccccacctctccactgatgccccttaagttgtggcaccctcaagatggggcaagaagagaaaagcctacctcttcccaggggcagtaccaggaagaggcatagaaccgccctcttttccctccttctgtccctcccacctccagcagcctcggtgacatttgttgtgagtgattgtgagagattatcaactttaatggaaggaggtaataagggacgatgaaggaatctcacctgtcaccttaagagaatttatgaggccttatgaggcagggaggagggctgggccggcaccttccctttcgctgcggatgcccaaggaggcctgtgccttgggcctagcactggcaagcaaggctcctagggtttgctaggcaccctcaaacacagtcagacatctctggatttcaaggctcagctactatgtgaaagccaggccaggcaggccttgccagctgcaaagtatgttgaaagccaccccagggcagtgggaaatccgggccccctccttacatgggcactgggagggggaatggggttgctaga

SEQ ID NO: 194 - DNA, 4001 bp, Homo sapiens
agttataggtgtttgttttactttttcagatgcacttgggaaatgttggaatcaagctttctgaagccacctgcatcaggtcttttaaagcttcacaaagaatatgtcacccagacaccgagttgagctcaaaatcactgagcccatccaggtgacagcatggagatttccggattctatttgtcaactttggttttttactgaaatgctgggaaatcgatatgtcaatccctccctgtttgtacccgtttgtgcagtgctccttgatcttccctgcaggaagaacaataatctctctaattgacccactggggaggttggtgcacaaaaaatcgccagaccagactgtacatctgttttggacactattatgctaatgctataatagtaaaatgaggagccaacatcctaccttccagtcagtacatttctttaccagaaaaacaaggatcaataataataaacaatgtgtctgtaaaggaagaaaaagctctcctggtatgttaaaacttttgccatgcaaagactaccacatttacttatgaaattgtctgatgagaaaatggaaaaagggagttgaaggacaatttccattgtcatcttattttttttttaacaaaaaagagattaatccaatttcataagattttatttttataaatactacctcctaagtacttgtaaggggccaaaaatctttgtaggatacagatactcagttgaggccatagggtaagaagggtgcttttaagaaacttattacaaatttttacgggctaaccacaatctaatttttttaaagttgctctgttcatgaactcagaaatttttcctccattaaaaccgataattcctgtgatgatgttaagaaaataaagtggggggggggtgaaatcacttgtactaaagaataaacaccaggttgtgatcacacccacgctagctaagtggtttctctctcctacctccccccattcccattcccaaagtctaggctagaaaaaccccaagtccatcccttttatcaacgaaaagtatttcctgtcggatgccctccgccgcccctcaacccccagtagattaaaattaaataaaacaaaggaaggagctggatggccgtgaaggttgtggggtagaacaataaacagaacttcgaggagtccccacatcgcacgcccaggcctcccttcagctgcagtcttttgaccgtcgcccagtcgcccgagaagctcctggaatcgctccccagcagagatctgctgaaggctgaaggggagattgggaaccaggaggacaagctagacggccgagagcgccgggtggcgggactcaccgtggcatttgatgtcgctctgggaatcctcccgcttgtcgagtttggtcttgctgtcctcctgctcgagctttggcctgaagctctcgtgcactgcgttgctctcctgcttcggggtgtggtggggagaggatacgctggtgctgtagggtgcacatgccgccagaggtttgctgtcgcccaagatgtccttaattaaaaaagaagacgtggaagtcctgggggccgaggcggccgagcccagctgctgggggggcggcggcggcggctgctgtggcggcagcggctgctgctgttggggcaaaggctgcaaactttgcgtcggggccgcggccggcggcggcggctgctggctgtggtggaggtggtgatgatgctgggtcgcgtctgctaccagatgcggctccgggggctccatggtgactgagataggagaagaaggcgccgtccctacggtatcaatctccgaacagggagatggggtggcctgactcctaaaatccgcggtcctggcctcaccgagcgggcggaaatctccattcatcatgcctgggctgcctgaactggcactggacaaaatcgtgtctattccaaaactcgacccgctggccccttccattgtcattgctacatgaggtccacgccactccgccgttcagcagccgccccgaaccagcgaagaaagctatcgatcgtaaaacaaaataaacaccaaacaatgttgccgccgcttaaaaaaaaaaaagtggggcggggagagaaggaagggtaattgggaagtggcaatctgtggatactttcgacacaactttttttcttttatgcaaaaagtaggggtggaaagaaaaaagatgcggggggcggggggagttaaaaaaatttctgagaaaactcggaacttgcgctccaggaacgactgcgcacgtggcgcggcggtggcggcgcggaggacccaggcgaaggcgaaggcgaaggcgaaggcgcaggcgaaggcgaaggcgcaggcggcgggaagctacgccaaagccgccgccgccgccgctgccggggtctgcccacagcctggcaccgggcggcagcggtggcggcggcggacgcggcaggtgcagcgaccgcgaagcccgggcggccgcgcgccctcggaactcccccgcggctcccgaggtggcagccgcgcgccactcggcagccccgtagccgagtttctgaactttcttggaaagttgcggggcagacacggccgcagcggttgcggcaacccgaggaggaggaggaagaggaggacgacgagaaggagcaggcacagaaggaggaagcggcggagacgcgatgccgggcgactccggccgctgccgggcgcgttcgcttgtaatccggctgctggcgggcggcgccgaccccctcccgtgacgtcacggccactaccgccgctccccgcgccgcgccgcgccgggcccgcgcccccgccaccgaggccgcgcgtccggccccgcgcccctattggccgcgcccgcgcgagcgagggacgccgacgtgccagggagccaataggcgcagcgctcgtgagcccgtcagcggactcggctcggactccgctgctcttttgagaacccgcacatccctgagcccgcagccctgagccgaactccgagtccagtggtcccggtgtccacaatcacgagtgcgaggcaaagggagagggaggaagagatcagagggagaccagagaaagggaaccaaaggggagaaagaaaaaaaaaagtagcaaggattcgcccgttttcttaagtcagaagagagagagaagaggacgggaagggacttacctttaggctccagcgcggcggccctcgcagcctccccaaacgcgcgcgggaatagtccgaagacattaagagcggaggaaggagatccctgaaggaatccacagaaaagtgtgtcacttcaggcgccggagccttgcataagcgggcgggtcggctctgggctctgatttctcgcccgacgaacccaggcgctcgggctcagcccggcgggaggcggatccctgagagggacacagccgggtccgcgtccaccaggcgctctcggggaggacgaggcctgaggctccaagctggggaaccagcctggtctccagctggaaaaaatgcctggccagacgctttctcccgaacgggggagctaatgcccgaggcgttctctggtggcgagggcagccacggttcactgcggtgtcgggcgggcgcggggctcaggacccatagcggctggtctgcagcccgcgcccctgccgcgccccgcggcagtccgtccacctctgtcccccggcccctttcggcgagcgctcatttggaaaggaaacagtcactgcggatccacttgggacccggagcatgactgtaacgcctcgttggagtgtatcaacttgcattattttctctaggacgtctccaacctgtctcatgttgaatgtcagagtaatgggaagtgccagtgacaagacggcgtattactcctgattaagtgccgtgtcaacctaattagcagagtaattataaggtgctaatgaatgattcaaagttctttgagttacattttactccaaattaccattttaagaaccctatgaatctgcgaggcgggcatcgcttccgtggctaggtct

SEQ ID NO: 195 - DNA, 4001 bp, Homo sapiens
taataacacaaaaaaggatattttcagttatcatttgatctcatcttgtattccacataagacacacatcttcccaagttactgcaggtaagaagtttcagatatgcaagaatataaaggcataaaaaggagaggaataaataacatacatagcaaatagaagcttaagggaacaaagtatgataatacagtcttctagagaggcaaagaagtcttgataaacaaaaccagaacattacaggggaacatgtggttagaagacagctctttagctttagaatcacacagatcctagttttgtctcttagtgtcaacatggtcttgtgtaaatggtttaaattctctaaattttcagttttctcatttattgtaagcataattcattcattctttcaatatgtattaactgagcacctaccatgtgccagacactgttctagacactggggatacaagccctaaacaaagggtcagtgaactctgcagacttggtgctaacagcctaatgcttaggattgggatgcgatgaaatgagattttgtcctaaagctcccagcatacagtatgccctcaagaagttacctgcctttgttgaagttgctactttaaaaaaaaatgtattctgcatagtgcttctcatgcctctttgctctctgtaatcaaaaagtcactagcacaagaaagcagcctgcatactgccctcggggagctgactctaaactggactcatcaccatgatcacacctgccaacccagcagaaacatttaatcaagacagaaagaggtgagcgaaagttagagatagtattatgttattaaccatatctgattcagtctcaaaaatcctgagaggttgatgttactatattcattttacagatggggaaatggacggtccgagaggttaaacaaattgctcaaggctgctcagcctgtgtgtggcaaagcccaggcccaaactcagatctctgtgacactccagcgacacctgatgacatgggccgggcgctgaattgggaaggtggggagtaaggatgaaaagacccagtcttcgtcgtaaggcaggtggccaagacccaggcaaagtttccagacggccgtccctgtggccaacctggtctccttcctgactgcgccgctgtaaacgttgctaggggacagcgaactgggaaggggcaaagggtttccaccagctgggggcggagtcggccctttgtgggttccctccgcccaggctgactagtccggcgttctccattcccgcggcagcaccccccccacccgggggaatcctggaggggctacaggcgcgggtggtggggtggcagtcgctggctgcgccaggatggggcggccctcagggcagtgcggagcccacgtgccggggagcaccggccatgcccggcccagccaggcgtcggcgccctcgggcttcttcccccagagggcgcaggagctggctcaggagccattccaggagccgcggacactgtgcgcacgacagggtccctggatcgcccccattccccaacatccctacgcccctacctctgcttgtctccggccgcacccgccacctctgcacctccgcagtcaccaccacggaactccagcacccacctcctcgccccccgcggcgcgccggtccccgcaccccacggccctccctgagcctctcgccctctacctgctgctgcggctgcggctgcggctggttcccgggcgccgcgacgctcctctgcaggacgctgccggcggccgggagcccttgcgacatgccgggcgctcctctggcccggcccgccccgccccgcccgcgcgccctgcccgtggggctgcctacgggcgctgtcccgccgccggcatcctcgtgccgcacccacggcctcgcgccggccccgccccctcaggcttcccgctctccccgctactccacgcgtcggcccagtgtccccgcgcgccagtcccggcagccgtccttcccgtcccacgtctgccccgccctccttctcccacccccgcctcgtttcctcctctgcccgccctctctccgcacctcggggtcccaaatcccacccctgccgcggctttccgccggcgccccgcgcttcgtggaagtcacgtggtggctctgaaaccccggagggaacgcgaagcccacccacgcgaggcgacgcccgggggggtggggaccaggggggcgccatgcagcctttggggtccttcggcggctgccggggaactcaggttgagaaacacagtgggtgttttggggtcggtgttttttcccggtcccatcgcggcatcttcctgcgcctcagccacgccctgcgtccgccccccggcgcgggggtcacagtcccgggggactttctccgcggcgatcagtcatccgggcgccactctcgctcctccagcggccccgaagccgcggctctggggtgaagacgccggcttcaccgagtcccaccgcgcaccccgagccacgggcgccccagggactctgcagggagtgcctgcccttcccgtctcgggtccgccgggctgtgggagggaacgaggcggggcggccccgagggtgaattcccggagcggagggtgggcatggggaggatgtcccggacaaaaacggtgacgggcttccctgagagcgaatctgccacgtgggacgtcactagtgacaggtttggggatctggacccgccatgccacggttaaacggcccagatcatttttctttttcaagatttatctgctcgtgccaagctggggaccgggttgaggtagggcaagtccctgtccacctgcctgccagtcaaaagatgcgaagccaagacaattacccgtggtcctagcgaaggaaacactagcggccacaggctgtggtctgcatgctgtgagcaccgggaaagataaccgcgattcgggatgggcgggtgggaaccagaccagaagggcagaagtgcctaccaagtgtggtcgcttgggtcttcaggtttgtgggcagcagtgggcatggggacagtcatttccgattcctttttaagtcttaaatgagtgcacgtgccccccgccaggatttaagacccactcttgcaaaagctttgagagagcttgagtgaacttggctgcctggaggccagcgggaaagcgagcggagattcttgtctgtgtgatcagaagcttcggccaactgagaggcggggaggaagacggagggtggacgcagccctttagagttgcagcgccacactccacagcagcaaggctgcgcagcagagccagcgctacgctgggttatctgcccggattaatcttttcctctccgttatttcatcactcagcttaactggtggttgccccaggactattttgcatcccacaaggtacccacacaaggtgcctagcatagcacgctacatacactcaacaggtgctcagtatatgtattgcactaggtcagctgaaagctctcattcctgaagcactaaaagggctctaacgagctaggaaaacatctgggtcaaggggttatcattttcagaagtgatttcattccccagtgttttttatgcacagaaaaggcaaggtagaaacacctcgggaacattcccgtgcactcctacactttattctggtcatgcccacttttctcactgaaccacatcacattttaagtcctttggggctgctgcttccctgtctctccccagggagcctgaaaccatgtcccagcacacacgaactctttatataggcatagtctactgtcttgtgttacgcaagggtttcttcaaatacatttagtcttggttaactaggtagcatttagggcagagatcaatttgatgtaaagatcatacatcaaaatgaatggattaaatagctagatacagaaatgaaaatcagagagctaaagcagaattaaattcttatttaagtcatggaagcataggcaacatagtgagacccccaactctaccaaaaattaaaagaaatca

SEQ ID NO: 196 - DNA, 4001 bp, Homo sapiens
atcccacacaccactcatctccacttcctcttctcttcctccagagcaggccacacctctccaactctaaccctgagagctcagcagtcatgcggtccgttcccttgacgccacaacatccccctctctgtttcagctccagcgtctgtatctctgcccttgttttgaatttcttgagctgttcaggaaactttcctcttgtcacatcatttctgtctgacccgggatgtccatctccctcacagtcttcatagacccaacccagagagttaagaccaggtctctctctctctctctctctctctctctctctgtgtgtgtgtgtgtgtgtgtgtgtgtaggcatgcacgtgtgtacacacatctaacaacacccaccacctccatgctgaatgcccatcagccggcagccaaggtctgtcccataggaactgagctccagcactcagcagggtcagcagggaggcacaagaagccagagctttggctatagcaggagggaagctctctgctacccccttaacggcttcatgaggagcaacatgagcctacacaatataagcagggccttagggcctgtagaagtaattgcaatcatcatataaatagtcctttttattggaagcaaaactaataatactattagcaatgacaccagccgagcagttgcagatccctctcgtatagaatctgaaatgtggatgatgctgttataaatagcaaagttagccatagcaacataggcactggtaatactgtgggtgggtctaagggtaacactgttccctgatcttactgtcatcatctgcaatctaagtaatgcagataataatggtgccccttggacttgacgccaatctcttggtcctattagaaccatgtaggcagagctattccaataggtgggggaatacctgacaggatatggaaatacctgggagagggaattcccaggcccctggcagtgctaggaaggaatgcaatagtggtaaccgaattccagctaatagttactgatgtctacctgagccagttctcctaaatgcttcctgtggataacctcaactgtgagaaaaagattgtttatgttttgctcattacaccgatgaggaacccgaggttcagagaagtcaactaactaccccaaggtcacagagcaaggagccgagttgggattccagccgaaatgggcactccgaccaccccctagagcggctctgatcggctgtcctgccggactacagtaaggtgtccccagaagggttgctggccgctgctcctggagctgcctgtgcgtgggggcacggaggcaaggactgatccggaacgctaccgccctgcctgggacaaggtcggaaatctcggcggccgcgctgggacaggagcgcgcagcagggaagatgcgaggacccgaggggttgctgatcagactgcgagcagcaggggggctgccactggcagagctggaagcatgtagatcagagatggcagcagcagctgcaggcgctcggggctgtccagcagcctaccccgctgcggtgtcaggagtcgacgagttgggtgccccagagcctcgaggcaagggctgacaggcggggggcgcagaccaggcaggcactcccttctccctgtccccgaccccacggcgggcggcggggctgcggaggcactcacctacccagggctggggttgggtcgcggcactgcgaagtttgtcgcctcctccgggggtctcctccgggtgcacggctcagtcctgcagctgcagctgagactgcggcggagactgcgcgagcgtgaggagaggctggggccgcaggacattcggaagagggcgccggccctcccggcgcagcacaaaaccccctttcttccccccgcccctgccccgccctccccggggccgcccccgccccctggtcgggagcgcggggctctcgggacggtcacgggacccgctgccttctctgcttcggctccggcagcagcggcgagagcaaggacgagcgaagtaggacatcgttcagcggatgagaagccgagggcttggagtagggaggaggggcaggaggggcggggagggagcgttcgcccagcgttcgctgagctaaaggatgacgatgttgcagctggaggggtggaagttggacaactggagagtcttctcgttgttcaaagaagaaggaggagggagtcaattagactgtaagaagtggatgaagggagaatgggggctttgctcctgaaaagagacaccctttctaataaaaaaaatggaaaactcttttctggaggcagaatggggtgcaaaggaccgtagctacctccctggaggcagctatgattgggcattggctcctgtggtgctcccactccctgcacagaggaggagctgactttgcagctggaaggatggaggttagacagcagaatcatgggttaagcaaagcaattcaggaaatctctagacctggggtgggggtggggtgagggtggccctgtgaagggacattaccagtcatgcaaaccaatgtgcaaaatgcaggcgttgctgggagcccagaaggcctactggccagggctgtcgatgctgaatgtgcagcctgatgccagggggtgggccttgagtgctgcccagccaggaactcctcagcgcccagaataccaatgaccctcctttcccccagctccagggcctctgcttccctctcctttcccaggctctctttgcttttccctcctccctcctgggactgtaggcaaagcccctggcacggacagtgggcaggacagccagatgcctagattccctcccctggataccaatattggcaccaaggatagctttggagggctttgatcctcataatctccacagcatcttcaaaataccccaagtaaagtaaggtgcattcaatgcaaatgcaacctcaaggcagatccccagccttccatctagactgcaccctaggtccctcttgggaactctggactgctccccactgaatgtgccaacgcccccactcaccactgcctggctttcactcccagtgccatggacttggttccaaagggctttgagaacctcacataaaaacccactccaaatctttgagggtctaaagggaagattctggccccttcccagagacccatctactgtagggacaggaaaagaagacctggggggtagggaggggtagatggtaaatttccttaccaagaaaaatgccagccaggtgcggtgtctcatgcctataatcccagcattggaaggccaaggtgggcggatcacctgaagtcgggagttcaagaccagcctagtgaacatagcgaaaccccatctctactaaaaaaatacaaaaattagccggtgtggtggtggacacctgtaatcccagctacttgggaggctgaggcagggaggattgcttgaacctgggaagtggaggttgcagtgagctgagatcgtgccactgcattatatcctgggtgatagagtgaggctccctctcaaaaaaaaaaaaaaaaaaaagaaaagaaaagaaaagaaaagaaaaatgccccagaaaggatgcaagactgaaggggacagaggaaggtgcctgggacagtctggggaggaagggacctcgatctatttacttcgttagaccaatatgagttgaattgaattccagctgtggaccaggaactgctcgaggcctggaaatgcagttccaattcttctagtagaaagagcggatctgagaaggccttcggggacagatctgggcagccttaggatgtctttttgctccccttagaagttgcatttcagagctgcaagaaaaccccccttcctcaggacagtctcagcatggatgcatgtgtccagcctacctccacactggctctacagggcttgaggccagccaggctgagccaggcaaccaagcggctgaaatttaatcccagtggtggctcagatgtaaccacagttcttgcctcagggaaacctgg

SEQ ID NO: 197 - DNA, 4001 bp, Homo sapiens
cacttaatcacgtcaatgactcctcatcatttgagatttggctccaataccccaggcagaattcctctgtatggttttcccacaggcatacagagcatctcttctcccatttcggctgtgagcaactcctaagaccagtggagaccctgagatgccaccagtgcctggcatatttcagaattcaaaaaagatttgtttaaataaatacaatttaaaaccatattccattttaaaggctaattttatccatatgagaattctccctgcatgcaatgtgaagacatttaattcattaaaggggcataacaattttatatatatatatatatatatatatatatatatatatataaaactttgtttacattagagtataattaaataggcctggcaccaatcagggctctgccacttactgtttggagaagcgattcacaattcgcatccttgcacgttcttcctagatgtgccaagaatgcaagaccctgatcacgctttacttgggccatttctcagcgttgtgtttgcagcgagcaatcttgagggatgaggtaatgtctccctatggaacaaagagcaggcttgcttactgctcactataacatggtgggttccccaagctcagcattcctcttctgtaatgcaacccatcttgtgtgtaagcatgcatctgggcccgtgtgcttcgttcctgtgagaactggggtccagggagccaactcaaaaatggtgatactctggctattgcttttgttgtaatagtcttttatctctgactcagaagtctggtgtgttctgtcagcattcatgaaaccgtgaaagctaacgtgttagtttgcaaacataacaaaatatgattcatcacagttctccacgctcactagctgggcgtccctacacgagttttttaacctctcttagctgcagtttcccttctttatattataaaggggacggtggtgtgtatgtacccgccccatagcttcgtcttggggttaagtaagactgtaaaatccctaccacactggactcttcccaggacttccctttccctctttgaactctgccagagactattctgcatttgaggcctggcgatgctgggcaggggcgggtatgggtgaagcacagggtgggccgcggctggcgggtttggtgcagaaacgggctgtggccgagccgagaaagcgcgcccagcggccgccctgcgaatcctccgtaggcggggccgggactgctgtgagctaataggaacgggggccgggcgttcggtctcgccgctgcagtcgcagagcaaccacgcggctttgaccgtctatttcaaagggcttcggggtcttgcggatggggatcactgcgggcactggaaacctgccggcccccacccagccgcctctcagattcgtggcgaccgcacccttctgggcagcggcgccaggcccgctgccgtccccaccgctcgcagccaccaggaaaccccgcggccgcgctcgagcgcgcgccctccgaccacatgcacccgcatacgcatgctcccagcgctcccacgcgtgctgacaccctcccggcttccgcccacgcagtcgcgggccccgggcgcgcgggctcggggcagctgcgcggcgtccttggaggcaggtgctggcggcaagacgagctctcggaggatgctgcggcgcggggcgcgtcgcccccctcagtccaccagagcccggatacctcagaaattcggctctgggtctgtggggagcgaaatgcaacccaaaccccgtttttcgaaccccgcgcaaataaacacgcacaagcacgcacacagacgtcgcgcggcggcgctcgcgcgcaggtccagccgcggctgggtcgggcgcggcggccgggcgcgagggaagagcccaggcccgagaggggtcgccgcttacgtctcgcagcccgaggggaggccgctcggcctcggccgctcacaggcgcgacgtaaaggcccggcgtcaccggcccggcttaacggtgcaacggctggcctgggcctgcaactctggggtcccggccgggctggagcggccgccggagagacctggtaggcggggcgcttggggcaggaagggagccggggagggaaaagcgcgactgtgattcgtacggctgggcccggaccgtgaaggggaccgggttgcggctgccctcacaccgaccaggtgggaccgtcggactgcggccgcccttggctcaactgggtcgccgaccttgttgaggggcgaccactgcggggagaccgagagcctgcggctggcgtttgaggcggatggcagtgccctgagcgcggcggctgggtctcggtgacactgacgacgggaggcgcggtcggaagagcgcggggccgtcgcctctggcttaacatagcagatgcgctgagactccaacaggtggctccgtggcgcaatggatagcgcattggacttctagaggctgaaggcattcaaaggttccgggttcgagtcccggcggagtcgtaacgcttttttccctcccccctacaatttattttctgcctccatcatgtctcttattttttttttttgctaaacggtttaacttctctctcattccctgctctcgcagttcactgcattcggttcttgcggtcctttcttaagcggctcgcagggtcccgagcccctcagctccccgggcctcggtggcccagggcccagctcagccgactgggcagtcgatgtaggtcctgagaagagcggcggcggcggcggcggcggcggcgaaggaaaagcgacactgaagcgaaggctcgcggtttcggcctaaaggaaagtgcaggggaggcccgggtctcgggtgacacccccacgccttgagcgggactgtggttgcgagggagggacgagaaaacacgcctacgccctgcgtgcgctgtgctgactacctctccagcatggaggcttccagatgagcagacacccgaatcccagcgggagcccgtcaaaaatggagatttctgccgtcactctgggactcttaattcggtccgtctggggtggggcccaggaatctgcatttctgataaggtcacccgctcccctcccccattattccagtgcaaagaggtcctaggcccagtgcccatcagctcctcaagacaggaattactatatctttttctgacaactgttaactttgtacaaggttagcaaataaatccaggaatgaatggaatcttaaaactcgtaaaacaacaatgaaaggtaattcacacaaaagatacaaaatccaaaattgtcaaaaaagatacagggaaaagtaaacatccatgttattcctatagtccagccttgcaattctctccacaagccattagtggtaatggtttcttggaaatattttcagatttattttatgcccatatcagcatttttaacatcttttgtcataaatatgtcgtaaataacaatgttattgatacatatccttttaaaaacacaatggtagtatgctatactggcttgttttacttatgaatatatgtagagctgcctcgttccattgtacgtatgtatggtaatgatttaacagtccctaatagctggacatttagattgccagtattttcctattacaaacaatgcatcagtgaacatccttgttcttttattattgtacacaagtacaggtacatctatctgtaggatagattcctagaaagttgaattgctggttcaaaggtttgtgcgttcttaatctgtacattttttaatatatattggcaaattgccccatagagattgtatccatttttctctccttagcaatgtgtgagagtgcctgtttccccacaactcacaaaaggtggtttctagctgtgattttaattcgtctcttatattgattttttaaaatttgtatttatattattattattattatttgagacagggtcttgttctgttgcccagactggagtgcagtggcactatcacagctcattgcaccct

SEQ ID NO: 198 - DNA, 4001 bp, Homo sapiens
ctcttttatttctgaaacgggatattttcaagtttaactcataatggttatctgatgtgagctttaagaacttttcattatattttaaactctggaaatgtaaccgtctcggctgccccatgacagagaatttacaacttggatctgtagttttataacttctctggagagtcagatggagagaggagatgaaacaaccacacatattcaattggcttatccacttaaaatgaagttttgcttgggtttaggaattaagagtatctctttatttttgaagtaaacttatgaagtctagccaaatgattcaagtatgaataattcctccatggattgtatttcaagcaacacagtacaggatttacccgataaggttcttaagattagcatccatttgacaagcagttctgcctatatgaacaggagatttagaccttggttagtcatcctggaaatgccagccttctcagcagcactttagagaaagttggagttggagtggtgtgggatcccctggcttggcaaggtctttacgttatcctcaataccccctggcacgcccgcagacaagcgctttgcctgtgggcttcccattgttacccgggtagccccttcccacttggacctgtgttgagctgggccccacccccagcactgaggcctctcccagcctccaggatctcaactcagtcccaggcaacacaagggaggctatcagctcccaaaatgaccttccctcggccagcgtactttccttggggaggtctgtgtagccttgggagataaagtcaaggtttaaaacaatctgaatgcacggctctactttccatctcagctaacagctttaagcgaaaacagatatgaggttaggaaaatggtttttctcctttgcaccttgcttcaagcgagttaaccccaaccatgacccgacccgccgccccacggaacacgccgccttgccagatgcttcggagtccgctcaacctcctcctcgacgagtgtctacacctgattacaccgttttaaagcggcggcgccctcagcggcctaagtgggtaaggacagttgggctgtacgatctatcggaacctccttcccaccgtccctcccttcctttgccttccctcgcctctccccaccgcgacgcagagggagcaacacaaccaactattcattctttctcaacaaagggagagagggagggagatgttgtcaacagttacagggcaggctccttcgctttctttgcaaacttcccaagagattaccggagaaactcgcctcctcggagccttgggcttccaccagagcgctctgggccctcgcatctgcccgaccccggccggcttctgcgaagaggggacgggcgggacagggcggggtggccggcagagcagctccgacgggcagggggtcgggcgaggccagcgcccgggaagatgccgctcgagtgccaccgagcaagatgcctggccgccaatcgctgagcgctccccgccgtgggccacgtctcggggagtcccagcgcgctcggagggcctggagagcgcaagccccagccccacttcagtcacccccgcccccaacgccaaatccgctggcgggggtgggtagggaccaacaaacgccggctctactttccccagagcctaactttgtccaacaaacttcctagcgtgtcctcaccggggtgggggaggcccaggcgccccgggaggaacagcaccccgaggacgctgggcgcgcggcggagactcacctcccggcgcggcgctgggcgctcgggctctcaggatctctggacctccggctggggctcaaaggcgccgcgcggccggcctcgcaccgcccgcgccgcggctgctcccggagctggggacgctcatggtccgcggggcgtgcccgccgagaatcccgcgcgcgtctagccggtgcgccccgcagctccggctccggtcccggccccgtcccccgcccggccagcagcaggcgcagctctgagccggcggcgcgcactccggccctcaactggtgatttgcggctccgcggccccaccccggcgagccgattcgcgctgccttgcggaaccccccgagacatttacattcggtgacctagccaggccctcctctgcccggattttagagtttggctctcttcgtatctccccaaggagccagtcctcaagtatagctcgatcacttcctttctgaagctctctccagagacagcctcgtcgaatccactccttccccttccccgcgttatttaattacccaacagatctgctttgctcgtctgcagacacctggctggctttcaatgtgaagggctttgatgagacaaagccccaggtaaccacaaatgaaccatccacgggaacaggcaaatcaattgcactcgtatggacgtattgaaagcaaagtgcgagttggcggtggcacttcagcactagatgatttggtggggtgaaaaattggagcccactggaaaagacttaacactatcttatatcaagatccattataaagtcatagaaatagtagaaggatagacaaactgaccaatggaataaagtccaaaaacagatttacaatatgtggtcacttgatttatgtcaggtgctgctgtgctgtattgggggtcagattagctctctctttccagtaaatgatgctggatcaactgaatccccccatccccagtcaattccagatggaatttttcttttcgagacagagtttcggtcttgttgcccaagctgttgtgcaacggcatgatcttggctcactgcaacctccgcctcccgggttcaagcaattatcttgcctcagcttcccaagtagctgggattacaggcgcacgccactatgcccggctaatttttgtatttttagtagagacgggttcaccattttggtcaggctggtctcgaactcctgacctcaggtgatccacccacctcggcctcccaaagtgctgggattacaggtgtgagccaccgcgcccggcctccagatggattttaaaggtaaaaagtaaaccaataacacgatccaaagaaaatgtccaaaaaaatcttcattaccttggggtagacaaagacgatgtcttaaacacatgtagtactaatataaagaaaaaaaactcatcattggacaagattaaaattaagagcttctgttcatgaaaagacaccacgagtgaaaaggcaaaccgcagagtgagaaaacataattgcaacacatacatccaaaaaaggtttgtttacagatatataaagaacacctacggatcagccagaataaggcagaaaatccaattaaaaacaggcagaatatttcaactgtcctcaagagaggacaaacaggcatttctcaaaaaagccaataaacatatggaaaatatctcaatttattaaccatcccaaaaatgcaaattgatatttcaatgtgatctaacttcataccacccagaatgactaaaattaaagggcctgaccatactgctcgtcaaaatgaactttttacaaccactttaaaaacctgcttggcattatctagaaaagctaaattaacatgtatcctatgacccagcaattccacccctaagtgtgcacccaacagagatgtatacacatattcaccaaaagatgttgaaaaatgtttataatgtatctctttatgacggccaaaaagaaaacaacccaaatgtccatcagcagaagagagataaactgtgtaacatacaacatagtaataagaatgcatgaactcatttacactcaacaagatgagtgaatcttacaaataggatattgagtgaaagaagctggccgcaaatgggtacatactatatgattccatttacataaacttcaaaaatagtcaaagcatatctgtgatgttaaaagtgaagacagtggttatattgagctgtggattatgacagaaagggatcccagaggtgacttctgcatgctgataatattctatttatt

SEQ ID NO: 199 - DNA, 4001 bp, Homo sapiens
gctaagcaaaacaaaacagggagactcatcttgagggtgcagttggtaaaccctaagttgggaccgagggctacagtttccagtgagtgagcagctcaggccttctctctgtgctatgaagacttcgacaaactgggaatagagtagaagtccaggcggaaagaagggtgtttctaccacagtcaaccaccaagagtggccacggtggagagatagagagtgcacaagctgaaggacagctggacccgactaccccatatattaagtggccttttctatatattatgtagccttggggccgtaactgcagaccaacaggtacccaaacagaaactcatccctcagacccagatatttataggctgactccctcatacacccaatgctgagttgcacttcactgaattagcagaagttggcttgtggaaggacttctattagagtgaaacccactgccaatccccgaagtgcaccataccctttgggacctcctagtctatcttggaagctttaaaatactgttaatggcatgacttcatctgccccacacttgaacgatccatatttaggccagaaaccacatggatctcgcatcacttcactgggctccaggacagaaaggggctcaagtcaggaagggaatgcttctaaccaatgattaattactcatcctctgtcaaatttcttgacaaagggacaaaaatgaacactcctaccagggagcaaaatcaatggaaactcacccttttcccactctgtatatttttaaacaaaaaggttttctcccactaacaggtagttttcctgatttttttaaaagcgtattgagaagaaagaagcagaacatcataaccctgctgcagccttttcaaaggtaatgaatgagccagtcccacaggagagggagctctgcttcagggtgggaaggattccttgagagctttcagagtccaatttcccaggaataaacgaggtccgcagtcaggctggggccgacaggctttttccaaggcagacaaaccccaagatccacgaaagcctatattaatcttaattcctagtgcgtcacaggcaggcaaatagaacacaggcctcatcttgaattagccaaaggaggttctctgaatattttcatcaaaatagtgtattgacatattatacaaagctcttggcaccggtgtcttataacaaatgttaaaatgtgagcagtaaagacaacaacagttctgaaccctgagatgttttgaaacctggctgcaatttgaaaggaaatattgtgtggcttctgtacattatgtacattattgataagtaatggaccagcaggataaacagagaaaagggctcagctaccttgtgttcgttagaaatgaaggaagagagacaaagagagaaagaagaaaaatagctctgtcctattgagctactttagtataaaatttcagcctacagagaactgaaagtgtcctgaaaaacagcttcagcccaaaacagacaaggagccctgttctgtgccactgggttctgcttccaggggaggtacaccactaggggctcttgaagacccatcagtcaaagaaagcacctctgttttcacaatcagcaagctgcaaacttttatctattgccctttaggaaactcatgctttcagggtcccccaaaagattgacagatgtactttatttccaaaccaaacctaccttgactccaatgaaagacttgcggtgatagaagcagcacagagctgctgagagggcgtggaaagcactgcattccttaggcatctttcggtcttcagtcccggggaccacacactttctttagggttaaaagaaagggggcttcggacgttaaagccctagcccaccacagcagctgtgctgtttctgcccagaagtcagggaagtcggcagccgggggagtgagtcggctccttctcccaggctagtctgggacttttcccctctgctgaagccaatacgatccactcgctcaattctcgcaggctggtgtccagcctgccatgcacacagtgccagaaattctcatgtgaccagacttgctttctgatgaaattctaacccctcttagaagaggccttgggctttagctgtcccctcaatttagagaccaggcagaaatcattagcagcccctctcccccgacccagaatttccttctggggctgaactgtaccatgcgacctgctcctagtggttctgtctgcttgtcactccagcacccagaggtttaaggaagcagggtaagttgtacattcacaccaccttgttatgaacagaggctcctttgaggaaaggaggtggcctaaaagtgactttccctaggagaaatactagatgtactaagtaacccaggcaggatccctgtcctcactctcccaagcccacctccagagctgtttatttttaattaagatgctcctggcagccagtttgcagctgataacgttggcacagccatcactactggcaaagcaatattgccttttggtgtttaattagcaagtctgtcagcaaacaccctgagcgccctatgccctcccacctggctgtgcaacctgttgggaggatggggactgtgtacccacttctgactcaactgtttgtcctataccttcctttaaatccttcactttaattactcatcgccactctgattacccactttgcgtaacctagatcctgcacacaaacctcgcatccaacgcagccaagcaaggccctcctggattccctgcgacctgaggcctctacccctaccaagagccacataacacctttagggaaaactaactgcttttcccttcattccagttatagcggatgctcaacgagttctttttttttttttttttttttaatcaaatccagatttctgcctgtagctcttcctctcctatcctaccgctccaaatattaactttttgtggcttcggcctcaaatatggaatgtgtcctgaagctttctaaaacttcacacaggcagaaacttgtaatgaggaagaaacaagatctattcagtccagaaaggaacaataccagatgaggcatgagggaggtatgagaaatatccaacgggattagcgtcaaatcctcgggagaccttggcctttggactaggtcaagtctgcccacaaaaataggaaattgctctgggcccagtgagcaggtatggagagccacagtctcacacccacgcaagggcaagggcccggcctcatcaacgtgtcaacatggggatggagctgctaagtgaggcgctattgccacagcgagtgtgggcgatgacttcctttctgctttcctccctcactcattctcctctctgactctggaggtctggtctgcagtcttgacggctcccaggccacagaaagtccaccagagaacctagaaggaagcaccaaggtggcagaactcagaagggttttctgagctggaagagcccttgaagactgtctggtcagtgggtccccactgtcctcgaaggtccagtaccgcacctgtgaggaagcgttttctggcttgccctcatttccgttagatggagttcaaagggtaagtccgtgtgagcagccaggcccaggccccagcagttctgtgagcatgactcatcaatcaggccattagccaccacagaatgggccattttcacctggtattctccttggagagcaaataacgattccttcaagctaaaaacctccccaagaggctagacaggcaccatcccaggcctgagaaaagggaggggggcagtgactgaaatcctgcacagaaattcgtgagattagtcagccaagagactccgaagcccagacacccttcccccagaaatcgtgaatgaaatgcattcctgaaagtaatatgcaaataactcagacatgtaaatcacatagaattacgaataaagtgctccacagccagggtaaaaacaaaaccaaagacacttaggtcactgtggtatcacagctcttgtt

SEQ ID NO: 200 - DNA, 4001 bp, Homo sapiens
tggggagggaaacgttttaacctagaacaatagatgcaaagacaccaagccaagtaggacatggacacggacacagacacagacacacgtacaggcaaaccaagtgagcctacatgcagtctttagaaaaaagcccaggtgagactctggccatctgacttctctctactgtgcaggaaaacaaacacaatgtcctgactcagtctaatgccagattttgaaatattatacaaaagtcaaagactctgcatcttgatatgaaaatctgagactcatgtgaacatcaggaacaagagcgaggctgacaaactttaccacatgtgctgccttcctgggcctggtcagtcgctgggctttgaaatgtttgtgaactgaggcccaactcacttgctttacaatgatgtctcaaagaaactgatgatcttgcaagctgaggcagagataagcagcccacttgtttggattttactcttttatttctgaaacgggatattttcaagtttaactcataatggttatctgatgtgagctttaagaacttttcattatattttaaactctggaaatgtaaccgtctcggctgccccatgacagagaatttacaacttggatctgtagttttataacttctctggagagtcagatggagagaggagatgaaacaaccacacatattcaattggcttatccacttaaaatgaagttttgcttgggtttaggaattaagagtatctctttatttttgaagtaaacttatgaagtctagccaaatgattcaagtatgaataattcctccatggattgtatttcaagcaacacagtacaggatttacccgataaggttcttaagattagcatccatttgacaagcagttctgcctatatgaacaggagatttagaccttggttagtcatcctggaaatgccagccttctcagcagcactttagagaaagttggagttggagtggtgtgggatcccctggcttggcaaggtctttacgttatcctcaataccccctggcacgcccgcagacaagcgctttgcctgtgggcttcccattgttacccgggtagccccttcccacttggacctgtgttgagctgggccccacccccagcactgaggcctctcccagcctccaggatctcaactcagtcccaggcaacacaagggaggctatcagctcccaaaatgaccttccctcggccagcgtactttccttggggaggtctgtgtagccttgggagataaagtcaaggtttaaaacaatctgaatgcacggctctactttccatctcagctaacagctttaagcgaaaacagatatgaggttaggaaaatggtttttctcctttgcaccttgcttcaagcgagttaaccccaaccatgacccgacccgccgccccacggaacacgccgccttgccagatgcttcggagtccgctcaacctcctcctcgacgagtgtctacacctgattacaccgttttaaagcggcggcgccctcagcggcctaagtgggtaaggacagttgggctgtacgatctatcggaacctccttcccaccgtccctcccttcctttgccttccctcgcctctccccaccgcgacgcagagggagcaacacaaccaactattcattctttctcaacaaagggagagagggagggagatgttgtcaacagttacagggcaggctccttcgctttctttgcaaacttcccaagagattaccggagaaactcgcctcctcggagccttgggcttccaccagagcgctctgggccctcgcatctgcccgaccccggccggcttctgcgaagaggggacgggcgggacagggcggggtggccggcagagcagctccgacgggcagggggtcgggcgaggccagcgcccgggaagatgccgctcgagtgccaccgagcaagatgcctggccgccaatcgctgagcgctccccgccgtgggccacgtctcggggagtcccagcgcgctcggagggcctggagagcgcaagccccagccccacttcagtcacccccgcccccaacgccaaatccgctggcgggggtgggtagggaccaacaaacgccggctctactttccccagagcctaactttgtccaacaaacttcctagcgtgtcctcaccggggtgggggaggcccaggcgccccgggaggaacagcaccccgaggacgctgggcgcgcggcggagactcacctcccggcgcggcgctgggcgctcgggctctcaggatctctggacctccggctggggctcaaaggcgccgcgcggccggcctcgcaccgcccgcgccgcggctgctcccggagctggggacgctcatggtccgcggggcgtgcccgccgagaatcccgcgcgcgtctagccggtgcgccccgcagctccggctccggtcccggccccgtcccccgcccggccagcagcaggcgcagctctgagccggcggcgcgcactccggccctcaactggtgatttgcggctccgcggccccaccccggcgagccgattcgcgctgccttgcggaaccccccgagacatttacattcggtgacctagccaggccctcctctgcccggattttagagtttggctctcttcgtatctccccaaggagccagtcctcaagtatagctcgatcacttcctttctgaagctctctccagagacagcctcgtcgaatccactccttccccttccccgcgttatttaattacccaacagatctgctttgctcgtctgcagacacctggctggctttcaatgtgaagggctttgatgagacaaagccccaggtaaccacaaatgaaccatccacgggaacaggcaaatcaattgcactcgtatggacgtattgaaagcaaagtgcgagttggcggtggcacttcagcactagatgatttggtggggtgaaaaattggagcccactggaaaagacttaacactatcttatatcaagatccattataaagtcatagaaatagtagaaggatagacaaactgaccaatggaataaagtccaaaaacagatttacaatatgtggtcacttgatttatgtcaggtgctgctgtgctgtattgggggtcagattagctctctctttccagtaaatgatgctggatcaactgaatccccccatccccagtcaattccagatggaatttttcttttcgagacagagtttcggtcttgttgcccaagctgttgtgcaacggcatgatcttggctcactgcaacctccgcctcccgggttcaagcaattatcttgcctcagcttcccaagtagctgggattacaggcgcacgccactatgcccggctaatttttgtatttttagtagagacgggttcaccattttggtcaggctggtctcgaactcctgacctcaggtgatccacccacctcggcctcccaaagtgctgggattacaggtgtgagccaccgcgcccggcctccagatggattttaaaggtaaaaagtaaaccaataacacgatccaaagaaaatgtccaaaaaaatcttcattaccttggggtagacaaagacgatgtcttaaacacatgtagtactaatataaagaaaaaaaactcatcattggacaagattaaaattaagagcttctgttcatgaaaagacaccacgagtgaaaaggcaaaccgcagagtgagaaaacataattgcaacacatacatccaaaaaaggtttgtttacagatatataaagaacacctacggatcagccagaataaggcagaaaatccaattaaaaacaggcagaatatttcaactgtcctcaagagaggacaaacaggcatttctcaaaaaagccaataaacatatggaaaatatctcaatttattaaccatcccaaaaatgcaaattgatatttcaatgtgatctaacttcataccacccagaatgactaaaattaaagggcctgaccatactgctcgtcaaaatgaactttttacaa

SEQ ID NO: 201 - DNA, 4001 bp, Homo sapiens
cacttgaggccaggagttcaagaccagcctggccaacatggtaaaatcccgtctctactgaaaatacaaaaattacccaggcatggtggcaggcacctgcaatcccagctactcgggaggctgaggcaggagaatcacttgagcccggaaggtggaggttgcagtgagcagagatggcaccactgcactccagcctgggtgacgtaatgagactccgtctcaaacaaaaacaacaacaaacttaactaacaattttttcatgttactttaatgtaaataatatctttttttttttttttccctttgagacagggtctcactctattgccaggctggagtgcaatggcattatcatggctcactgtagcagtcttgaactcccaggctcaagtgatcctcccaccttggcctcctgagtagctggggctacaggtgcatgccatcatgcctggctaactttttaatttttcttttgtagagaaagggtctcactatgttgcccaggctggtctcaagtgatcctcacacctcagcctcctaaagtgctgggattacaggtgtgagccaccacacccagctaaatactgccttttaataatacaatcctttcataaataaacgattaggtataatgggaaaaaatcctccaagctgtacatactgaaatacttgaatccaataatttagaaatgatatcttacatttcatttagctaactagaccctaactagaatcctgggtgtacttcaaggttatacatttaaaatagtatcatactcaatgtgtggagtagaacagcatctgactccttaggcaatcatggacactcccttctctaatcctcttgtccttatacataccctccgctataggtcctttacatattattacacatttatacatactattgtaaactttttgttttatatatctagctcctcactgtattgtatttttctgtattcagaaaccctatcttttttggagaggatgtttgtcttaaataaagaaaagaaaaattaaaagaaaacaaaatatattaaaaaagaaaccccatatatctctatgatctcagaatctagaatggcacctagcacttgtaaagtattcatatcagtgaaaattattgcctacattaatcagaaatgtgttaataaaaacatcggatagattacagaaaaaaggagaaggctgagaaaaaagtagtatacacttggatatggtttgtcctttcagtcgtatcacatacatttggtaaataactagactttaatatgccactctccagtggttctaaagagcttaggtaattaggcttatacatattaaaaaaccctagatcacttgctgtagagtgaatcttggcaggagagggtccctttgagaatttacgcatggatcctatctcaaagaatggtagccacaaatttttgcattaagtgagttgtggagccccagaaagtcttcctatggatcttagaataagaacctcggagaagacttatctatctagttgttttcaatagactgacacctatacagtaggtaagtagtagctatgcaggcaatggttaaaactggaatttaaagctctcaatccaaaataaaggttcacaggaattctcgttcacacctaggctcaagacatacttacttcaaaggcagaataatccggggctgtcaggtagctcaggtagttcttagtaggtcggtatctgcgagtttcctcctccaccagcgctgcagcctaagaaagagaatagggaccagggtagaagtggcaaattgtaacatgtttctttcagtaccgagccagctagcagtgagtcagctacaaagacaccccgcactcaccgcttcccgcacaccaggggcttcataaccttgatcaaaatacggcagcgcatccaccacaacctctccagccaccaaacctgtgcccgccattctgaggacctcaggtttgcctgcgttttctgcgtctgcgtaaactcagttatatttaattacgccggcgcctgacactgatgtaatcacgttccctccgtattgacgttagtgcatgctcagttgctaattttgaaggcgggtccgcccggtatctagaaattgccgggctggtttgttttgggcggacgtgacgtaacgtcttggcttgtctgcgtcagcgaaaggcctcaatttcctgtcctctgcttactgcccctttttttgcctgcgaatggcggcgatttgaagttggggcttttcgtttcctccaaaacattgatatctggaaagggagccccttaacacttttggagggaactggctgcagcatttggcggggagagataaactggtttcccacctctgcttactcccaccttctccccttaatcttctcttcctctgtgcgagacttttttccttttttattgtagacacagggtctttgttctgctgcccaggttggagtgcagtggcgtgatcatagctcactgcagcctcaaccccccgggcccaagcgatccttccacctcagcctcccgagtagctgggcctagaggtgcacaccaccatgcctggctaatttttaattttttttgtagagatggagcctttctatgttgccaagcctagcctcgaactcctggcctcccaaaatgtggggaatacaggcgtgagccactgcaccccgggtcattcctcttttacttccttgctgtaccccaactatccttccccctcggtgcccttaaaacctttgcattgggtaagtacattttttaaagagactctagaattgggcgccagtctccaattaaaattgtgaagctttatggtctgcgtatcaaaaggaacctcagttccttaaaaatcctgtcattttgcctttaggacttaacggtaatagaatggcattcctcactgcctccgaaccactcaagctgctgcccatgcactctcttctgcatggctcctggactaagcagcctccctttgattaagcaggtaaaaaccaaataaagttgtcagactatatgccctgcccagtgtgcagtctagacccagcctttgtctgccaagagcctggaaatgttgacctccgttattaagcctggtcagtctaagactaattcttattaccgaagtaccattaggtaaatgtgctagctatagatttaagtgacataaaagatcttaaagaattctccaagggatctgtggggggtttatgtatttattcattaaaagatctgtaaacaacattttatacaaatcttgattcttttacaaaaatatccagaattcctaacactttacagaaaacacaacagacctaaggaaatgaagcagcttcaggctgcgaggatgaagacaccattgctgaagcaaaggtctcctcctagagggatagccaggatccatcacagtaaacccttttacccccattttataaacatccaattattaactgttcctgctgggttggagtgtaagaagagaccaaatggagagatgtctagtagaagccccactgggggtaacctgcttaacattaaaaaaaagacaggctcagttctattccctggacccacatctgtaggaattatattatacagcaccagtcttaaatggtgttctgcttcagattcatgcatacctgaatgggttgtaatgacaatactgtacaagtcaataaactgtatcacaatacaacttacacagttttgtaaggttgaataaatactttctgtgccagttaaaaccatcagcagaaactgaagaaaacaaactgacatttgctataacattaatcaatgaaaagtgcaccatctgaacttgaatttgcccatgagtttgaaaacacacacacacacacacacacacacacacaggccgggtgcagtgactcatgcctgtaatcccagcactttgggaggccaaggtgggtggatcacctgaggtcaggagttcgagaccagcctggccaacatggtgaaacccccgtctccact

SEQ ID NO: 202 - DNA, 4001 bp, Homo sapiens
acagataacatcaatgaattgacagagaagaacaaagacctggaagccactcttcacatctgtacttgtatacagatcttatttccttccacttgtaatttctcagttcctgttttattagctgtaaaatgggaatggcaattatcttctttagaggttgttgcgaaggttaagtgggaacattgtaaactgtgtgacacagcatctggaacataggaggcctagctcttggaagttcaaggttttactggcactcaccatgaataagacaacatttattctacagtagttatttatgttccattcttatctcaactagaatgtaaagcaggaaactgatcttcatttttttgtatccttccagacccaaggccagtgctttccatatagcaagtgctccataaatctctgttgaatgaggaaactaagcacaactcccagtcatatccagtttccttctgctggtgagtcacaccaattgtgagtacagtgtaataaaccttacagggaagaggaagggatttgaagtggatgaacatttaaaaagttgccatcctgtccagttcatcaaaatgactttgtaaaagtactgcagtgttcaataagaacacgtttcatgttgagtttctgtttttcatttgacttcagataaagtattttagtgatactcatataggtctcatctgacaaaacaagtaaacgcaaaggaaaaagaatgtcatatctcaacaaagccattcgttacgaataaatatgaaggtttatgtggttctgcaccatccgagaagagcataatttagctactgaatattttcgacgtttacctgtacattaattctcagctacgtgtattcactcccccaaccccaatttaaatatgtgggcgtctgcttactaggggaattccaggttgtgctttcagctgttgagcttcctcaagcccccttatgcaaaagagcttcacatttttggtccactgcttgggatccttcacctggtacagccttcgctctaggctgagtgagcagcctaggcagcctgacttaaggatgaatctgagccgccagtccctaacgaagcatctccaagaacccagttggggggaaagcatgaggagatgggtgaggagtgggcaagaatcaaaacaccacttggcaacaaagcccaagctctgcgtttagcgatgtaaaacctggattgacagatcactggaggatcactgccaccaaggtccctcggatgcagggctcgccacagtcctcctgtgctaggactttccgctcctccgacctggaggatcctccttgtcctcggactccaggcttccgctttcgtctcccgctgggctgcagcccgcccccgcccgccctgggcacagctgcgttactcacgtccttcttcacttcagtgaggtcctcctcggtgagggacggtgcggtgggctccatggtggaggcgggagatggcgcttcttccgggtccgggagctcgggctgcgccgccccgccctggctgggggcttcggcctccgggtaatggggaagaaggagaggaggcggagcgggtcgggagaaagacggccgccccttcgggaacagagggactcgggggtcaaaccgtagcgcttccggccccgcctctgaggtcgacggcgacgcgaatctacgcgacgcgacgcggagctcggagcagcgttccttccctctcgtagaggctcaggcgcaggcaccgccccacggcgaggcgcgtcgcttagcagagcccgccctgtctctgcggcagcctatcgacgccagcccgcgggccgatcctgttcccgcccccgaccggagcctttcgggtggctccgcccacagcgggcgtttcctcaagccacgcctgcgcaggtcgtcggtaagtggcccgggttagcttcctcataaggcatcgtttccgtgggtggggtccgtcagtgcccaggcagctggcactctcagcctttgctgcctgctcacttcgggggagtccggtctgggcttgtcagtaccttgggttcctccccttttcccagaccctgccctacaatttcctgttgttacgtttgccagttactgttttggtcacacacaaacgcactcatacacacatacacatgcatacacacaaacagcctaactacaatactaaacaaatttttgaaagaaaaaaagaaaccacctacaatcccaccactttaacacctcatttaacgtttgcatactttttggtcactgttcattataaacatagcttttcctcattagttaatctgtgtaatggagatagatatgcttaccttttagggctgccgggatcatatgtaaagttcttaaaggtagttgggcacacagtatgcactcaactgattatttatttatttattgagacaggatctcactctgtcgcccaggctggagtgcagtggtgcgattctcggctcactgcagcttccacctccagggctcaggcgatccttccacctcagccaccaagcagctgggagtccagctagtttttttgtattttttatagagatggagtttcgccatgttgcccaggctggtctcaaactcctgggctcaagccatccacccgcctcggcttcccaaagtgcagggactacaggcatgagccacccagctcatcctactcaaacatttattgagtccttactaatatgttctaggcaacttatactatgagtcctccattttatagggggagactgatgaagagacgactatccccagaccgtattttaactactatggcgctgtgtaagaagcaacctgagaagtgtggatgaaaagctacaggtagagccctgggcccaagacggtggcttggacaacatgctaaataaactataaactagatggtatttgaagctacgagagtagataaaaatgacaggaggaccaaggagaaacttgggaacgccaatgtttaagaaacgggaaagcaaaaaaaaaaaaaaacacacacaaaaaaacaatgtaaccagagccacaaaaaccagaatcacagcaagggattctgatgtttacattatgtcctgtttccatgttgacacattacacaaggacagtttttttctaattgcttaatttttcatcatcttccatccgatttactgaaccatccttaactttaggatgaatcctttcatttaacaaatgtgttttgaatgtccactatgtgccagacactgttctaggtgctaggaaaacagctgtgaacaaaaccaataaaaatctctttcctcatggaatttatattctagtttatttgtgtttggggcagacgaggtaggcacttgaaaaattttatctaagtttatttatttatttatttggagacagaatctcgctctgtcacgcaggctggagtgcagtggcacgatctctgctcactgcaacctcctcctcccaggttcaagtgattctcctgcctcagcctccccagtagctgggattacaggcgcatgccaccacacccggctatatctaagttattttaaaaaaataattaattaatttatttttttgagacggagtctcactctgtttcccaggctggagtgcaatggcaccatctcagcttactgcaacttctgcctcccgggttcgagcgattctcctgcttcagcctcctgagtagctgggactacaggcacacaccaccacgcccagctaatttttgtacttttagtagagacaaggtttcaccacattggccaggttggtttcgaactcctgacctcaggtgatctgcccacctcaacctcccaaagtgctgggattacaggcatgatcccccacgcctggctatatctaagttatttaatttattagaagatgataaatactaagaggaaaaaataaaacagggaagtaggatgaggctgtatggattggtaaaatttaagctagggtggtcatgacctccctgctcactttggaggagtctgtccttgtcttgtc

SEQ ID NO: 203 - DNA, 4001 bp, Homo sapiens
agtagctgggattacaggcatgggccatcacacccagctaagttttgtatttttggtagagacagggattctccatgttggccaggctggtgttgaactcctcacatcaagtgatccgcccggctaatttttgtatttttaggtagagacggggtttcaccattttggccatgctggtctggaactcctgacctcaggtgatccgcccagatgggccaggcgcggtggctcacccctgtagtcccaggtacttgggaggctgaggcaggagaattgcttgaacccggtgggtggaggttgcagtgagccgagatcgcgccactgcactccagcctgggtgtgacagagtgagactccatctcaaaaaaaaaaagcataggctgggtgtggtagctcacgcctataatcccagcactttgggaggccgaggtgagtggatcacctgagcttaggcattcaagaccagcccgggcaacatggcaaaaacccatctttactaaaaataaaaaaataaaaaaaatagatgggcatggtagcacttgcctgaagtcccagctactcaggaggctgcagtgggaggatcgcttgagcccaggaggtggaggctgcagtgagctgagatcacaccactgcacttgagcctgggtgacacagtaagaccctgtctgaaaaaaaaaaaaaaaaaaaagatactatactttgccaagaataaagtgttataaatgtgctctgtgcacactaagcacaacagctgtgatgaagaccaagtagagacaaactgaaggttcatcagcctatgcccaaaattttccatctctgtaccacttaggttttagcaattggagaattcttgctatacttccttgaaatataagcacccaaatattttcatagaacattcctagtcactgtagtatgggagtagtaagaaaaggaagtttgaaatagaaaaaaaagcagcaaacaatagcatgaagtagaaacttgacctgtcccttaatggtttctgcaatgacgtttttggcagaagcttccaattctccgttgaactggtcacccaacatccgaaggcgaccagcaatgatagccacatcaaaagaacaaggctctcctatgacagagggaacacatttgttacaatgcttgaagcaatggcaagtcccaggaatctgggcaatgagaaaaatttgtcttgtcttttaaataattttcatatcatgatctcccaagagcttaaatgttctgtcaacaccaatagtcagaaagtttcccttcattgagaacctctttcgctttaggtgttactgaaagcttagagtttgccttttgaaacttaaaggaaataaataaaatatactgtttttttttttttgagaccgagtctctgtcgcccagactggagtgcagtggcgtgatctcagctcactgcaacctccgcctcccaggttcaagcaattctcatgcctcagtctcccatgtagctgggactgcaggcatgagccaccacacctggctaatttttctacttttagtagagatggggtttcaccacgttggccaggcggatctcaaacccctgacttcaggtgatccacccaccttggcctcccaaagtgctgggattacgggaatcagtcactgcgcccggctgaaaacatactcttattgacctgcaatcaccgcctagggcaggaaccttacctgaatctacttcatctacacagcataggttccggctggcaacctgcaatgttgggctcaagaagtccatgagtagagtgttcacaatgcattccgtttgttcctcaaaagtttgggagctcttcattttagatgtttgctgtcaagttttgcttttccacgaaacaagcagttttcagcccagcaggaagttaaaaacactggtaaatcaacaaatgtttctacctcttgtagtttcctgacatgtaatcctggaacttttcccactagctttcttcaaacacagctgctcagaaaggtgggacttctcagaaggattacctacttggaactggggagactttaaagactttaggttctctatctcagaccacaccctaaccacataaaattaatgcttaacttttatcgttaggtagccaacctagaactgaaatagagttcaggaagagcctctggagtaattttattaagaaatacttcctcgacttcttaggtcctgcacatggtataatttgaaggaaggttttgaagttacagtggaccagcgttcaacttctgtttatggaatttatttgccataatcatataataattacttactgaacaaggaactatagttggcactacaagtaacatagaaaaatgatacaggcacagttactgtgctcatgaagcttacacttcagcagaaatgacagatattaaatgagtaatcgcattgttatttgtgctattgagatcagtgcactttgatcagtgaagtgtaacagggaatcaagcctttgatcagtttaatagggaaacaaacctaggggactgggaaggcttccttaaaatagtaccatctgacatgagctctgaggaataagtaggcattcattatgcaaaaaggaggcataacactattctaggcggagaggtagcagatataaagtctgggaaggttaaaaaaaaacaacttggaattataaatggggacaacagaaaatatttcatagataaattatgaggattaaataagataacatgcggaatggcctagcactgtttggcatacaataaatgttaaatgtcctccttttagcccaagacataatgaccaggaggaaagagatctgagattctctgtctagcaaaaggattttcctaacagggttggactccatcattgttttaagagatctcatgattggacacttatctgtagtggttgccttcttaacgtagctaaacctagattttgggtctgggtctcagaagcagccatcaaacctatcagcaaacttaccactcaacctgtctgacctggtgaagttattaatattaacagctccaactaataaaagagtcaagcataggccgggcatggtggctcatacctgtaatcccagcacttttgggaggctgaggcgggcagataaccggaggtcaggagttcacgaccagcctggccaacatggcaaaacccatctctactaaaaaatacaaaaatgaactgggcgtggtggtgcatgcctgtaatcccagctactaaggaggctgaggcatgagaatcgcttgaacctgggaggcggaggttgcgatgagtcgatattacgccactgcactccagcctgggtgacagagcaagactctgtctccaaaaaaaaaaaaaacaaaaaaagattcaagcataaacagtaagtcagttgttcagaatggaatttctatcttgcaaaatatcaaagccaatcttgtgttttctgttccattctaaaacacatacaaccactgcacacctattaaaatggccaaaatccagaacactggcaaaaccaaatgctggtgaggatgtgggtcaggaactgtcattcattgctggtaggaatgcaaaatggtacagccactttggaagagtttagcagtttctcacaaaactaaacatcctcttaccatatgatttagcaattatactccttggtatctacccaaaggagctgaaaacttatctacacaaaaacttgcacatggttgtttatagcagctttattcataactgcccaaacttggaagcaaccaatatgtccttcagtaggtaaatgaataaataaactgtgatacatacagacaatagacattatttagtgctaaaaagaaatgagctggctgggcgcggtggctcacgcctgtaattccagctactcaggaggctgaggcaggagaattgcttgaacctgggaggcggagtttgcagtgagctgagagggcaccatggcactccaacctgggtgacagagcaagactgtgtctcaaaaaaa

SEQ ID NO: 204 - DNA, 4001 bp, Homo sapiens
agatccaggccaactaatggctttccttcagcttttcccatactcagaagtcaggtttccaggcctctgtgaaaagcacataaatattctcagccagggctggccctttgcttcaatctccagctatcacagggagtcagtctgataaacatttgcagttagaatggaaggaggcacagcctcctagacttttacagatttttttggacaagtagcagagtcacagaaaacctagaattaggtaagaaagcagaactcctccagagaattcagagagagctacaactgagagcctttaaacaatcaatgtgtaggaacagaagaaaggaaatccacaattcaagaaaataagcagacattttttttcctcaaaaaaaattgttaagatgaatgttaggcactgattttagccctctgttccatccctcaagatgtcacttgaaaaagcaaaaggttttatccacaaaaccaccggcgagtaaacagccttcacattcttagcctcgtacacacacagtaagatatttactctctgataaacagcaattgtaaataaatctcatttaatctctaaaagccacaataaaaatctttaacctccaaggtagagtttacagatgcgtctgcatgccctgccagccccagaaaacacaaggtcttgaataaactactataccaggaggcacattttctcgctcaagcatcttacattgaccttctttaaaacaaaaatacgtacaaggaggaggaaaggggaaaacccaacccctcccaccccattctctgtacaaatcggccaataaatctaacgaaaagacacaagagaaaaaggacagaagccaacaggtggaacaaggctttttgtttccttagaaatgctcagacacttgatctgtgctcctcagtctatttgtctcagggtgtctttaatgatgtttttattaccctgatgatgatgatcaagaataatgataacacttctactctgtgattccacagcatctctagctgacgatttctccacgcgtttcagacacagtgatctgttctgtttcgctcaatcccagggaggcatacagcatccctgatcagcaaccttgattttacagatggggaaattgaggcacggggcaccccacaactcaacagtctctacgaccagaggaatccctgagactggaaaagtttctggatcgtcttgtggcagagttctcttgctctcccttcttgcctgccatgccgctcctcctcggagagtctgggctggggtggtaaggatcggggtgcctccccttcacagcgaggcacgccagggcagtgtgtgggaagtccacacgcacacacagacccacgggcacactggcacacacaaagctcgatgcaatctctgcagtcactcggcggagccctggccggcccttgctcagcctgagaatgcacagctcggagcctgcaaggcctccctgggctctgggctggggtttccctgaaccaaggctctgcccttctctccctcttttccaggcttccctctctcgcgctccctctctctctctcttttccctcccaccctcacaccctcctcccagccctctccatccaccccttctcccccaccaacccagaggcacagatcgtgttactggggttccctcgaaagaggggccatccccagtcctggatgccttgaaagacttccaggggcaacgcaggagctccaatcgcaggaccccagcgctcctccagagcagcgcaggaatgagacccccacttccaggcacaggcgaacaagcctgccaccgaagaaggaattgttagggctcttaccttttttatgaggagaaattctggagaatcatttcagaaactgaggggggaaagtgaatgaagacaaaaaagacccttttcccgcaatccctggcctcctggtatcaagacaccaggacaacatcaaagcaacttagggggaacactttaggggcctattgtctgctctggtctgatctgtttttcttctgactccccctcttgctgcggtgacacttggtacggcccaggcattcatgccaagtagctttcacacatggaagcttgtctcaagcaattgctgacaagccacaaacaagacattctccctcccttctctgcgcccccccactcctcccccctccaccttttcctcctcccctcttgtctcccctcctcctttcttctgaatgcaaactaaaactctccagtgacaggcaggctcgcaggcttggcctagctgcgcacgcaggcacacacacacacacacacacacacacacacacacacacacacactctctctctctctctctctctctctctctctctctctctctctctctctctctctctcctctctctctctctctctcttctctctctctctcttctctctctctctcaagcagctcagctagttgctgctgcactggtggagttaagagacaggaaaaagcccaggctgagttgggggcagggagaaaaagagagggagagcgagagcagagagccgcctcctgtgtcctagtaaaatggcagaagagaggtgagtcctttggaagaaaagcagtggccacacacgtgtgcacacatacacagactcaggccatctcagcgccaggaaaagtgaaataaatgacccgacaaaggaaaaagcaaagtcccattagctggagattgggggagtagggagataagagggtgagtggccccaggactggggtttctgttgagtggttaggtgatttttcttctttacaatagagaaaaatttgtttcctaaggatctagccttctttcactgcataattgagcatggacttgagctactagttaaaataaaatcatgaaatgtgtaaatgtgtgagtaaacttaactgtaggttcaacttgtacccaagatatttttaaagtgaagctttttttatttttttttattttttattttagcagaaaccctagagagcagtagcaaggagagtagtaacaagtagtgtaaactaggagagctgtgaagtgtgatgctaaagttactgattgccaggctgctggaatttatggagggtgggcctgagagttggaggaggggagggtgagtgtgctgttttctaggaataagaggggaatgaggtaggataatgaatatggcaagaaacaagcaggaatttgattggtgtggagggaggaggtgggggctgtaaaggagtggagagagagagagagagagagagagagagagagaaacaacactgcattaaaaaaagaagaaaaatggaagcccagaaagattgaaacatgcagagtaaatgagatggtaaaagaaggcataaaatgtgagcaaaaaggagcacaaaggatgtgcaaatttgcagatggcatgaaatcaggagggccaattgagatcaggaagaagaatgacaggatgattatatgacattcatatttttagatactgtggactcacagacctaacaaggtctcctctgcctaggccagaagagttatccctatgcaacaggatctgaatggaagcttagctcctaactgctgctgaatcagttctgtactttttcatgaagattgtttagactctattcctcagaatcttcctttacaaaatggaaattatgagaacacacatcactcattccttcataggtatgcagtaaagaataaattatgacttctttcatacttaacaccagctaaatgaggtgtcactacctaaaactcaccacatcaaagacacagacttgttcctgttattttcccccttaatttgctcctccattatccctgatccctgaactgtctgtcccgactcccattaatgatgatgatgtggtaatataataataataataataacctttttttaagtatttacttgattcttagcattttcccactcatttgtatcatgaagtaatttttgttatgatcatttccatttacagatgatagaaaaacgag

SEQ ID NO: 205 - DNA, 4001 bp, Homo sapiens
ggagaaggggagtggaagttacaaggaagaagggacaaaggtgtgttggggaagacttatctgataatatatttatagtactttagaaaaaaagaaagtgggctgggcggggtggctcatgcccgtaatcccagcactttgggagtccaaggcgggcggatcacctgagatcaggaggttgagaccagcctggccaacatggcaaaaccccgtctctactaaaaatacaaaaattagctgggtgtggtggtgcgtgcctgtaatcccagctactcggcaggctgaggcagaagaattgcctgaacccaggaggtggaggttgcaatgagccaagattgttcccctgcactccagcactccagcctgggccacagagtgagactctgcctcaaaaaaaaaaagaaaagaaaaaaaaaagaaggtcgggtgtggtgactgacgcctataatcccagcattttgggaggccgtgaggcgagtggatcacctgaggtcaggagttcaaggccagcctggtcaacatggcaaaaccccgtctctactaaaaatacaaaaattagccatgtgtgatggcaggcgcctgtaatcccagctactcaggaggctgaggcaggagaatcgcttgaacccaggaggcggaggttgcagtgagctgagatggcgccactgcactccagcctgggtgacagagcaagactcaagaaagctacttttgataccttgaggcaacccagatgagactccacttgaaatttataagcatgaacttgagtgcctttgtccacagctcctgcgtgttcagatgggttctgatggaatagcattcccctcggccgccaacgtcctccatcaggcctgtctccacctggatcccgtagggcagagagaggcccagctcacccttctcagcctcttccttgaactgctgcatgcagtccaggaaggccaccatcgcgcggtcatacttgttattgaggaaaacatcctgccccccataacagaacaacggcagctcagtgcggtcatctgttaaagacttcagatacgaatggtttccgcaggggatgagtcgatacctctgaaactgcagtccaattgtattggccagggtaaggagcagcaaggccgcctgtccccaggcagtgttaatctcattccagcccacacggacagtggggaggcggcccaacctgaagttattgatgacgcccaaggggccctccacccagatctcaaacgtggcggtgaaacagttgatttccttcagccggtccctctggaccctggcatactgcagctggttctccacgttccccagctgatcaagcagttccagctgctgccgcttcaaggcactgtagtccctgtagtgctgcctctcctgctggtccagctccgcagcctctgcctgggctgcctggagatccgccgctgctcttgcattgttcctgtccacatcctccagctcctgcaccagcctggcctcctccagctccaggtcccgcagctccgcccgcagcgccgccgcctcgtcctcgctggtcgccagctccccggtctccaggcagcgttggtagttctgactgtcagcttctgtgagagcgagctggatgtccagctgctctaaaagactgtcggtgcattcttcacacaggggatggtccacaactgcttggccagagactatgtcaaaaatgtcaccagctgccttctggatgctactgagcatgtgcatggcgccaagctcccccagcagggtgaagatgttggcatggcccttggacacactgccatcgcctggaggggatctgctagaggcaccgtcctgttgctcctcagcgtctgtcacctccctggtggtgacgccgggctcccgggtgtctccgggctcagcctgcccagaggtgggcgccggggctgcagggaggctcctagactccgaggagccgctcagcttcagggcctggtggcagcgctggcacaggaagcggatggaagacatggctaagggcctgactgccgccttgagtctaagtttcctctggctcccagttacttatcattttataccttttcaggtctttctagaagagtgatccttttaaaatgcacatgtcatcttatcactgtcctactgaaaaccctacaatggtaccctccttcggtacctgtagacctccttcagctccttacagaccagggattatttccaaaaggaaaatctgatcatctccttttcctcctgtaccatgtccaaggcacgccttaagcgtaatcttgctaaaactaaaatctcatcatggcactgccctccttaaaatgtttaacacccttatctaaccttaagatcgagtccaatcagctttggcagagggcgttggctcacgcctgtaatcccggtacattgggaggccgaggcggaaggatcgctcgaggccagtagtcctagaataccctgggctagataagcagaccccttcactacaaaaagtgaaaaaattagccaggtggggtggccacttacagtcccagctactgaaaagggtgaggtgggaggattgcttcagagcttgaggttgcagtgagctatggtccactacactcctgcctgggcaacagagtgagaccctgtctccaaccccgaccctctcatccccatgccccttttacacacacacacacacacacacacacacacacacacacacacacacacatacacacacacagattttttaaaaaagaaaagttcaggctgggtgcggtggctcacgcctgtaatcccagcactttgggaggccgaagtgggtggatcacctgaagtcaggagtttgagaccatcctggccaacatgacgaaaccccgtctctactaaaaatacaaaaattagtcggatgtggtgatgggtgtttgtaatcccagctatgcaggaggctgaggcaggagaattgctggaacccaggaggtggaggttgcagtgagccgagatcacaccactttactccagcctaggtgacagagagaaactccgtctcaaaaaaaaaaaaaagggaacgttcaatcattttaacctaacaccaaggccggggcccatctttctggcttcttctctccccatttcctgctctcctgagccgtgggctcctctgtgttactagctacatgcatgctagttacatttcggttcttccagcatgtaacattgttccctctaactggaacactcttccttcccctctccacctggccaagtcactcatcctctagggctgattaattgctaaatccacagtgaacagtagattattgttttatgttttttgaacgattgatctgtctcctaatcaattgtggttgcctctcatgtttggcccacttggaggttctagggaataatgaagggcctgaaaaggggtaggggttctgcagtcaactgccagaggatgcttctgttattgattcaggaatatttcagagaggccattttctccaagaaacttccctggcccccaatttaaggctgtctgctcttgtgacaaactttttttttttttttcagatggagttctctctgtcacccaggctggggtgcagaggcacaatttcagctcacggtaaccttcgtgtccagggttcaagtgattgtcctatctcagcctcctgagtagctgggactaagggcgtgtaccaccccgcccggcaaatttttgtatttttagtagagctgggcttttgccatgttgcccaggctggttgaactgttgacctcaagtgatcctcctgcctcggcctcctaaagtgctgggattacaggcatgagccactgcacacctggccacacttaactttgatttttgtttcatttcgttttgtttttctttttctttttggtggagtctccctctgtcacccaggctggagtgcagtggtgcaattataggctcactgcaaactccacctcggggttcaagtgattctcctgcctcagcctcccaagtatct

SEQ ID NO: 206 - DNA, 4001 bp, Homo sapiens
gcattttcttctagcaaaagggaagctaaggttacaacctagttataacttcctcaagcctatcgtcttgggaaataaattcctaatcctttccctcaggtaattaaaggcaagtaagcaaacaaaataaaacctaatcagctatgaatggttcccttttctaaaatctgcttcccctccctcagtttctttggccctaggtgtctggcagtgggtgggcctacacttcggtgtgccagggcttatcagggaggtggtatggatagagcctgtcaaaaagggtccaagtgctgctggtcagtttccagttcttccactcttcaacttctgcaaaccgatttttcagaggcaacatgagttgtgagactgagctaacttgccatgagaccctgggcaagtctctatgggttgagagaatgttgggttcatcttttaggctaaatgtgaggaagcaaaggaacttgaaaaaaatagagaaggtctcaaaattacaaaacatcttcattcagtcactaacccttcgtgttctttctggtagaaggcaggaacactatttgcccactttaaggttcattctccttaccagcaggagctaaaaaggctgctccccaaaacggagatgatacttcccccttccttgcttgtctagactcaaactttctggaactagctgggaaagagggccagctgtcttctctttacaaaggaaaaggtgtctcagcatggcaggaagaactggagcataggaggataaagggctggtttctttccctatcaccaactgaacctcagtaccctcatctacgaaatggagatgagactagctgccttagcccatctctcagggccctggcagggcagggatgagaggtccagtgttattctgacccagaaactctctcctggccctcaactctctcattcagggagccttctgggagattcagaaaggggtgtggaggctgagggatgccttagggcctctacctccttacctctgccacctggccagggaggggcaggagagtgtggtgtggagcccagtgcactgaggttcatggcctcctcatcctgtccaatgttggcccggatgggacaaggatgtcatagcttccctctgtgaggagggactcccacctagaagatctgacaatatccttcttgctcctcactccaaggaggtaccaacagcctttaaagggagagagacagacagcttgagaaacttaattcttgacagaaaagaacagagggaaggaactgggagagaggtaaagagaaggtgagagagaaatgacggtacaaacaggtagggagaaaaatggaaagtgaaggaacgaagaaaacacaaagaatcagaaagaggaggacagacacagatgaagagatgaagacggactgacagcgcgggagcttcggggaagcggggaagacaaaggggaccatccggtctttttaactggcctggcctcttagagacaccccgttcccaaatgaaatgcccagaggacgggagaaggaggcaggaaggagcaagcagtggctccccccggtcccctccgcccgggcccccggcccctcccggggtcccagcccccgcccgggtcccaccgtccctccccgcccgcttgctcacctgccagcgccaggatctgggccttgtggagcaacagcgcgccccagtcgcggggggcgcgcggggggctctcgggcccggcgcccaattcctccgggccccggtacacggcgtacaccttctggttgtcaaaatccagccgcgagcgggggctgaagtcgcgcacgcacgacacgggcagcgcgtagcagacgttgtcctccaggaaccgcacaaaggcgtacatggtgggcgccgggggcgggccccggtcgggcagctcagcccgcggggcgggcgcggaggtggggatccggcggggggcgcgagtctcgctacggtgctggggggggcgggggcggctccccaggacccaggctccccccactgttattgttcctgaaagcaccgttctgccaatcggctgctttcgcctgggcgcggaaaagggagggagggggggaaagggggacgaggggcggatgaggggggtttggaagcgcactgccacttgcaaagtcagacccgagcaatcacagccggagcgcgattcgaatggggagggaaaagggttcagagattcagttgcaataaaaataataacaagagcattgcaggaaaaaaatgcattgattaaaaggtgcgctgcgtgcaggattatattgcttcaacaatcgcgctgccaaattgcattgcaacaaaactgcattgccaagtagagaagtgtatgagtgagtgaatgcgggataggggtgggggcaatcttgattgaatctcaaagtgtaaacttggaagccagcagaagtttggagtgttttaaatgtagccaccctacccgcgcccccagccccgcaccctccccgcgcctttcccagcccttagtttggccccgccttttctttgctttctttctttttgtttgtttgtttgtttgttttgttctgcaaaactgccagctccctctgtggaaagggtcagtcagacagaaaatttcccctagagctgccaaaccagttctgaccagaactggggcttatctgagatttccagttgtgccagctggctggggaggtggaaggtttgtcaagggctgctctcatctgagggagcagtggcgcccctctcctctatagtctttctccattgagataccctctccacagcacgcccaccactgagcagggacaacttggaatcgcggagggagttgaggagcgctctgggtaacacaggcccaaggctagggatttctggagcactttgaagagtacaggaatagtactccatggaatagcggtctttgctctgtctcttgccaaagagagcctggaggggcttgggtcccctccaagacaagccgtgaggaccagccaaagggggctgattgggctctgtactcataggaaccctatcccacatcagaggaggtcagtaccttcacagggatgcctcgtatcaaatatggctagttatatttctgttgcctagccagacctggcacttgacagggagttaatgaattttgggtaaagaagaataaataaaaacccacatccatccatccatccatccatccatccatccatccatccatccaaccatccatccatctgttcattcattcctttattcaagcaaccaatattcactgagtttacaccacctgccagattctgggccaggtgctggtgatagaaatgaaaagataaacacctggattcttgggccttgcaaagtcagtgtaccagaacttgaatctcagttttgggttcctgtgccaaaattaggtaactgtatgaataacatacctttcccatcctcacaacctttacaatctagtctaggagtattaaagaagtataagcaagtaatgacagtataatgagaaaagtattgtcatagaggaatgcttaatggaggtgttggactcaattaaatgttatatttttaaaaattcatcttaataaactttagctgtaagaaaaaaacagaataagtgcaccaaaatgttaatagtgatttttttagcttcttagtagtggtagatgattttgtttttccttgtattcattgtgtgtgtgtgtgtgtatgtaactattttccacaatgttttattactttatcatcagaaaacatcaaacattataaaatcaaagcactgtgctcatatttcacatcagctgcactgacaatgaggcagatatttatttcactgtgaaatagacagtgcgttatataagtgaatcccatcaacatatagctctcatatccaaatgtgtaggtcagtacaaatttttttaaaccaacccactggttatgtggtacagccaaaaatgaccaccacttgtcctgatgcagctgttggtcttatcttgccccacaagct

SEQ ID NO: 207 - DNA, 4001 bp, Homo sapiens
tggccaggaggctctttctcattctgccctcagaggtgtattaagatggggtgcttgaatcccagctctgctaactagctgtgtaacttaggcaaatttcttttctactctgtgcctcagtttccacatctgtgcaaggaggatgatagtacctatgtcaagagttgctgtaagggatgaatgagttaacatgggtacagggcttccaaaaggctggggtacacagctgatgccatacaactgttaggtattaaaattattattcatctttaaaattagagggaggagggcagatgggtctggtcctgagcccactcacttccaaaagtagacagagagcgatatcgtcacgtattcgcccgtccctccgggcctgggccgccaggttggtgaaccagacgcaggggacccagtacttgttgaagtcggatttcaggctctcaaactttttcctctcttcctgggacatgaaacctgagggggtaaagcaggtggggtgcagttgcaccctctgccgccaggggaggctgctgttccgccgtctggctcccctccctcgcgtccaccggctgtcccaggactcgcggttccgcgttcctgtcgcagtccagacccttccctggaggcccctgctcccaggactctcccaggcgccacctgcatccggctgtgggccggacccccagaggctcccggcgggcggcgcacctgcgtccaccacgtgctccatggtggggaagcgcttaagcacgcgggtgctgaccgagcgcagcaccagcacggacgccaggttcgcgtagcggatgagggtgcggcgcagcaggcggccccgctggtccacgccgtgcacgctagccgagatgacgcacatcagctggtctggcagcgggatgcttgtgtactgggaccaccagcggttcaccacgagagtcacatagaaacctgcttggccgccgtgatagagggagtaggaagggagagtggagagcctgggggtcggagcgcctcacctcccccagcaaagggcctggtccaggccagttgaatcgtggcagggggaaggaaacattcagctccagtgccctgctgtgcgaggccaggaggagggaggagggcaaacttccttcagcagagggaaagtggggattcaaagccaggagactgcttcccaggagggtggggaaggggttgtcacctctgtccagctcccctgcagtgcccagggtgggcttgtgaggccagcaggtgtcttgtgccttgctggaagtgagggtccggcaagtgatagggccctgccctctggaagtcctggacccagcacccagctcctgtgcctgctgggcctgctctggctgaccaggaaggctctgccaccgtgttgagtaattctttttttttttttttttttttttagcagagtctcgctacattgcccaggctggactggaactcctgggctcaagcgatcctctcacctcagcctctcgagtagctgagactgcaggtgtgtcaccacaccatctgttgggtaattctgaccctcggagctgtcaacccaacccagaggtcagggaacacagtaagggggacacagggaaaactagaagggagccttacccaatacaaaggacaagggaatgaggtctgctgagcggttgcagtaccgggccacctgagcatacacgtacctctgctcctgggtcagcagcagcctggggaaggcaggtgtaggcttgggttagagggaggtgggtggcccagtctccccacttgcgccagctctaagaccctgcccttaccggtaggtgatgctaagcacagcgtacaaggccccaaagaggaggaattccttgtagaggagcttgtagatgcttcccctccagcggagaagcaggccagagaaacctccgaagcgggcctccgccactttgagagtgtatgaaaccgtcatggtgctgggagcctggggcaggaggtcacaagagttgcccccagggctgtcgtttagttctccagacaacctcccttccactctggtctcacacaccccagccttcaccctgcgtcagtggacaagggggtaggagcctgcagagcagaaaagtacaccccaccccctgcagaactgagcagtacatgggcaaagccaggctagagttggacaaggtagaactgagatctgtgtcccttcatgcatgaggtttcctcaagctcctcttcagcctgcagggctagggataaccagatcctgaactgctgcggacaagagacgcagctccagcccaaatccactgctattccttggggccttgctttggaagctgattaactagaactaccagggcccagggcactctcacccccatcccatacctgcctacctgctctgggcagcagcccgtgtggaagatgaactgggctagacttcaacccccacagacttaagtacctctgcagtccataaagttaggctggactgaggcctatcattgatggattgaagctgtcatccagcttcccctggtgctgggaactgggtgtgtctccttacccctgtagggttgggctggccttcgagtggcagaaatgccagctatactgaccccacagctcacacagacgacaccatgtccttcaagccagtatgacaggggttattgtcccacgtttcaggtgggaagacagatgcatgataaactgttataataataccagctgctgatcacagagcactgactaagtgacaggaaccatgccaagggcactactaggtcatcctctcaagaaatcctcatcacagcaccatgaggtagggaatcaatcatccacatttcacagatgaggctccaagaggtaaatgacttgcccgccgtcggccatacagctagaacatgttggaggcaggattcaaagccagggctgatggacttccaaggctggaagtggcctagcaaaggcatgagctccaggacccatcctgtgcactggccacactcccagtcttcttgtacaggggcttgggggcttggccaggctcttctccatccatgccacggggctgacagccacagatctggaagctcaggcctaggagtgcaggctccgttaagccctgtgtccaacatcctgactcctaggggtgcccaagatttgagtggccactttcacctctggaggaagtaatacctaaggcgctgatagaaatagaacttccgctgccaggcaaggtggctcacacctgtaatcctagcactttgggcagcctcaacgcaggtggatcacttgaggtcaggagttcgagactagcctggcccaacatggtgaaaccctgtctctactaaaaatacaaaaattagccgggtgtggtggcacgaacttgtaatcccagcaggtacatgggaggctgaggcaggagaattgcttgaacctggggaggcgcaggttgcaacgagttgagatcgtgccactgcactctagcctgggtaatcaaaaaaaaaaaaaaaagaaaagaaagaaagaaaaagaaaaagaaaaagaaatagaatctcaatgggagaatcgcttgaacccgggagggagaggttgcagtgagctgagattgtgccactgcacttcagcttgggtgacagagactctgtctcaaaaaaaaaaaaaaaaaaaaaggccaggcactgtgactcacgcctgtaatcccagcactttgggaggccgaggcaggcggatcacctgaggtcgggagttcgagatcagcctgaccaacatggagaaaccccatctctactaaaaatacaaaattagctgagcatggtggcacatgcctgtaatcccagctactccggaggctgagacagaagaatcgcttgaacctgggaggtggagattgcggtgagccgagatcatgccattgcactccagcctggacaacaagagcaaaactttgtctcaaaaaagaaaaagaaaaagaaaaaagaaaagaaaagaaatagaacctcaaagtggaa

SEQ ID NO: 208 - DNA, 4001 bp, Homo sapiens
tggaggggggtacccaggccaaacaacagtgaggccccatccctgaccctgtcctggagggggcagaggccaggccccagtgctgacgaggagcccagatttgggcctaatcaggtggggacgcatctcagcctggaaccaacaggggctgaggagagagggcacaggagagagggcagagaagaggaggggtgtctagggggactggcagagtgtgagagggaccgtgagggggctcttgatgggagtggaagaagtgctgagggtctgagaggggagatgcatgcgtgtccaggctgaagatgcccctatattctgtcaaaggttggcggggggaggtgttggggtcctttcatctggctccgtttctggtgcttctggaagtctctgctcagcacagggaagaactaacacgactaacctaggcctaccctgaatgcttcttgctaaccaggccgagaggccacacacttgcccccccatccccacaaaccaggtaatgccagtttgccagcagctatttgcctatagagatgagtctgtcctggtcataactgtgtgctcaaggtgtccaggcttttgggggtgggcctatctgggtgcattatggatggtttggtggattgaggtgtggggaggagggtcctaggctagagggggtatccctagttagactttgggaagccaccttcaacgttttctggaacaaggcaggtacaaataaaaaaataaaactttggaaagcactttctagaactgaagaaggtaaaacctcctcacccccatcctcctgacacctccctcccacactccataaactggacagactcacaggcccacagattcctcttctggagtttatttgggagcagctgggatgatggggaccccacatccatagggctgggaggtcagggcaagggcaaggggaagaggaaagaagggtgcctggagaggagcagaactggggttgccggccaggccagcagagcgacaccctagaccgggccgtagaagcgccgataggcctcctgaaagccgatgtggtcagccaactcgtcacagtccggattgagctcacacacctccctcctgggctccaggggatccgggtaggggactggggctctgagacacccgacgtggtggcatcagcccccgtgcaaaatgcccatccctcctctccctacacatggggctccagggtgcccaccagggcaggctgcctgtacccccaccacaacccagagaggccactccctgctgcagctcccccacagaccatcccggagaggcagggccttggcccagctctgccttttctctcaccccagccattgatacaggtagcgcctgggtctcttcactacctcgctgccctcctgcttggacacaaaggctgtggagcagaggggcaggcatcaggtggctctgggtttgggaggatcaggtggggagcaggctggccttcctgatggccagacaggaggtggcaggagtgggggaatgagactgagggaccagggtgagaggggagggtccaggaacccatcaggtccatcctcatacctgcacctttgctggactctgcaccgctgggcttcgcacctgcaaaggaaagggagcctggttcaccccagctcatccccagggccctcatcctccttcccctgcgtctcgggcagcttgctcttccctcctctccctctgcaagggcagagctggggcaaatggattgagcctgcaacaaggtggttagactgcaaagggactgccagccaaaggggtgagaagaggtgggccatggtgcttcctcctctcagcccccactgcaatgcggcctgaggggaggtgggggcactcacctgcctggccagcgatgcaaagtgcggccagggccaatagggcgaggagtgtgagggctctcatggtgtctcggtggctgcgctgggctgctgctcaggactcagctggcctgccccgccagcctccagcactgtttataccctctgggctgtgcccagcgatgaggaggggcatgcctgaccatggtgcgggcgggtctagggggaatctgccagggctatttgggggtcatccgccccagctccgtaggccaaaccccaaaggatattgtggttgggagctgcggctgctgggccaggggcccctgggagtgatggagggtgagccacaatcagactgcccggctcttgacactgcctctggcccctctctcaggggacagccccagacccctcagctccaactcactcttcctcagagacccccagcctcaggttgagcactggctgagctctaggggagtctaaagaggaagcggggatcagagacctaaaataggttcaagcagagctgggctccagctgtctcacagcctgtgatttctactgtcagccccgtgggcaggagccaaacccagggaggggatgcctcgcaatgcccccgttcacccggtgagtcaccaaaggcagcctgctgtgggtgcagctcgacggctcaggccctgccctgcgcatccggacaggagaaagggtcgggcagcacaaacgccaaaagccaaagccaatggaggtggggccgggcaggagatgaggtcagccggttggtttctgggacacgccaggtggctgtgactgccaggtacacaggcacagggaagggaggcaggcactgaggtggggacccccttccctgtgtccttagcaggcagggaggcagggcctgtgaggagcacgaagatggagtgtgcctctgccctcctggccccacgattctcctcctgaccctgcagcctccagtgttaaacaccctggggagggacctgccctcccgtagtgctccgataagtaataggaaggcctatcctctacggtacagaacatcccagcctgaaaaccccatcccacacctgagagcctccactgcctcaggtcagcccagagagggaagacatgtcctgggaccttcccctgtctaacctgtctcctcactcacccacccaccaaccagggcttgagaccatctgcccaacctgacaagtaaacaaagcacccgacggggcaggcctgacagaagcagggcatttggatgcttgaatgccacagctccatggtgacaaggtgggcagagggagactgagccaagtgccgtttatgggaggggggtgggaagttgggaccacctgatgcttgcctgtgtccccagtgtgcctccagcagacctcaccaaggctctcactagggaaaagttctgcccccatacacgcccaacccctttccccctctggtggatccgggaagcacccatcctgcctttggctgccctggctgaagaagagtgaagtggaagaagcaagagaaacaaagtgctcgcggttctttttttttgagacggagtctcgctctgtcgcccaggcaggagtgcaatggtgcgatctcggctcactgcaacctctgcctcccaggttcaagtgattctcctgcctcagcctcttgagtagctgggactacaggcacacgccaccatgcctggctaattctgtatttttttttgagatggagtttcactcttgttgcccaggctggagtacagtggcgcaatcttggctgactgcaacctccgcctcccgggttcaagtgattctcctgcctcagcctcccgagtagctgggattacaggcacatgccaccatgcctggctaattttgtatttttagtagagacaggatttcaccatgttggccaggctggtctcgaactcctgacctcaggtgattcacccgcctcggcctcccaaagtgctgggatttcaagcatgagccactgcacccggccgtaatgattcttggagggtgccaagagtgacatctccttggcagctcatcctatccacagggaacccaggggtcctggtttttgtacaaggggctctgctgctctctgcacatgatggtctagtaagccccttgccaaaccacc

SEQ ID NO: 209 - DNA, 4001 bp, Homo sapiens
gcagtttgtggtactttgttacagcaaccccagcaaactaatacaacatgaaagagatctttgatacaccctagttgctttgtctatctacttaaatctttaaaatgtgtattcttatttaaatcgtaatcttctagtgtatagggaatatagctgttaaaaactttgcattaacattaaatgtttaagagtagtcacctaataaattctaactaatgatgttaaatttcacttgtacatctaaagtactgaaatataaacactgcactaaaaaataaacataaagggatctgaaataacaaatgattcccaagggggtccatgagatctagttatctggctcaaacgttccttcacatcgtcataaatgtcatgttttaaaaacaattataaaaaagccacttacctttggtttctaaatttttagtagtcattttttcaccttaaccactgaaaatgcactccaagacttctgctgaacaacctagaaatgtatgcatatgaaataattttaaaaatatcatataaacacatagagtacctccaatttaaaagttatgatattttaattgcttctgtatttagtacgcatgcatttagaaagagaaatgtcccttatatcccattctcacagaaggcattgttatgtctactaaaagtctcaaaaaaaaaaattaggggtggtttacttctaaatactccgtttcaccatcctcaccaatacactctaaattgtcagaagtatgtcctgaattttagccaagcaaagggaatgaagttactgtggtggttttgtcatccatatgacaagaggaattttaaagtaattactttcttaggagacataccgacacaatttgtatacacacacacacatatcaaaaaggagcttctgtttagatgtttaacaaacgacaaaaaatattactcaagataacataatttatacttttttggtaataaaaagttaaaattaaaatagtgtagctccaaaagtaaaaagagaaacatatcgagcccatgctttcagaaatgtatacattgtcttacagtacagactcagatttaccagagaacatataagaaggtgatgctactgcaatgatataaatatgacaaactgtacactagatgacaactggtttcactacaaaaaaagatcgttctcagtactagatacaactcagttcaattagtgaacccgacgactaactttcttaacagtcacaaacttttctacacttacactctactgctccgaaaagaggtatccaaaaaacccttcgtaagagtaacgatccctgaaactgcccttgatagctgctctgcgaaacgtacaggcacagcgagtgcctgctggcaaatgccaaatgaagcggagggggtgaagaagtaagtagggggagtgagcaggtatgaaagcgataggccgggaagcgacaagcctgtcaactttgctgtccggggaagtcgaaacctaagtttcatccctgtctgaaaaagtcttcccggaacaatctttccctaaatccaaagctactggccaccgagctccagccagacctccgtccctttccaacatccttagttatacctgcttgtcctcggatttacctctaagattcttattctccgtatttcagggggcttcacttgataggctcttcggatcggtatcaccaggttaacttctcacagacctcttccattcggaagccgacccgcccagtccctccgcatatccagcagctctctcactcctaaccacttccgattactcagggtttcgcttccggaatacgtttccaaaagagcagggtaaacaaattctgcagtgcgtataaactcaagtaacacagaacacacactgtaaggcctccgtaagtgaaaagcggacagatttctactttaaaataaaataccgtacagcaacttttggagcccaagccgcatattcacttaaacttccgggccagctgttaaacaaacggaagtaaaactgccggaaacagaataatggcgtctcgtagccccaggcgacagcgtggaggggcgggtctgtcgattggatgaacgcagctgagattactcccagccactaaggacgaagaggtggggcggtggcgtcccacgcctcgtgcgacagtgggcggggctttgttgcctgagtaaccgtatgatggtggtggtggtggtgtcttcctgtctcaacgatacctattttctagtgctgagatcctgagacaatggtgagtgccaggggatgccagaagaacggctctggggtcctacttacttagctttccaagtcttcgggcggatgggcacttaaagttgtccggtcctcccgaccttctccccgttatctctttcccccttcccacgggctgttcctgcagtctcctcgctctccgtatttcttacagcaccctgaattccactaatgttactaagtctctagagtaatgaaacagaaaatttagggtaaggcatcgagtctaataacctgttttgaacaaacattatgtgtttgcattgttcatcatggcatttttcatgttcacagattcacattaacgcgctttattaagagtatggggtggtgtgtatgtgactgtctcaacactgatctgaatctccctagatcttggagtctttttgcttttctgagtggcagagcactgccccacgcccccacgagggccattaacaggtgtatgttggatcagcgctcttctatccagttggttaccttctaggtctgtgcttgcttttcttttctcttttcttttctttcttcttcttttttttttaaacagaaatttctcctgggattgcttggagagcttctggaattcactgtttgggcttcacccctggaaattctgaatgaaaggaatggagctcggtatttgcattttaaataagcctataggttattttaattcacccctatgtttgagagggttctagttaattcacttaactaccatatcttttaagcacttatggataacggactggaggatagaaagatctttagatagttatagctatgaatttagaaacagagccctcacccaccaccccttgtttcttcatactactcagcaatccttttggttaccccagttttcccctgacccattctctgtgaagacattttcaaaccttccctttacaaaccctgtcttttgccctcttcatttctcctttctaaacatgatggagtataacaggccatttcttcaacctcatgcccccaacctacacattgctctatatttttgccgagcctttagtcttgtatttctagtgtagagaaagggatattaaaggataatccatccatctttgctcttgatctcatttgcttccatctgttacatttcgcttccagttgtttttttctttcctgtgcgttcagccttttcctctccagtttcttctcttcagtgctcaagtcacacatcttatgaaaattaaataaagcaaaaccatgtcctccatcctgtgtttatccagttatttcctagtcctcctatctatcagtaaacttcttgaaaggatattatttttacttatatcaaacagacaaaagtcttctgtctggcttctttaatggcttcaagaaagttgttcttgcttaagtttctaatggccttttaaataccaaatacagtaattacttctcaaaatttacattacttagtctctttgtgacaactgaggttcatagtcattaattccttttactggctgtgcctggtttttgaatgtcattctttggaattaactccttgattactttcatttcttagtctagacattttccttgggtgattttgtccactcacatggattctactaacacctttgattttgcttctaaatttcaattttcctctcagatctactaatgcctaactcagttgcttcccggacacatctgtctcaaatgtccttcaaacttaatatgaccaaaactgaacttgctatct

SEQ ID NO: 210 - DNA, 4001 bp, Homo sapiens
tgctgctcgcctccaccaccagctctgggttgcgggaagcagaggcttggccatgccctcttctgctctagtgtaggaagcaaatggctgatggccccacaagacctgctgcagctcagtaccctgtgttcctcagcccagactcctcagaaagctctctgcaccctgaaagcctgacctgacaacagaaatgtcatctcattgagccctggatggacagtcaggcttcctgggcctgtcctggctcagcaacatagaggctgcgctgtcctaggcatggcgctgcctctctgaacctcactgtcctcatctgggagatggggatgaagaccgtggctgttatcagggttgtcgggaggatgaagaattaatgatgctgtctgtggagggaggctggtggctggggcaggtacccactccctgctctcagccccacagctcccccacttcgggctgagctgtggtccttggctcccagaccccggcctgtcactagccacagacaggaggcaaagcagacgggggacctgaccaacagtaactacacgagcatagaccaaagagtttagtactggaaaagaaaaatctgagatcttaaggaataaatagctccagggtttgatacaagatgtttgcagacaggaaaagcccggctttgcctgggagaacacagtgggtccagctgcccactgggccattccacaggaccggacactcaccctataccaggccacatgctaagtgcagggcccagggtgacaaggccacagtccctgccccagcgagctgagtctgctccttccccagccgctcccctgacagccgcaccccacccaggctccgcacagggaagagcctgctgtggactcagggcacgcgactcagctctggtcactccgatgatgtgaccacaggtttccacgctgaactttgtccctctcctcagtactgtccttatcacagtgacagcatcccggcctctgtttactcacctgtctccccaggaccaggctgtcttcccggggcagcccaggtgggcaaagacatcacctaattcttactcctgggtgtgtctggggcagggtgaaggcagcgcctgggagtccacagtcccccacactctgctcctgaccaccccgcagcccagggggcccccatgacccttagaccttccctaaccacggcggtcccactcccctgtggttcgcgtccaccgtctgtgattccccgttcggccagggcccggcaccgcccgcggatgcgcgcccctcccctgcagccagcttactccgagggtccccgcgcgggcggccgcactcacccatgttgacgaagctcatgaccaggtcggcgcggcccaggcgctgctccgcgggcgcgccgtcctcgtcgtcgtcgccagccatggcgtggtacaggtccagcatgaagagcggcgcggacgcgggcagccgggaggcggcgggtggcgcgcggggccggggccgcccgggtagcccgagcaccgccaggatctcgcgctgcacgtcccggcgctcgcgcgcgcccagacgtcgctggggacagccgggcgggggtcgcaggccggggccgcccccgcccagcgcgcacaacgtcaggcccagaagccagagcggtccggggcgcgcggccatggcgggccgggggcgctcagcgggcgcacatcagctccgccgccgcccctgggcccggggacgccccgacggcgaacggggagctgagttcggcgagcagggggcggggctcggcgggcggcgtctgcggcctcagcgcggtccctggagcgccccccgcgcgcacctgccccggctccgggacaagcggacgctgacgcggacgcagacgccaacgcttcgaggccggggctgttctgagggctgggactgtcagccaatccgtctgtcgccgccgttcccaccagtccggctgtggctgcggtccgcgcagcgcaggggcgaccggcgagctccggcagcgacccgggcggcgcgattcccgcgagtccttgccccggctcagccgtctgtgccgcccgcccacccccgggactgaccaatgggggcgcgggggcggggcctgggcgcggaggccgcgcccgctaggagccccgggcggcggcaggtgttgcgggtggggcgaccccgaggtgcgacctcggcgtggctggcggttggtccgggcgaggagcccgcagcctgggcgtcagcgtggtcagggccgtcgtggctcccgccgcgggcctcggcgcagagatcctaaggccgcggcgccgtcccggtcccgccagtggtgccacccggctgcctcgccgtggtgtgccgtggtcgccaccgggcccgacacgcggccgtagccccgtctggagagccgggcggtgccagccaagccccgcgggtggggcctgttcctctgcccgcagcagccggcccgggttccggccaccgcggcccctcaccgcctcctggcgccttccccgtggcccctgcatgcgcttctgcgggcgcctccttctcggcacctgctcggctgcttctccctgcgtcccccacctggctcccgcgtgagcccaggcagcgccccagtcgggccgcccccgccagccctagctgtgcgccctgcgtccccggtactgatccagctttgcggaggaggctccgcctcctgcctccagctgggccagaagctctggggcccttcccgagcactcgggagccacctgtgcacatcttctcagtccccacggccccggtgcaggcctgccaagagaaggatccccgcggaaacgtctcgactgactcagtccctttctgcacacctgctcttccctgggcgcgctctcgccttacttattcctgtgtggttcaggcgctgcggaaggagaaggcacctagactgcactgggaaggctcctggagttgacctggagcgccaggaaaggtcagtggaggaaagtgctccaggcagagggaatagcttgtgccaaggccctgagaccccggctggggagcctaataatggcaacagtcagcacttgccacgccaaggcatgttctgagtgtgtgtctcgtgtcatttctgtgatgctcgcacatcgttagggggtacataccactggaacctcctcttttaataaatgaggaaactgaggcacacggcggttaagggacttacgccaggtcacacagcagtggagctgcgctcgggcaggggggcagtggaaactggagagcccagggggcaaacggcggaggctggaggggctggcaagggaggcaccgcaaagggcctcacaggggctagacgagggccctgggcaccagagattatggtgccccgccatgtggattgaagattaaacctcgaagcaagtgtataatgcccccaaaaatcacatttggaagtcatcacttcaataaaattttctacaacaaattcttaatctaaatagtcatttgctggtgccttaaacacacgcctagtttgtcttttacccaacaggtatatttccacactgctcgtaaattttctgcgcggtccccagagcgccccccatgaggcacctgcatcagctccgggcagagcagatgtggatgccaccgcctagaagccggggctaccctgcggactgggactgtcccataaggatactgagctaaggataatgcagaataaccgttgaaagtacccaagaccagagcttggaagcagagcggaatatggatcagagggagacaggagtcagggccctgcagttggaggcaggtacagcaatcagatgtgggggtgggtacaatgaccatgagtctctaatggtgatggggtggaggggcagaggagaaagctgtttaggaggctgaatccacagggctttgtccccatgtcatcttggtcagagtctcggaatctcctgcccacacccccttcactgtcctctctgcacgccccttttgaatccactgcacatcacttgaggccctaga

SEQ ID NO: 211 - DNA, 4001 bp, Homo sapiens
tgcgggaagcagaggcttggccatgccctcttctgtcctagtgtaggaagcaaatggctgatggccccacaaaacctgctgcggctcagtcccctgttttcctcagcccagactcctcagaaaggtctctgcaccttgaaagcctgacctgacaacagaaatgtcatctctttgagccctggatggacagtcaggcttcctgggcctgtcctggctcagcagcgtagaggctgcgctgtcctaggcatggcgctgcctctctgagcctcactgtcctcatctgggagatggggatgaagaccgtggctgttatcagggttgtcgggaggatgaagaattaatgatgctgtctgtggagggaggctgatggccggggccagggaccctctccctcctctcagccccacagctccccgactttgggctgatctgtggtccttggttccccagaccccagactgtcactagccacagacaggaggcaaagcagatgggtgacctgaccaatagtaactacatgaccatagaccaaagagtttagtactggaaaaaaaatctctgagatcttagggaataaatagctccagggtttgatacaagatatttgcagacaggaaaagccgggctttgcctgggagaacaaagtgggtccagctgcccactggaccattccacaggactggacactcaccccataccagatcacatcccaggtgttgggcccagggtgacaaggcaacagtccctgccccagcgagctgagtttgctccttccccagccgcccccctgacagccgcaccccacccaggctccgcacagagaagagcctgctgtggactcagggcacgcgactcagctctggtcactccgatgtgaccacaggtttccacgctgaactttgtccctctcctcagtactgcccttatcacagtgacagcatcccggcctctgtttactcacctgtctccccaggaccaggctgtcttcccggggcagcccaggtgggcaaagacatcacctgattcttactcctgggtgtgtttggggcagggtgaaggcagcgcctgggagtccacagtcccccacactctgctcctgaccaccccgcagcccagggggcccccatgacccttagaccttccctaaccacggcggtcccactcccctgtggttcgcgtccaccgtctgtgactccccgttcggccagggcccggcacagcccgcggatgcgcgcccctcccctgcagccagcttactccgagggtccccgcgcgggcggccgcactcacccatgttaacgaagctcatgaccaggtcggcgcggcccaggcgccgctccgcgggcgcgccgtcctcgtcgtcgtcgccggccatggcgtggtacaggtccagcatgaagagcggcgcggacgcgggcagccgggaggcggcgggtggcgcgcggggccggggccgcccaggcagcccgagcaccgccaggatctcgcgctgcacgtcccggcgctcgcgcgcgcccagacgtcgctggggacagccgggcgggggtcgcaggccggggccgcccccgcccagcgcgcatagcgccaggcccaggagccagagcgggccggggagcgcggtcatggcaggccgggggcgctcagctggggcgctcagcgggcgcgcatcggctccgcggccgacccagggcctggggacgccccgacggcaaggaggctgggctcggcgggcggcgggcggcggggcggggcgggacgggcggcgaccgcggcctcagcgcggtccctggagcgcccgccgcgcgacacctgtcctggctcctggacgagaggacgcggacgccaccgcctcgaggccggggctactctgcggactgggactctcggccaatccgtctgtcgccgccgtacccgccagtccggctgtggccgcggtccgagcagcgcaggggcgatgggcgagctcctgcagccacccgcttggtgcggttcccgcgagtccctgccctgccctgcccagcggtccgcgtcgcccgcccccaccccgggactgaccaatgggggggcgggggcggggcctgggagcgggggccacgcctgcgagggggcccggggctgcggccggtgtcgcgggtggggagaccccgaggtgctacctgggcgtggcgggtgggcaggcggcccgggcgaggggctcgcagcctgggcgtcagcgtggtcatggccgtcgtggcttccgccgcgggcctcggcgcagagatcctagggccgcggcgcccttccggtcccgccagtggtgccacccggccgccccgccgtcgcgtgcgcgggtcgccatggcatgctgcaggcgcctccttcccggcacctgctcagctgctcctccccgcgcccccacctggctcccgcgtgagcctgggcagcgccccaggcaggccgcccccgccagccctcgctgcgcggcgtgcgccccctgcgcccccagtactgatccagcttcgcgggggagacgcgcacccgcctcctgcctttagccgggccaggagctctggggcccttctggagcacccgggagccacctgtgcacttctcagtcgccacggccccggtgcaggcctggcaggagaaggatccccgcggaaatgcctctactaactcagcccctttctgcactctctgctcttctctgggcgcgctctcgccttacttattcctgtgtggttcaggcgctgcggaaggagaaggcacctagactgtactgggaaggctcctggagttgacctggagcgccaggaaaggtcagtggaggaaagtgctccaagcagagggaagagcttgtgccaaggccctgagaccccggcgggggagcctaataatggcaggtaacagtcagcacttgccacgcgcgaggcatgttctcagtgtgtgtcttgtgtcatttctgtgatgcttgcacatcgtcagggggtacctaccactggaacctcctcttttaacaaatgaggaaactgaggcacacagcggttaagggacttacgctaggtcacacagcagtagagctgggctggggcagggggcagctcctcaagtggaacctggagagcccacggggcaaatggcggaggctggaggggctggcaagggagggactgcaaagggcctcacaggggctagacgagggccctgggcaccagtgattatggtgcccccccatgtggattgaagattaaacctcgaagcaagtgtataatgcccccaaaaatcacatttagaagtcatcacttcaataaaaatttctatattaaataaattattaatgtaaatggtcatttgctggctccttaagcacatgcctagtctgtcttttaccgaagaagtaaatttctgcaagggtaaataataaaatgaaataaaataaatattattattacactattcagagcactaaaagaactactttttcctgattacagaggtaacttgcttttgtagaaacttttgaaaatagtttcataatcacttttgcacatcatcagggggtacataccattggaacctcctcttttaacaaatgaggaaactgaggcacacagcgattaaggaacttatgccaggtcagtacagaaaagtaaaaatattacccccaacaaattttaaaatcacccaaatccctgtttccagagataatcactggtaatatttgatgtctctttttcttacatgtatgtgtattttttcatacaaaaaacaggatcttatttgctttattagcttcacgttatattgcagtatttcactatgccattaattattgcacactttttttactggcttcgtggtattttttcatcatattgttatcataatttttttaatcaagcttatgttatgggataattatatttttatattatatactatgttgttatgaacaatcttgtagaataatctgtgcacatccatggtgatttctttaggatgaatttctagagatggatttt

SEQ ID NO: 212 - DNA, 4001 bp, Homo sapiens
ctttagggtcttcaggatcttcagaagtgccagcctcctcaggaagcaatctagaggggaagagattaaaaggcggcagacatatacaccaaaggcatcaagccaggactcaatatataggttctctctccccaccatgattttatcacctatgctgcttttttttttaattgtttttttgagacagggtctcactctgttgcccaggctggaatgcagtggcacaatcacagctcactgcagcctctacctccagggttcaagcggtcctcccacctcagcctcccgagtagctgggcctacaggtgtgcaccaccacacttggctaaattttgtatttttgtagagatggggttatgccatgttgcccagagtagtcttgaacttctgagctcaagtgatccacctgcctcggcctcccaaagtgctgggattacaggcatcagccaccacgcccggcctctgttttctttttcccatttttttccttcaagtcctaattcaccatccctgtgtccatttgctttttttttttttttttttttttttttttgagacagagtttcactcttgttgcccaagctcgggtgtaatggcacaatctcagctcactacaacctctgcctcccaggttcaagtgattctcctgcctcagcctcccgagtagctgggattacaggcatgtgccaccacacctggctaattttgtatttttagtagagacgggatttcaccgtgttggtcaggctggtctcaaactcctgacctcaggtgatccacccgcctcggccacccaaagtgctgggattacagccatgagccgccgcgccatcccctccgtccattcgtgaccacccctcccttctcccagccaccctcacacgtcctcacctagggaattcttcatcctgccattcctccttcagctccaactccccatgtctcagggctgctcctagttctggtgcttctgcaatctccctgaccctaagacagcccccaagaagaaaagatcaagggaactgaatagtaggtaagaataattgaaatgaagaacagtaattgagatacagagcagaggataggccttcaaaaggactcagatctcttgcctcctatacagatgcttctcttaccttcaccacttgctagaagcagattacctgctgttaagtttgggagcagacgaaagatggaatgtaaagttaatcatatttacctctgtagcagttgctccacctacaaagttggggtgagagatgtcccacattacaagtggctggaacccagctagacccacccagctatcattgagcaaagtcgggaagacggtacctagttaggcctgcctttcctccaccgagctggggagtggctaagggaaaacatggcataagtggaggggtggaggaagaaggtaaggagaaagatttgccagaacgagaacctggacctaaactcggttctggttcagctttcctgatggccattctggagggtgagggttagaaaataaaagaacacaggcagatttatcaggtacaacatattacagaaacttcctttatttttaaaccagggaattatcctggaatcctgttccccagttccataccatactgacatttcctacctaaaaccaccctcatctcttctctgcaaactctcttacagtcttgtctccttgaggaacccgagatttgacccagtaagagctgggtggtggggaagtctctccggactgtttattcactgttaccaatcaagtgagccaagatcttacttacccaacatctgtcttttttcctgcctcttgtatagttcccatcttcacaagtcttcctgcctccttctttaaacacctaggagttgttggggagctggttgtcccagcccccaacacttccttacctcttttctgtctcagctgttgtagctcttgcctccaaggagggaggtgtggaagggaggtaacctcatcttcaaaacaggttttgccactcctctccccaggagcaggtttgcccaaaagaaaaaccctgcctcctgtgagggggcgggttttggggaggagagtgcattttctagtgggggccagtctcggttgagtctaggaaggcaatttgttctcctttccagactccatatatccctctcaaagttgctctttacacaaataagcaaaaaaaccagtagaaaccgttgtgtttctggccgggcgtggtggctcacacctgtaatcccaacactttgggaggccaaggcaggcggatcacctgaggtcgggagtttgagaccagcctgaccaatgtggagaaaccccatctctactaaaaatccaaaaaaaaaaaaaaaaaaaaaaaaaaaaaaaaattatctgggcgtggtgacacatgcctataatcccagctacttgggaggctgaggcaggagaatcgcttgaacctgggaggcagaggttgtagtgggctgagattgtgccattgcactccagccagggcaaaaagagcaaaactccatctcaaaaaaaaaaaaaaaaagaaaaagaaaccattgtgtgtgtttctaggactgttatcttggatctacttttcaagcataaggaaaactggggaaacggaagtatgttataaggaggtttctgggagaataaacaagttgaacgggaggctgaggatgaggggagacagaagcctgttgctccttattcccaaaaagagtcaacagaaagaagacattaagtatagtaggaagaagggggatcaattttgaggagactgaaacaactatcacagagaaaggcctgaatacacttgtaaaaaaagacagtaagacccccaaacaggaaaaaattatttaatagtataacaaaatgcaaaataaagtacccaagttacaaaacataaattcctttggttcatgatcacaccactatttttaccttccacatagctacagacatcacaccctcaaagtgaagtcaaactgtccccctcatactgaagatgtcatgccaaaaccatcacataccccactgttcagtgaaactgttggcaacttacatggaacagagctgtggggtaggaaaaaggggaaagggttgcgttaaaaaaaatggggagactctacacatgcagaacaagttagtgggagggagtgctctgctgggtcaacacgccatgaaccacacccctattcgtgctacatgaggctgagtccttgctacaaccacacagaaatacagacaatcaagtgaacctgagcacccccagggataacagaagaaaaatacagagaagcagaggagagaaagaatggcagcaagaggcagatcacagaataccagggaacacctagtccaaaccctgttttacagatggggaaagtgagacctggagtagtgaagtgtcttgccaaaatacatagtttatgggagcattagaactccatgcttccttttaatgtgagcaaggaaaaaaagagattgacaagaaattgataggcctgctaaggcaggagacagacccaggcctctcattccagttctgttgtctttttggaagagtgcctatgaggtcattaaggcctttctgggtgttttcttgattctcaagagtcagggttctgggtggctctgggacagagggatccaaagaaacagccaggccacctgatcaggacagaagacaatggcctctaatctgttcccaaactagatctgaaacagtcacaataagctaagaatagaaattcagccatctctgaatcaaacaccatcacctaaatggtggcagaaagaaaagtcaccgagctgataatctgctgtaggctgaaaactggaataaatttccaaagcgcactctcttttctctctagcttgaggcaggtattcaataaatacttgaatgaacaagtgaataaatgaatacatggagaccatcgatgaatgttcagttccatgacagatactggttctgttcaagatccatgccgaggacact

SEQ ID NO: 213 - DNA, 4001 bp, Homo sapiens
cactgcactccagcttgggcaacaaagtgagactccatctcaaaaacaaaaacaaaaacaaaaacgctacgggtagtggctcacgcctgtaatcccagcattttgggaggctgaggcaggaggatcacctgaggtcaggagtttgagaccatcctggtcaacatggtgaaaccccatctctactaaaaatacaaaaaaatagctgggtgtggtggtgcatgcctgtaatcccagctactggggaggctgaggcagaagaatcgcttgaacccaggaggcggagatggcagtgagccgagatcgtgccattgcactgcagcctgggcaacaagagcgaaactccatctcaaaaaaaaaaaagaaaagaaaagaaaagaaaaaaaaggctatataaaggtttcttcatcatctgtaatcattttcttagttcttatcctcttttcactgctttagtggtttttaaaaacatttttcttttaaacaaatacaaatactactttttggaaatgaacaggctgtaaaaaagccaaacattccccccctcaagatgaaattcaaatgtgtccctgcctatatcccctgtcttgtccattaactcacttctcagtccagcgtctatgtctttgctcaggttcttctccctgcctgcagcacctatcctctcctttctggttaattttgtgctttcctttaaagatccaactagatcacttccctcataaagcccttcccgactagtctacaagtatctttcttctcccaagaacacctgtggcactgattcagcagtccattaagaacacagcctcatagtgtaatttcttttaatgtataggattgtttccaactcatcaggtctggtgcaattctgtcacgatttaacatggaacatccgggctgcccttcctgaatagtccagggcaagagcagtagtgagtgattcttctcttttctcgggttcactttgacctgaagcaagttgctatcttcggagagtatgtatggaccccaacagaatggggcccaggggtcttcatcccttacaaatcctggactgtatcaaagggaaggcctcggtaattcgtgctcacccagcccattcggatcctggtcctccctctcttggggttcagggggttcctagagttttcttgttcccacccaggcatggggggctagtgtccagctgagagttctctctccactgggcgggggtccgtgcctggatggccagcgcatggaccggacctcccagctcctcggccagcgctgcgtggaccagccggtgtcgttgtagggggctcagtccctcgaaacgagagctcaccacagccacgcggaagtgagtctcactgccaggcgggaccgcgtggccaccgctctcgttgcgaagctctagcacctcggggctcagggcctcctccaacttcgtgcgaatggcggcctccaccggaccgatggccccggatcccgcgctgccctggcacaaacaaacgcggccagccatggagaccagacccaggaccagccgcccactcagcatgggctacgccagagactcagacgccaggagtgagggtcggggcgatccgcctggtgagagcacaatgtcaacacccgccccgcgatccccgcatccgccctaaccccacgcccggacgtccacaccagctcctatagggagcccgccttgatgccacacggggagacccgagacaccgccccttttctctacgtgacgtggtgaattcgacctccagctgtggaagtgaagggacaagcgaagattagaaaggcccgcacgcgaggcgcgttcgttccttaggggatttgcaaagaatgggcaaaagtagggcatgtgcaactgcgtacttgtggttgggccgaagcccctgtgttccctgtgaagccccggagacgccccttctacctgccgctcagcctcggccactgcgattcccgctcagggccaggactctggacgctccggagcaaaatgcagtcctggcgcccttcctgaggcacgctgggaaatggagtcctcgctgcgcgttggtagcacgggcaggcaccacgtggtgccctgagggctcatgggaactgtagtctcggattctccccactggtaaggtggtcagaaagtctgaacccagcaatgcaaagaaaaagggaattcacgcgcagttgggattgggattattagatctattttactgccaatagatcttgtagatcatccagcccaactcctttattttatatgcaagaaaatggaagtctgattgaatacataattactgtgccccagactagtgctggggactggggagtcaagtcaggccctgttttcaaggagacaacagagcactgaagactaacaagtgagcggacaattgcaatactgggtactaggtgctacgatgagataaacacaggatgctaaggaggcaagttacccagacttggccggggttggagaggtggaatgggaggcgggcagagaatatttccgagatttagggaaacagttcagcagaaacaacatgagaatccatttctcagtccctcatagtgaggttttggctttggtagctgcatgtgtaaaggacaggaggagagagaattttgagggagtctttccttctggtgtagttagggtgtggttatgtgtggttggagcctagggggcagctgatggtgatgagtagggtaccaggaggagaggaacgggccagaccaccccaggccttgtagcccttgttaggcaattttgtctttatcctagaagtagtgggaagctactgaggttttaagcagggatgtaacaggatgtaatttttccaggatgattcttaacttgtaaaattatttaaattttattttgtatccttaatatatttacatatttctaaatgtttttccccaacttctcattttgaaaaatgtcaaagccacagaaaagttgaatagttcaaagcaacaccctctacctttcacttgacccaccattttttgcatttatatttattttatacttgtacatatatactcatatatttaagtactttacatatactttaaaatatatttatatgcttttttggatgaaccatttgaaagtaagttgcagatagcatgacatttcacccctaactactccaatatgtatctcctaagaacaaagatattctcatacataaccacaataaccttatcacactcaagaaatttaaactatgacatacactgttttccctagcctttaaaaaaaattaaaacttccagaaaatttgcaagattaatacaatgagcaacccatttatccactcttcacctaggttcactgataagattttgccagacttggctttgtatctcttttaatgtatgtgtgtataataataatgaaataataataattatttctgctgaatcacttgagttaggtgcagaaatcttatttatttatttttttttgagatggagttttgctcttcttgcccaggctggagtgcaatggcgtgatcttggctcactgcaacctctgcctcctgggttcaagcaagtctcctgcctcagcctcctgattagctgggattacaggcatgtgccaacatgcccggctaattttgtatttttagtagagacggggtttctccatgttgatcaggctggtctggaactcccaacctcaggtgatccaccctcctcggccacccaggattacagggattacaggcgtgagccactgcgcctggcccaaaattctttttttttttttttttaaacagagtctcactctgttgcccagactggagtgcagtggcgccatcttggcccactgcaacctccaccttctgggttcaagtgattctcctgcctcagcctcctgagtagctgggactacaggctggtgccaccatacctggctaaatttttttgcatttctagtagagatggggtttcaccatgttggccaggctggtctggaactcctgacc

SEQ ID NO: 214 - DNA, 4001 bp, Homo sapiens
tattttatttttaattaattaattaatttatttattttttgagacagagtttttgctcttgttgcccaggctggagtgcaatggcgagatcttggctcaccgcaacctctgcctcccgggtttaagcgattctcctgcctcagcctcccgagtagctgggattacaggcaagcatctccacacctggctaattttgtatttttagtagagacagggtttctccatgttggtcaggctggtctcgaacttccgacctcatggcctgcctaagcctcccaaagtgctaggattacaggcgtgagccaccgcgccgggccatgattgtttatttttaagattggcatagaaaagaaaatttggcagggcacggtggctcacacctgtaatcccagcactttgggaggccaaggcaggtgaatcacctgaagttaggagttcaagactagcctggccaacatggtgaaaccccatctctactaaaaatacaaaaattaaccaggcatagtaatacaaaaattactcaggaggctgaggcaggaaaattgcttgaacataggaggcagaggttgtggtgagccgagatcgcgccactgcagtccagcctgggcgacagagactccgactcaaaaaaaaaaaaaaaaaaaaaaattgtcgctgaatgcagtggctcacacccgtaatcctagaactttttgggaggccaaggctggtgtattgcttgagctcaggagttcgagaccagcctgggcaacatggcaaaacctcgtctctacaaaaaaatgcaaaaattagatggtgtggtggcacatgcctgtagtcccagctgctcgggaggctgaggtgggagaatcaccagaccctgggaggtcaaggttgcagtgagacataatggcaccactgtactccagcctgggggacagagctagaacctgtcttaaaaaaaaaaaaaaaagaaagaaagaaaggctgggcgcggtggctcacgcctgtaatcccagcactttgggaggccgagacgggcagatcacgaggtcaggagatcgaaaccatcctgactaacacggtgaaaccccgtctctactaaaaatacaaaaaaaattagccaggcttggtggtgggcgcctgtagtcccagctactcgggaggctgaggcaggagaatggcgtgaacctgggaggtggagcttgcagtgagccgagattgcaccactgcactcaagcctgggcgacagagcgagactccgtctcgaaaaaaaaaaaaaaaaaaaaaaaagaaggaggaggaaggaggaggaagaagaagaagaaaaaagaagaaagaagaagagtttgtcctttgtccagtttgcaagggtgtgagggaacatgttcctgagcattgttggcaaagcggtgaaccctcttaggagagttttgagaaccttaataaaagtataaagtacgtatcttttgaaccaacaattatatttacagagaaatccaaataaatcacgcaaacctataaatatgtagaaatggcagttggaagaatatttgctgtttaaagaaatttaattttaggtaccaagcagtttctaaatttgggtgcatcaacaaactcaatgtctaggtttgtcttgtttctacagtatatggctataaaaaccttccggatcacgaaaataaaagcacagataaacaattaaaatatcgacactcaagagtccaagtcggaagttagaatatctggagaagcaatctgattcacataaacctttttcgttttatttttttaacataaatcctatctacctggctcttgccctgaccggccggagagaaacggtgacaaacctggaacaacgttggaccaaagacacttcaggaggagcaaaagcgcgttatcgtagacccaggtccctcgttgtgtccagtaccgagctttggcactgtcaataagtcttttgagaaggatggcatccctacctcagctactgagcatgcgggaaactgcgcgcaagcgcacaacagcgatttcacactgcctctttagactcctgatccgcgggaaaattccacttgtccgtgttttctccaagctctccgtaggtgcaagtcacctgttgcattaaataaaagcgaaagatgtgtcaactttcaaagattggctaaaaaaagaaaaagaagaaggaaagaacacattaagccagcaacagtgtgttgaaacaaaaaaaagattggttttggtttcagctgtcttccagcccacttcgtagagttcactgttttaaaatgttctttgtattagtgataccactctgcggctatttaacttcgaacccctagcggtccgtggacaggcttcagcaggtccaccacacacacctccacctcccactccccacgcaataacacagcaactttatgcagaattgtgtcaaagatgcttgcttacctttttttttttttttttttttttttttttaagcgatagatagcttgctctgtcgcccagagtcgattacggctcactgctgccttcccacttctaggctcaagccatcctcccgcctcagccttccgtgtagctgggactactggtggaggtgcgcgccaccacacccagctaattaaaatattttttgtgtacagatgggatcttttactggggggcgtggttggggaagggggcagtgtctcatcctgtcgcccaggctggagtgcagtggcgcagtctaggttcactacaacctcctcctcctgggttcaagcgatccttcctccttagcctcccaagtagctaggactacaggcgcgccaccacgccgggctaattttgtttgttttttaagtagagacggggtttcatcatattggccaggctggtcttgaactcctgaccccaggtgatctgctcacctcggcctcccaaagtgctgggattacaggtgtgagccactgcgcccagcttaaaaaggcttttacgtcttcatttgattttcacaataactctgtgagttaagtagaccctttttgggaagtggaaaaatatacataacttaaattatattactttaaccatatatatatatatatatatatatatatatatatatatacacacacacacacacacacatatatacatatatatattttttgagacggcgtcttactctgtcgcccaggctggagtgcaatggcttgatctcggctcactgcaacctctgcctcccagggttcaagctattctcctgcttcagcctcctgagtaactgggactacaggcgcacaccacccagcccagctagtttttgcattttttttttttttagtaaagacggggtttcaccatgttggccaggctggtctcgaactcctgacctcatgatccgcccgcctcggcctcccaaagtgctgagattacaggcatgagccactgcacctggccatactttggtttttataattaaattgtataattacatgacaagtacaaatggcttaaataaagacaaacataatgcaaggtaagctcaacaagtgagaatagaaatctgcagtcatcctaaagagtagccatctcccaagtgttcattgtatcctctcataggttttacgagaaaacggcatagttgaattcagcaagttatgtagaggttggttaggagagtttctatgtaaatatatctttgtgctcctggaagactatagctgtgatagatcccagatgtgaaaccgtgggtcaaagatgaagtgcattttattttattttttggagatggagtctcgctctgtcgcccaggctggtgtgcagtggcctgatttctcactgcaacctgtgcctcctgagttcaagcgattcttctgcctcagcctccagagtagctgggattacaggcgcctgccaccactcccggctaattttttgtatttttagtagagacgggatttcaccatgttggccaggttggccaggctggtctcgaactcctgaactcaggtgatccacttgcctcagcc

SEQ ID NO: 215 - DNA, 4001 bp, Homo sapiens
taaaaatacaaaaatttgccaggtgtggtgtcacatgcctgtagtcccagctacttgggaggctgaggcaggagaattgcttgaatcccggagggggaggttgcagtgagctgagatcatgccactgtactctagcctgggcaacagagggagactctgtctcaaaaaacaaaacaaaacaaacaaaaaaaacaggtaggagaagaaaatgctaagtaaaaaaaaaaatgtatcatgagcagatgaaatctaatgtcaagaattcaatgttacatagtaaccactcattacaactgttcaaaaacaatgtatcataaatgataatgaaaagttcagttcactttgttgaagacaatcacacaatagtgtagcatccccttgttacatcagtctatggttgaatgaataaattgcctgaaaaccacgtctcttgcccactcaataactctcaaaataaccttgggaactctgaaaagaatctttttcttgctgtcacccaggctggaatgcagtggcatgaacttggctcactggaacctctgcctcccaggttcaagcgattctcctgcctcagcctcccaagaagctgggattacaggcacccgccatcatacctggctaatttttgtatttttagtagagacggggtttcaccatattggccgggctggtcttgaactcctgggctcaagcaatcctcctgcctcagcctcccaaagagctgggattacaggcgtgagccacaacacccagctgacaaatttttgaattccctcagtgattactaactgtaatcagttattaaattgtgttgccctaagtgcatacttcaatctcaggaaacagcacagcatagaactaaagagcttggattctggaggtcaaaagtaacctggcccttgatgagcttatacactaattccaaatcctacaccatcaaatgagcagtctccagtccaagggagaaaatagtttctgcaaacttagatcaggcttcaatttgggccagaggtaattcatagaaatgatttacaatgttggggtggagggaggggggagggatagcattaggagaaatatctaatgtaaatgatgagttaatgggtgcagcacaccaacacggcacatgtatacatatgtaacaaacctgcacgttgtgcacatgtaccctagaacttaaagtataataataaagaaaaaaagaaatgaattacaatattccttacaatgactcaatcttctcatttgcttctcccttcagtctaaggatgaggcactttttctatctagaactcttttcccagggactctagataacactcccccatcacccctggaaggcccttggtccctctttttttttttttttttttttggagatgggtctcactacgttacccaggctggtcttgaactcctgggctcaagcactcctccgcctgcctcaagctccccaagtgctacgatcacaggcatgaaccgttgtgctggtttatcttttctgtatcttcaacagatggcctggtccatcttttctgtatcttcgacatttatctactagcttccctccatataaactttgtcagtctcctttaaaattcttcccttaatcctatcattttcttatggcctcaatcttttcttccatacctcatcccagagcattttccacctttcttctcttactgaagcggactcatagcattcagccgaagagcccctttctggccagtgcacctgccagactgcagaggaagccagagagcttcaattaagcccttcagcatgatcctgtggcctctctctccacccactgtctttacagcctacatcacacttggcttttcccccaacattcctctaaaactccccttacactaagattaacacttaccatgctaaattgttaaatctaatgaattatttttgactcttaacttgacctcccaggaacatctgcactgaactattatgattcttaaaatgctcttctggtttccaggataccattttccaaattctatttgttcatttattgaatatgtactaacataaagcacctacaaatggtgccaaagcattgagttagaatttggggatacagtctctttgcagagttttttgtattttttatagagatagggtctcactatattgcccaggctggtctcaaactcctgaactcaggcgatcctctgaccttggcctcccaaagtgctgagattacaggcatgagccactgcgcctggctaattttttttgtatttttagtagagatggggtttcgccatgttggccaggcttgtcttgaactcctggctgcccaactcaacttgccaaagtgctgggattacaggcctgagccacctcaccttccccactttggagtctcactctgtcgcccaggctggagtgcagtggtgtgatctcagctcactgcaacctccgcccctccaggtttaagcaattctctgcttcaccctctggagtagctgggattacaggcgcgtgccaccacgcccggctaatttttttgtatttttagtagagacggggtttcaccatgttggccaggctggtcttcaactcctgactcccaaagtgctgggattacaggcgtgagccaccgcgcccagccttttttttctttttttttaattccatctatacacgcccccccgccaccctgccgccccgccttatgccaatctcagccacttcaaagtatcaaatacatgggcacaaatgactgctgaatataatttaaatattcgagatacttactgttttcctattctccatccaataaaccactgcttttattcaatcactagtcaccacataaattatgcaatggtgttgcttaagatcatacagttcaactcactgtccttcatgctatacaaacccctttataatctgcccccttactagactcatctcttgctacttcaccaattcccaacacggtcagcgacagtgaggcagggtatctgtagtactagctagccagtaggcttaggcagaagaatcgcttgaggtcagttcaggctgtagttggccatgacagtgcctgtcaatactccaacctgggcaacacagcaggaccatctctttttttttttttgagacggagtctcactgtcatccaggctagagtgcagtggcccgatctcagctcactgccacatccacttcctcctgggttcaagccattctcctgcctcagcctcccaactagctaggactacaggcacccaccaccatgcccggctaatttttctatttttagtagagatggggtttcgccatgtcggccaggctggtctcaaactcctgacctcaggtgatccacccgcctcggcctcctaagtgctgggattacaggcgtgagcgactcaggcgatcctctgagatcgcccagccatagcagctatctgtattaaaaaaaaaaaaaaaaaaaaaaaagcaattatccactgtcacatcctactcggtgtacatacatccatgcctttgagaaacttctctttacctgaacttccctcctcactttttagtctaacttctatttgtccctcaagatcaagacgagttatcacttctgcccaagagcctctctcattccctcccatccacccaggcctttcccttgagtcccaaagtccctgtacatacctctttcttttttggggggagcggggagacggagtctcactctgtcgcccaggctggagtgcactggcgtgatctcggcgcactgcaacttccgcctcctgggttcaagcgattctcctgcctcagcctcccgagtagctgggactacaggcgcctgccatcacacccagctaatttttgtatttttggtagagatgggcatttcattatgttggccaggctggtcttgaactcctgacctcaggtgatccacttgcctcggcctccgaaagtgctgagattacaggggcgagccactgcacccggcctcctctatcttaatt

SEQ ID NO: 216 - DNA, 4001 bp, Homo sapiens
tactgttttcctattctccatccaataaaccactgcttttattcaatcactagtcaccacataaattatgcaatggtgttgcttaagatcatacagttcaactcactgtccttcatgctatacaaacccctttataatctgcccccttactagactcatctcttgctacttcaccaattcccaacacggtcagcgacagtgaggcagggtatctgtagtactagctagccagtaggcttaggcagaagaatcgcttgaggtcagttcaggctgtagttggccatgacagtgcctgtcaatactccaacctgggcaacacagcaggaccatctctttttttttttttgagacggagtctcactgtcatccaggctagagtgcagtggcccgatctcagctcactgccacatccacttcctcctgggttcaagccattctcctgcctcagcctcccaactagctaggactacaggcacccaccaccatgcccggctaatttttctatttttagtagagatggggtttcgccatgtcggccaggctggtctcaaactcctgacctcaggtgatccacccgcctcggcctcctaagtgctgggattacaggcgtgagcgactcaggcgatcctctgagatcgcccagccatagcagctatctgtattaaaaaaaaaaaaaaaaaaaaaaaagcaattatccactgtcacatcctactcggtgtacatacatccatgcctttgagaaacttctctttacctgaacttccctcctcactttttagtctaacttctatttgtccctcaagatcaagacgagttatcacttctgcccaagagcctctctcattccctcccatccacccaggcctttcccttgagtcccaaagtccctgtacatacctctttcttttttggggggagcggggagacggagtctcactctgtcgcccaggctggagtgcactggcgtgatctcggcgcactgcaacttccgcctcctgggttcaagcgattctcctgcctcagcctcccgagtagctgggactacaggcgcctgccatcacacccagctaatttttgtatttttggtagagatgggcatttcattatgttggccaggctggtcttgaactcctgacctcaggtgatccacttgcctcggcctccgaaagtgctgagattacaggggcgagccactgcacccggcctcctctatcttaattcttaatacaggccagcgcgccttgaagtaaagcccaccacaatcctgcagtacccaaaagagggttcagacgttccaggggcttaataaagttaattgaataaataaatgaagcaagaacccgaacttccccgtcccaaatgaccacttgcagaataaacacaaaatgccagctaaagctaaacgctccgtactttctcctgcatttccaaaattacagtacaggcagcagcgatccacaccagtccaagacctaagaggaactacaaagaccatgagtatttttcaaaatgggaggaggcagttggacaactggacctcccactccctcgccccaacctcctccttcccagccctcccttgaagaaaaaccagacatttaggggaaaagagggagagagagaaaaagatcccttgggggcaacgagcctgaagttggtaaggccaaagggaagcgactggcaactcacctgggctgcaggcacgaagcggggtggccttctcaactgcccggactgtcgcacgatgttgatggggtcggggaggggagaggggggaaaaaacggttgttcccacccaaggccgcacctcggggccggcctaaggcagcaccccctgtggagggtacattacctgtatgttacctgtatattacaaaaccgaccttatgtgattgcccctttcaggctgcacaaaatgaagcggtgcagggcaacagttctccgcagttcctcgccgccagtttttgttgtaatggcggtcgcgcgacaggcgcttttatagaagaccccccgcgggcggcctgcccattggtctgaacctgtcacgtgaccacacccagccccgggcggtgcaaaaaaggtgtaggagtctgagccgggcagctcaggcctgttagggcaggcagagtgggttcgggtgattgccgtgtagagagccgggggttaggagtaggagcgctacactcaaggcgtttgctgttaacacgacgttttcactaatcagttagcctagtagaggttcttgagttttggcttctgatgttttcgtggttttcacgcttttttccccagccttctccacagttcctgtctcttgcacgtagtgagtgcttgatcaatattaggtagcagctgaggctagagacatactctctttgggtttaaagtggcaatttaagagctgtttcgcaacagctgcgtactgatgagtgcgtgatttaggattttgagtcttcgcaactacctcttgatggtttgcagatactttagaggtgctaacatgtatcagaagaatatatttagtacagtagtttcccttaggatcaaatagcaaacaacgcttctgaattcctaatactcattcgcagtggatggatgggaaggggagggcaaaaacagctgacaagctgctcgcaaatccggccaaaaaaccatcgatctccagtttcctgaagcggaagtctgggggccattaacagcttgacacgtcttaattcaatcactttgatgtggcaggaaagaaccaagtgttcacaagaaagcaacgcacttgatctacttactagacgtcacataaatacctggattggcaagcactttttgtttagatttaattttcgtgttcttgtttttgctgtttaaagtagtattaatggtgtggctgcaggcgcctgcaatgcccgttactggggaggttaaagcggaaggctcacttaatcccaaggtttcaaggccagccagagcaacaacgtgaaactctaatagattagagattagatatagagattatcttattgttcaggaaaagagtagatgggtacagacttagggtgtgactctcacatcatgaaaaatctgaaagaagtcaagggaaatgaaagagaggaatgactcagtacaaattttgccccaactatcaactttttgaccttcctcttgagaattagtggcagggagacatgtacactctaggtaaagaagattgagtgatttttttgagattgagtcttgctctgtggcccaggctggaatgaagcaatgcaatcataactcaaggtagtctcgaactcctgagctcaagcatcctcctacctcagcctctccaggtactgtaggtgcagaccaccacattgccttctgaaccatcttttaaaaagcttaatctcaggctgggctcggtggttcatgcctgtaatcccagcactttgggaggctgggggtgggggtgggaaggggtggatcactaggtcaggagttcgagaccagcctgaccaacatggtgaaaccctgtctctactaaaaatacaaaaattagctgggcgtggtggcacgggtctgtaatcccagctactcaggagtctgaggcaggagcatcgcttgaacctgggaggtggaggttgcagtgagccgagatcgtgccactgcactccagcctgggcaacagggcgagactgcatctcaaacaaacaaacaaaaagctaaatctcatcatgttaccacccttaaaacctttcaattactttccattatttttaggataaaaagcaaaccccttaagatgagctaaaaagtcctacatgccttcagctccaactacaccttcagtagtgcccccatcttcagccagtgacctttcagctctttccaggaccctatcctttgtctctgggcttctacaattggctctttcatccttcctccgatcccacactgattcctcaactctcaggctgaagtcatttcctcaagggggcctccactggattaggtcttcctgttaa

SEQ ID NO: 217 - DNA, 4001 bp, Homo sapiens
tctgggagacaaagccagctccatttttggtgaagaggggaagtaagagtcaagaatgctcctgtcttctccatggctgcagcccagctgtcaaacactttggcgccagctgacctccagaaggggagactatggtgtgacatttgcttcctttatctcaaatatttcacaatatacatgctctgtgccttttcaaattatatcctcctcaaagaagcaaggcatgcatcttttcctagagtaggcagcagctctgatattgataagacaggatcattgtggcagcatgtctcggtcatgccctcagtgctgcaaagcaacttattctgggtgaagggggactccagagggtcatgccttaaacaaataacatacacacaactgtgtgagtcaggagggaaagcacacaaactccagcatcactttgctgttgcctgatgtcatcagactgccccccgggggatttggtatactttagttgcttggttaatactggcattgcatgtattttagcgagcatggtcagagagagtcacttcaacatgcacatgtctggagaaggacagaagcagaaatacttgacttataatataccttttatccctctgattggtctatgctgacataacaatgtccctgctgaataaggcctagattacccaactataagcttgaccttttataattgttatccttttaacaaaacatttgtttctgctcatagcaccctgctcctagggctgcaaagagcacacacacaattctttacagaggggtctgttcaatcacattacagtgcattagcttgaacattggttaacatttggcttaggtctatataccctggataaatatgtaccatgcagagggactgcttggtgaggagaagagtcctctgggctggaacaacagctcacaagttcgtgttcctactaggcaggaacactccaggcatccgtgatttggacagggtgctggacatgcttggttcttctgtgggcagcctgtttcctgcatacagctgtgagcacaagcacacatacatacacacaccacaggcagcattcgacagtgtacccagatgatcacaaaaacagagacagagatctgctagatgataccagcacatcccacctttcagcacagcaatgttcttccctagtgtctccagtgctctgccaggctcaagtcaatcaatggggcttctgccaccaccctggggagactatttgcaacctacagggttcactgtttggaattttattttcctgactgcatgtgcatgggaaacatgccatagggctctatgagcacgataatatagatatcgtgcattgtaacctcagctctttgggctccttcccaaacataatgaacctcccagcgtcagctgggcaggcaaaagtcctcgtcatcttctgcaattatgcagccctattgaattttctgaagctaataggagttgcactaactttgaggacttaaaccaggcaaaagcaatataggtcaggcagggagcccaaaccctctgacagccatgcaacaccaggaggcaataccagagcaatctctagctcaaccccaaagtccattgctcaactccacaagacagaaactaggagaggtggcatcattccctctgcctgccactgccaggcaccagggcaagagggttgtatgagagcaaaatggtccctttaccaacggacacaccaaaaaggacaatgaaaaggggagaaaaatcaccgaaaccctgcactgttaccttgaatccttgcaagagccctccttgctgtatcagctgctccccaaaccttcaacgactgggaggagactcctaaaagattccaggtttttgtgcaacatctccagtggcagctttccaaagtttttacttcatgatttcttgtggttctttctcatttggggaaacgcgaatgcctccccctcagcgtgtgagagggagcggatgtctcttttcaaattctcttgctccccgctttactgtcggtgccgccgccgccgccaccgccaccgccgccaacgttagaccacttgcctgctgccttcccgctgagcagccaggatcccggtctcccagagcatctttgaagtggggcttcggcactgggccggggcgcacgcggggtgggagaggtaagggaagtgcaagacccaactgggggagtcccctgtccctccgccgaggagaaacccaagattttgccttctttccaactctaaagagactcacccacccgctctctcacccgaaatcactgccttgcacatgggcagagacaggtcttccggcttcaccgctccctcggctgcctgcagacctgccactgacctcggagcgcacggcaggtgcacatccccgggcaagtcctaatgggatcctccgagctcagcgtaagcgctgccagcgcagcggcgagcagcttgcgaggcaggcggattgcatcccagagctgcagcccggcgcgtccccgctccgactccgcgctccgtacctaagcagtgtcacctgcagactcagacaccagatgagtgtcttaagataacaatgctgccctgcctgcctctctctttctttcttatgcatgtaggttggcagccaatgggacacagcgccacactccccacaggtgcccattggctgggcggcttggcagggggcgggctctgagcctcaccgctctctcctttggtgagctggcaggctggggtaccagctctgttaaccctcccagcgttgcagtggggactttttggtgtgtataaggaagccttgggtacattcacgggtggggcgttggacactcttaaaaaggctggggaacaagaagtagctggggagctaattacattttcttctaatcttcctgagttacaataatcatttatcccagcccattttgtttgcttgcttaactagaactcccagagattgggacccatctgagccattttccatctaatttgaggtttcatttggttgttttgtgcattttttagcctcttggattacttaattagaaatgagcccccaagtgagaaatagtacacacacacacacacacacacacacacacacacaccccagagacccaagaggagagagaggcaaaagagagcaagaacccagtaagatggctagagagtgaaacagatttagaggccaggacagctaaatcaggaaacattctgcccccacaccaggactgtaaggacaaaggcaaagaggagaacttcaggtttctggggagagattaagtttcaaaaatgtccctccaaaaaagggaattgttttgcctgtggtgttttccctctgtgtgtctcctttcacttctgtgtgtgtcaggaagagggactgtgcatctccgtttagtttttaaaggaagactagagaaatcagaacaggaccagccttgtttctgtgaagcaggtgctgttgctgggcctgtgaattgaaagagagggagggaggaaaaaagggagggaggtggagggaaaagggaggaaaggagaagggaagaaaatattaactttacattgaagtgtgaagtatatatttttgatatcctaatgagggtacaaaactgaaacatgtcccgctaactagcatactaaactagattttggcaggagcataggaaaaagagtaatagttgaagaaaaatccaattcaagggaagagctgggggctggagctggggaaggaacttgggagatccatgctaagtcatgtggtgggggaagtatgaagaagataaatatatagtcagaaagcgagaggagtctttcaatttagtttccttaaatggagagcaacatcggagattattttgtaaagaactagaaaaaaaaagtatgtagagatttaatgaatgtgtaagaagtacacatggagattagctaaactgcatcaagtagccgtaagttctgaatgaataaagaaaaattagaaattttcttcattcatcccctcagactca

SEQ ID NO: 218 - DNA, 4001 bp, Homo sapiens
gcgttgccgtgagctgcggagaaatctccacgcagagtcgcctgttgataaccctccagttaaaacgttcttggcagcgggagcccctcagatgtaaatttccctttcacacgcttgagcttcaggtataatacagcaaaacgcacttacctaaatactgactgtctgttccttactggatctgactgtactgaaagttttttttttctttttcttttttttttcctccctccacccttgcgcaacaacagcagtcctccaaagagaatgtttgaattgaattatatgaagccctcctttcttcaaatgaagtcacggactctgatggcactggcttgtcaggcaggacgaccggactgggaaagagaccaggtagaaactagtgacctagtgacgggtgaggggcgccaagtggtgcggaccacagtctcaacccccgttccctctcggtgggagtcaagggggaaaagcccttgaatcccgagacggggggatggggcgacgctgcagctggagtacttttatgtctgggagctaaaagggcttttgaatttaaaaaaacattgcttgggttgtcgcgtcagccatcaatgacgacaagaatagttatttcccagaaattaaaaaaaaaaaaaaggaaaagaaaagcgtgaacaataggttcttacctccatgtatcccaagaaaaggaaatgttgtagagaccaggaacttgtccttaatttgagggcggggggcggatgttcagagaaaaccctcagtgggtgttaaaaattaccgatacatgcaggtttggcatttaatgaatatcgtgctttcctcattatgtgtcaattgtgaagtaaaagtaaagattaaaatgtttctcaacacaactatacggaagaggaggtgataatcttgtcagttaagtccatagaaatgttcataaaagcaaaaggcactgaccatattaacatgcctattaaacacaagggttgggggcagacaagtatgaagagtgaggcaattaaatttttcatgtaaagtctattcttgaatttcaatttatcagaaccaagataatcaggggtttcttctgattgctcctctctgaaatgagtactctgtgtccaattaactgttcaccagctaattcacaaaatcagaaatgtactgacaaatactatgcctgaattaaaatacaatgcctaaaataacgtgcttatgtgtgatttgaaatattttaagaaaaaaaaatggtgccctcaaaactcacagtcctcttcctaccattcagtggcattttagtgcttaaggtcttgctaaattcataaaaatacactttgcaacaaagtcttccttcagtcatgtaattgcttatcatgaacaaatgctgacctgaacaaccttctgaatatccgactagcgaactttccagaccttgcaattgtcagaaggtctcttttaagctctctcttagataaacctataaaatgtgacatttcaaatggcacaggaatgtgtgccaagaagggttaatgggggtgggggcgattaatgtccgtgtaacccataatataaatgaggacaaatattttaaaaataaagaaggtaaaagatattggggtaatacatgggatattggggtaatacattacatgggttatgtcttagcagtgcagttgccactaacatactaattaataaatatggccatatggatctttcagttctgaaagtaacaaaaatgtgaaaaatgaaatacttcaacaaaacagagcttattaaaaatagcaatagttaagtttctagtaacagataaagagaataacttaccagaggaaatttcaggaagcaagaagactgtgagaaaaatacatccaggattcaaatagatattccatgatcttccaaatcaaggtaaagtagtgagctgcagggtagtaggactttaaaataatcagcagttcctggtggcatgtaaccaagtaaaaaccagttacacagagagccacgaacccccaaggcaagaaagcagaatgtgaaaatgctttatatgggggggtggggaatggtggggggtgattcgtggtgatccttaagcaaagtgaaaatttacaggctgcacatccccatacagtggggaaaggcagaagctgtgtaaccccagagaacaggaggtggaatacagataaatctgcaaagagaagtaaaaggatgtgttgaagacaacgagataaagagagaactagtgagcaaggctgtagtcatcctgatagatatagcagcaagaatgatttaggctgctggggaggatccaatgagaattcaagagggcaccacttcggaaatcctgctctgatcttcccactctcagttctttaagagttacctgcgttgggaccattatcattaggattaatagtattccatcagtgcatttcactagtatttcccttgaacattttcacttgcagcaactgagggaggcgtagtaaggaagcccaacacaaccaattcccccactccccaaataaaccactacgaccggtcacattacgatgaccaaatcatcagcgatttgcacgaggcggtggggggtggggggtgcgggcggtgatcgaagggctgaagatgcggaggaggccgagtcgctaggcgctttcgggggcgctgtgccggtgaggcttaggcaaggggacggggaaccgtggttagatgcagcagcggcggcagcagccctcccaggtcccacttctttggcgttcctgctgcctgtgactcaagacaattgacttccacctgaaccctcagctccgaacgccttgcattagaagctagagctttggaggttctgaggacggtccctggggagcaagtggtaggtttcgaggcgcccgcttcccctctgattcctgcagtaactgagagagagtgtgccagaaatggctttgctgccgaatgcattatcttgccattttcgtgtcccaatactgaacaaacgatcgcctgatcgatcggtaagattagctttattccttctccctattcctctccttggccccattccctctgcaagtccaaaccccagtctctctctctctctctctctccctccctctctctctctctctctctctctccaggaacttcttcctctttgaaaccggtttcccaagggaactgcctgtgtgactgagaggctagtaatctgtttgtagatgatttatattttggctgcagaatgaatccccctccctactcggagtactctccttagagatgatcccccgccccctccccatgggttcgctctcagagctgggatctgtataaagagcgctgtgggagtcttttgccctccgctctagctctatcttcctccggaccccgaagcttaagaattatccgcctcactctcttttttagaaataggagggaaaggtagagtggaaattgatttcttgcagagactgaggcgctgaatgatagagggaataaacatttgccctggataaaaatgttcttggtaagtaatcttattttctgcggttgaaaaagaaacagattgcttctcactgccccatcccccactccattcatttatttgctctctgtatgtaaatcacgagctgggtcagtggaaatttttttttcctcttccctaggagagtagtagcttgtaagggtgaaattgaagtagagggttttaaggagacaatatgaacgctttaaggtcctttatatcctgcattaaaaactcaaagacagataaagcagttaaatccctgtttgtttccaaaagtggtatttaagtatttcccttatttcctactaactgtctttcctttctgaaaataaagaaaagagttttaggtagtgggctcatgtctatgcttttagtatgtcttggccatgttctgaaatacaatttcagttccaaaattaagaatggttatttttcacatttcgcaggtatattaaagctatagaaaccacttattaaatgtgcatctcgg

SEQ ID NO: 219 - DNA, 4001 bp, Homo sapiens
agtgagatgccaacttaaaaaaaaaattaagttccatgccttctacttaaaaaaaaaaaaacgcgcggtggctcacgcctgtaatcccagcactttgggaggccgaggcgggcagatcacaaggtcaggagatcgagaccatcctggctaacacggtgactctactaaaagtacaaaaaaaaaattagccgggcatggtggcggtcgcctgtagtcccagctacttgggaggctgaggcaggagaacccaggaggcggagcttgcagtgagccgagatggcaccactgcactccagcctgggcgacagagggagactccgtctcaaaaaaaaaaaaaaaaaaaagcagcatgtcttgtctaaatgtccttgggtaggtagtgcagcagataataaggagaaagcccaggcgaagacctaaacatggcaattagattccaggaagtaactgagaaaaaattctgataaggttcatttaatttgaaggcactaaaaaattctgacaatcgacttttcctagtattagaaaataatggtggctgtacagtgtatgaaatgcctacattaagtgcttcctttatgctatttattcatgacaaagctggttttgaggagcaccacatacttaatgaatagagaatacagtgtgtacccaacgaaaaactgagcaggtttatttaggactcaaaacatttaacgagttatttcagaaaatatcatcttctacacatcttccatataaattccgatagcctaatacagcatctatgtgcctacaaataatatcacactcagcacttgaggctgcgaaatcttccacaaatacttcttttaatgcggcctcctacttcctggatgaaaatgtctgaagttttgcgaatctttacttcaggaaagaagagggtttctgcccctgccccatcttctccccttctgcgacccggcggtcttcagttttcgggagttcctagggtgggatagaagaacgacacacccacccgcagggacaagggtgcctttagagccaccaatacaacattcggatcgaagctgtaagctaacacacttccacaagaggactcccgctcctaacaagggacccccaccccggaagccccgagtccccagaggaacctacctgagcgccgcccccgagctctgagcgcccacttcctgtttaccacccagcctcttcctcccgtgcccagtcccgttcgaggcagcgggcggcgaccgtgcgcacgcgccaacacttgagttcccctctttccaaacaggcatttttgtggaaagccgatactgtcaacccgggagaggtggccagacaacggccgaacgaaccccagtttagcttgtattataagctctccaatgaccaatggagatgcggggcaaggggattcagcggatctagctgttaatgccactgatttgtggtgaccaatatggattttctttctgtcgtttgtttcaaggcactagaaggagacttttggtccactgtccaggggtctatggagactaatgtaaaagggggtgatcctattgcttgagactccggggaagtagcgggggatattactgagaaacacccatcctctgacatacttaccaaatttctcagagtcggttcagcagttcttctaagggaagaagggcaatatatcggagtccacaagcgagaaaaagagggagtcggagaaccgagactacagaaccagggtgacggaaaaccaggacggcgccaagccggagtcacgtgacccggcggccatgatagctaccgaggcggtagtgcgcgcagctcaggggcgggtattgccgcggcgttgcagtcccctcaaaacgcttcgttcatcatccctttctaacttctccctcggccttccttttgagctatggtctttttcccagacaggaagagaagagttgcccctacctccggagccgagggagaatgccgcaatagcgatggcggccctcggcgcagtggggcggcctcaacctaacccggggcggggcctcgggggcggggtctcggcggggcggtcgctttggagccgcaaagtttggctgtggcggcaaatgggcttgggcggctcctcggcgggtggcggtggtggccgtagcggttcctcctggccctgttaatgtcggggccaggccgggggaggatggcgccctagaacccggccttgctggggtaggggcgggaggggacggggtggggaccggccatgtcggaggtgacccggagtctgctgcagcgctggggcgccagttttaggagaggcgccgacttcgactcttggggccagctggtggaggcgatagacgagtatcagatgtgagtgactaaccgcgggagcaggccagaccggctccagtcgtgcgcctctcccttgtttctgtcggtgtctctcatcaccgtatctgcagccaaggcttctcagggtggggctccgcaggcactggggctgagatccctcgccaccagccccagcgaggctgctctagggacaacggctccgctctctggggtgactcgccttcttccctctccgcctccgcagggacagttccattcaacaggtagcccttctttcctggggcgcaggccccagcaggctatctgcttagttcctttccaccgtctcgcgggtcccccacttggcagtcagtttcctttcctcctcctctcccaggttgcttttcctcgatttccttttgaaattctctgaggaatacttgtgtgttctccgcccacgttccaaggatgagtggccttgctctgtgtgtgtcttccttcttccatgcgtaggaaaggagggaactgtttgcgattgaggggatgggggggagcccaggaagcaacgagggccagggatacctcttctgccaaaagaagggtctcctctcgcgctccttctccacccctctttctggtgagccgtgttttcagaattccacctcgatttcgtttcggtttctgggactgttatttggtaggctgtgagtcccacccaccccctcgctcggttgccttgggtggagtccgcgcaggatgtgaaccgaagagagcaaaatgtgaattaatggaccacgcacaggagctccacgccctccttggatccctcctccttttcctgtatataatgtatagccgcagggtacaagtgagtaccagtttccttgagcaacctaagaccaatttcttgccctttctggtttccacagaaaacttcagggttgtcttaaaaaataaaagacaagatttatatacacataaaaccttgcttaggtttttgcacattttactgaacttaagaactgtctgccaaaatgctattgtttgcaaactcgccattaattattctctgtttaaagcaagttattgtttgagatttcactgagtatgaaaccacgtatgagtagaatacccccggcctcccccaccccccatccgcccccgacacacaacgatttctggcaagaatatacgcttggtacttggaagatctaaactcttatcgtctccccgcaatagttatttgtttttatctattaagataatttaaatgtgtaggtactgactttgaatcgcctgtagcttcaaaaagctctgacaaaaacccgtgctctgagccattttgcgatgtgtaacaactactagcatttgttttgcactttcacatgatttcatttgctcttgcaataacccagtgagaatataattattctcattttacgaaatgaggaaaactgaagctcaggttaaacagattactcaggtcacaagctgataccactgaaatctgggatttaaaaaagaaaatccaaatcctgtctctactacagagtgcttaagatgtactgagagagtaattctgtaagtgaattagacaaatgataagattttctttattactggagaacacacccttccatactgtagccaattagtaagcacctatgtatacccattctgtatattaactaata

SEQ ID NO: 220 - DNA, 4001 bp, Homo sapiens
catacatatataggagcagtaatgtttaaactgtaatatacataaaaatcacctgggggtgggtggttttgtccaatgcaggctctaattcaatagcctggggcaggacctgagatgctgatgctgctggtccccagacacttttgaatagcaaagtactagattttggttggacaactgcaagtaaaaagggcacaggaccagatgaacgtaatttccaaaacgggttcaaatggtaaccctgattatatcgctaaggctacttgtaatacgttttaagttaactgctgtatttccgacatattgctgacaacagtggattggttatagcatgtgttctacaataaaatgtactttccaaaaaatacctaaagaatatttttaaaataaaaatgtaatacaatacttgatcaataaattctattataaaatgaaaacattgggctgggcatggtggctcatgcctgtaatctcagcagtttggaaggccgaggtgggtggatcgcttgagctcaggaatttgagactagcttgggcaacatggtgagacccggtctctacaaaaatcagccggggatggtagccacgcctgtggttctagctactgggaagactgaggagggaggatcccctgagtccaggagacgtaggctgcagtgagccctgatctccccatggcactccagcctgggcgacagggcaagatcctatctcaaaaaaggaaaaaggaaaaaaaaaacaaaaaacaaaaacttggaacaccacctaagtgagatgccaacttaaaaaaaaaattaagttccatgccttctacttaaaaaaaaaaaaacgcgcggtggctcacgcctgtaatcccagcactttgggaggccgaggcgggcagatcacaaggtcaggagatcgagaccatcctggctaacacggtgactctactaaaagtacaaaaaaaaaattagccgggcatggtggcggtcgcctgtagtcccagctacttgggaggctgaggcaggagaacccaggaggcggagcttgcagtgagccgagatggcaccactgcactccagcctgggcgacagagggagactccgtctcaaaaaaaaaaaaaaaaaaaagcagcatgtcttgtctaaatgtccttgggtaggtagtgcagcagataataaggagaaagcccaggcgaagacctaaacatggcaattagattccaggaagtaactgagaaaaaattctgataaggttcatttaatttgaaggcactaaaaaattctgacaatcgacttttcctagtattagaaaataatggtggctgtacagtgtatgaaatgcctacattaagtgcttcctttatgctatttattcatgacaaagctggttttgaggagcaccacatacttaatgaatagagaatacagtgtgtacccaacgaaaaactgagcaggtttatttaggactcaaaacatttaacgagttatttcagaaaatatcatcttctacacatcttccatataaattccgatagcctaatacagcatctatgtgcctacaaataatatcacactcagcacttgaggctgcgaaatcttccacaaatacttcttttaatgcggcctcctacttcctggatgaaaatgtctgaagttttgcgaatctttacttcaggaaagaagagggtttctgcccctgccccatcttctccccttctgcgacccggcggtcttcagttttcgggagttcctagggtgggatagaagaacgacacacccacccgcagggacaagggtgcctttagagccaccaatacaacattcggatcgaagctgtaagctaacacacttccacaagaggactcccgctcctaacaagggacccccaccccggaagccccgagtccccagaggaacctacctgagcgccgcccccgagctctgagcgcccacttcctgtttaccacccagcctcttcctcccgtgcccagtcccgttcgaggcagcgggcggcgaccgtgcgcacgcgccaacacttgagttcccctctttccaaacaggcatttttgtggaaagccgatactgtcaacccgggagaggtggccagacaacggccgaacgaaccccagtttagcttgtattataagctctccaatgaccaatggagatgcggggcaaggggattcagcggatctagctgttaatgccactgatttgtggtgaccaatatggattttctttctgtcgtttgtttcaaggcactagaaggagacttttggtccactgtccaggggtctatggagactaatgtaaaagggggtgatcctattgcttgagactccggggaagtagcgggggatattactgagaaacacccatcctctgacatacttaccaaatttctcagagtcggttcagcagttcttctaagggaagaagggcaatatatcggagtccacaagcgagaaaaagagggagtcggagaaccgagactacagaaccagggtgacggaaaaccaggacggcgccaagccggagtcacgtgacccggcggccatgatagctaccgaggcggtagtgcgcgcagctcaggggcgggtattgccgcggcgttgcagtcccctcaaaacgcttcgttcatcatccctttctaacttctccctcggccttccttttgagctatggtctttttcccagacaggaagagaagagttgcccctacctccggagccgagggagaatgccgcaatagcgatggcggccctcggcgcagtggggcggcctcaacctaacccggggcggggcctcgggggcggggtctcggcggggcggtcgctttggagccgcaaagtttggctgtggcggcaaatgggcttgggcggctcctcggcgggtggcggtggtggccgtagcggttcctcctggccctgttaatgtcggggccaggccgggggaggatggcgccctagaacccggccttgctggggtaggggcgggaggggacggggtggggaccggccatgtcggaggtgacccggagtctgctgcagcgctggggcgccagttttaggagaggcgccgacttcgactcttggggccagctggtggaggcgatagacgagtatcagatgtgagtgactaaccgcgggagcaggccagaccggctccagtcgtgcgcctctcccttgtttctgtcggtgtctctcatcaccgtatctgcagccaaggcttctcagggtggggctccgcaggcactggggctgagatccctcgccaccagccccagcgaggctgctctagggacaacggctccgctctctggggtgactcgccttcttccctctccgcctccgcagggacagttccattcaacaggtagcccttctttcctggggcgcaggccccagcaggctatctgcttagttcctttccaccgtctcgcgggtcccccacttggcagtcagtttcctttcctcctcctctcccaggttgcttttcctcgatttccttttgaaattctctgaggaatacttgtgtgttctccgcccacgttccaaggatgagtggccttgctctgtgtgtgtcttccttcttccatgcgtaggaaaggagggaactgtttgcgattgaggggatgggggggagcccaggaagcaacgagggccagggatacctcttctgccaaaagaagggtctcctctcgcgctccttctccacccctctttctggtgagccgtgttttcagaattccacctcgatttcgtttcggtttctgggactgttatttggtaggctgtgagtcccacccaccccctcgctcggttgccttgggtggagtccgcgcaggatgtgaaccgaagagagcaaaatgtgaattaatggaccacgcacaggagctccacgccctccttggatccctcctccttttcctgtatataatgtatagccgcagggtacaagtgagtaccagtttccttgagcaacctaagaccaatttcttgccctttctggtttcca

SEQ ID NO: 221 - DNA, 4001 bp, Homo sapiens
ttaactgggaattccaagaatgaagacggaaggttggccaactatctatttttcataagttatgataagaccaaccttgagacaaacacaggaggccctcatgcaacatctgctgaatgaatgtcagactttcctgccaggaaattacccaacaggaaatatgctactatcgggtctcttctatcaaatgttagggtgcaagcctctcagtcctcatcaacaacataaacagctcagggcattctcagatttgctgggctattgctgagaggctgtccaggagtacccaggataagggaggaataaaaacgctcccagatgtctgggtgtggtggctcacgcctataatcccagcactttgggaagctgaggcaggtggctcacctgaggtgaggagttcgagaccagtctggccaacatggtgaaaccctgtctctactaaaaatacaaaaattagccaggagtagtggcacatgcctgtaatcccagctactcgggaggctgaggcacaagaatcacttcaatctgggaggcagaggttgcagcgagctgagaccgcacctgtgcactccagcctaggtgacagagtgagactctgtctcaaaacaaaacaaaaatactcccagagtagaggacttatttaggtgaggtcagaagcttcctggagttggccctgaagcaggactcatcccaattgcttgaggtaaatagtaatcaacttttcccacaattcagttgggctgattttgacaaataagcatgaaatgaaacaggaatacacattggcaaattacccactggcacagccaaatatcactcatcccacagagattgttcagcaagaaggccttccactctctggtgattaatctctctctctctactgcccgttgcatagcccctacttagaactcatcaggcaccagtgtgtatggctcatgctcatctctggcttgggttcttgcttttcatcctgtctaggcagggttgcccttgatgaggttccttctccacaggggccttccctggtgagttactgactaaccagaacagacaaggtgcccctgtactttcctttcacagaacttaccacaacggtaactaaacaactatttgtttggctactcggttaatggctgtctctccactagactgtgagctttgtaaggcccaggattacatctgtttggctgaagtctgtatcctcaagacctatcagagtgctggttgtcgcatatactctaatatttgaatgactatacgagtaagtttttttactgctagaatcttttccttcaagacctgtatcaaatgctctctctttcacgaagaaactgaatttcctgagctggaataaattgctccttcctatggattcctacaaaacgttcgttaactccagcctttaaaaccatctttatttcactgtggctagtatcacactggtttgcgtcgaggtctgtcttcccgtggaccggtagaggctaaaagaaaggcccaggtcagcctcatccttgagacttagcgcccgcaaaagttgggcggggctggttggaccaggttgcattgaggcggcgcagggccctgctgagggaagaagggcacgggcccggcttaccttctctttgactgcttggtagctctgctgcagccagctccgccaccatcccacgtcctccctgtggaagacagacacatctggcagcaccgcggtgcgattcctgcccgcccaaggatccggtttgttccccgctcagatgtaccctgcgggccgaggcttcgcagaccgcttgcccaccccctcacaatgcgactccactctgccctttcagatcagtccacgcccccgctgatctcacgttccccaccgggactctcgcccagcaccccaaccctgggagaattcaggccccaacgcctaggagcaaaacgacaagctcacccttccgccatcttgcctgcatgacatcaccactatttactgacctttgacttccgacacggcaccgccccctcaaggaccgcccccgaggcgctcggcccaatcctcgcgccggcaccgccctcagcccaatcccctccctgcgccatcattaggtcccgcctccctgaactctatccagtctctgtcccgagttcgccctcaaactccgcccctgaactctcagttcaatcgtcattcagtcctgtcctcaggctccaccaagcttgactctttgtcactgtccgcaaacgtcgggtacggtggcctctatggacgatgatcagccgacaagctggactgcggagagctgggagcagaggggaggaggagagatagctcgaacgtcaggatcccagagcgcagggttaggaccgcccccctttgtgaaaccagctgcgtagaggctgctttgtgtctctttgggctaattcaataagcccatattgcggggctgtggcccagagtttggaggaatgtgaataattcagaggcgacttagatgcagcctttggagggcttacgggttaatgggagacacacacattcagtaatctcaactttcggtggcccagctcagaacaacgccaggtggaggtggtctggagaaatccggagaccgcctggattgagttctactgcgattggaagggagattccacagcccacatactttggactttaattaaggtcagcccctccacgtgtgcggtagatcccatcgcctcttgtttgcttaaggacatagatctagtaatccccccttcatctcttttccctctgatgactgcatttatccttgtcatcatccgtactgctgtttctcccatctcaaaggcaaacaaaaaccagccctctctatatccctcaccgtttccctactcccctttacagcaaaagcgttgcctactcacagtctgcaactcccctctcctcccattctctcttgaactcactgcagttaggtttttgcctctcagacaatcctttgaaataactttcttttatttatttaattttatttaattttatttattttatatttatttgtagctctgctgcagccagctccgccaccatcccacgtcctccctgtggaagacggacacatctattttatttatttatttatttttggtcctccctgtggaagacggaaacatctattttatttatttatttattttgagtcagagtcttgctctgttgcccgggctggagtgtagtggtgcaatctcagctcgctgcaacctctgcctcccgggttcaagcgattctcctgcctcagcctcccgagtatctgggattacagttgtgcaccaccatgcccgactaatttttgtatgtttagtagagatggggtttcactatgttggccaggcttgtctcgaactcctgacttcaggtgatctgccctcctcagcctcccaaagtgctgggattacaggcatgaaccactgcacccagcctgacataactttcttaaggtcgccaagaggaatggccacttttcagttcttgttttacatccgcatcttatttgacacagttgaccactttcttcatttggcttccaggacatcatgccctcttgactttcttccccgttcattggcatctcagtattctttgctgttttctcaccgccttcttgttgctggaatgggatattccctgggagaaggctcagcccttggtgtcctcctcctttttgatgtttatagtcattccccagatattctcataaagtctcatgattttatttattattattttttaagatggagtctcactctattgcccaggctggagtgcagtggcatgatcttggctcactgcaacctctgcctcctgggttcaaatgactctcctgcctcagcgtccagaatagctgggattacaggcacccaccaccacacccagctaattttgtatttttagtagagatggggtttcaccatgttggccgggctggtcttgaactcctggcctcaggtgatccacccacctcggcctctga

SEQ ID NO: 222 - DNA, 4001 bp, Homo sapiens
cagcctaccaaccatcccagagccagctctatttaagagcgggggcaggaaggatgctcctctccacacctctgccatccctctgctgtcccccagggtccagcctcctcactgggagaaggattataatagcagtggtgacatgagtggctttggccccaaggacttctcccagtgacctctgctcaaggaattgcacagacagaggcaagttgactgtaaactgcctgctaaatgactacaaaccagcccagaccgctccagcactgaacagaatgacagcccagggttggcccgtggagggggcagggctggggagagccggcccaggccccagggagccatcccccttcttccctgaaaccctgagcacagccacccaggtgggaggagaggaggtgtgggggttgctgaggactgcctggacctggagccctagatattaggtccagcagggcccccagatataccccctttcccacccccccctcctaactcacacagtgtacaaatgaggaaactgaggctcagagaggaaaggggcttgagcaaagtctcccaggcagtaagagacagagcccaagttagagtccctatttccctccttttctccctgggtctgtacctgaccagctgtgtgaccttggaagtcacccagcctctctaggcattgaagattcgcaactcctggcatttccattccacagagctgttgggaggatcagtatgggtaacagtggtagcccttcatctataaataacaccttacagtttacaaaatattcctatatcttatctcttctctgatctttataatgaccctgtgaagctctgtggaaaataggggcagggatctcatttgcagatgaaaaaaatgaggctcagaaagacaaaggtcatagagagtttggaacaggacttgaactagaactcaggactcccaaaccagtgctcttcccatcactaaattacacataaggctgagaatacatgaagactctaaaggatactgcccagtgcatgccaccaaggttagacctgacctaccctggagctctcagtcgctctgggacccagaggtagaagacccaaggtgaagggtgacgtgtaagtcacacgcatctgagctccaaaccttgctcgttagctgtgcagcctctctttctggacctcagaaaggctcagaaggtggaactacagaaagcaccaaaaggcttaggatgagggctgaactgcaccctgaacgcaggagtgcctggcagggggtcagcgctcattagcttttgtttcaagcacatggtgtgttgtgtttgctgtgtctataccatagcttccggctcagggctccagatccaggggccttctgatcaacccttaggctaagggatggatggatggatggatggatggatggatggatggatgggacagacgctcaggagagcagagagaagaccgagtcaaaatgagaagaatgaaaagacaactaaaggatagggggtgaggcatggcatacaggcacagtgtccagccctcctggccccagctgacctggccccacccagccccactaccacctaccttggggtagcactggcacatgctccagatgatgcccccgatcaccatgacgctgcccatggcatagaaggtgccgtagacctggggccgatcatggctcatgaggaacgtaccgagggccagcaggaaaagccccagcacaatgaagccgatccggaaggtcttctcgtcagccatggctgcctggccagtccctggcctgcacacccccgggagagggggtggctgtagttcagcctaaacaccgagacaggcttacacagggagagaagacactgaaatcgctgcaactcaaggcttcaagggagagcaagatccctttcaatcccgctccagtccctgggcccaccagttcaacagggctggaggcggctcgcttcaacggacccacacccagccacctttactccttgccctctcaccttccctctgggcccggctggcctggagtgtgtgtgtgaatctgagcgagggagcacacaggggagggagagtgggaggttaccggggctgggccccagccaaggctttgacatcacctcatttgcctactgtggggttgagctgggtggacaggcagcctcacaccttccagctctagaaaacagggtacagttctgcagctgagagctgttagaatgctattggaggattccaggatcccacaggctggcatttcagaatcctgaagaattctacactcttcaaggacatgtgcctatccagggttcaggaataatggcccatatgtactggctggtgactatgtgcagggcaccattctaaacatgttacagctattaactcattgaagggaacccagtgaagcagctactactatccccactttacagaggaccctcgggcacagacaagtaacttgcccaaggtcacacagctaaagatggcagagctagtgggatgtgaagccagaggccgtgggcctagccacggcgtgatacttcttaactgcagcttgagggtgaaaagcgtggctctggtggcaaggcaggctgcctgggtttggattctggctcctctactgtggggcagtgtggtcatgatcaggttacctcagtttcctcctctgtaaaatgggaataataatgtacctcccagatttggtgctgtctccaggcctggcctccttgggttcctccatccccttcacattcacacgctatgcaccacccagttgggctttcaatgaactgctccccacccacccctaaggctctcggaattagtgcccctgcagggtgtgagtgactgacagtcacttcctccatttccttgcagcctgatctaggaagatgccttcctaagaataacactaatgaggcattttagtcctagggacaggctgatggaagaaatcagattcctttacaggattacaggaaaatgaggaccatcggtctctacaagagaatgttcacttggcgtttacatggggttaaatcgccgatgcaggataaaaggctttcaatgggctccctgacttgctgggcttggggatttcctgttggcggtcatcaccttctcccctcctgccagcagggctgcccttgttccctaaccccacacctgtgctcacagctgcccctctaactagacgtccttctcataggccctttttccaacaggggtttctccttcctcacacccaccatcgccagccctcagagtccaggtgcacttgacagttcgcagaggaggtcctggagggagctcaggggccctggctgagcgatggctgaggggcaggaaagggctgagttatcaggtcatgtccaggtctggttctcagggtgagctcaggcaggtggctctgctccgggctagagttttgtcaactgcagattggggataggtattaggccacctcccaggttttgtacagggaagggacataaggggagtgggaaaaggcaagtactttgtaatctgtgactattaacaaagcaggaccttccacggaaacattattatcatcatctactacaggctcagagaagggaaagggcgagtgccgtgttacctagccggtgcccctccctggaaaggagacggaggcccagagggacctcagcccgtctggccctggagcccaggcgggtggcgggaacggtctccgcagccgcggtcctgcagggcctcgtgggccgcccggcgctgagcaaggcgcttcccccggggtcagcggctgggctcggacccggtgatgagcagtcgcggcggggaggggagtcatcgcccgcatttcacaggcgaggaaaccgagcctgcggagtggcaggggctggccaaggtctccctcggctgagtcggcggctgagcggtgaccgcacctcccctcccagccccatgtagatggatctgctcttcagccattcctcagaggcctcgcggtcacccgg

SEQ ID NO: 223 - DNA, 4001 bp, Homo sapiens
tcctgcctctggcaccccccacctctcccacccaggcccctggtcagcaggctcacagagtggcggtacagcttgacactgttggtatataggaactccagcactgccaggaaggcctcagttggcacagtgcttagcaccacaggactgggcaccccggggcctggctctgtgcccagaagtcgctggaagaagttgcatctacaggccaacaagcaccgatgggcaaatacctcctgccgttcttgaccaaccacgaagcaaacatcactgtgggagacaggcagagaggcagcggggaggaggccagcacccggagtgcaacttgggctgtgcctttgcccactctgggtcttagtttcctaaccagaatgtaagagacagggcttcgtccctccagcagaaggtctgggacccaaagccctgagttctagtcccagctccacctaatgggtaccataggcaagtgacttcctatctttgaatctcaggtttctcacccatgaaatgggacaataatcctaaacctcaggtctcagaggagatgactatgcttgattactgaggggcatctgggctaatagaagcaaggttgatcccaccttcccctctcctccccagcctgagtcttgggggcagggaagcttcttttggctcctcctccaccagctgcaaactcagctttttttcagccctcctccagacaggagggtgtgggggtgtggggcacagagtgcacaacgactgcaaacagacacagcagtgatgcaccatcatgagccagaccacagtttccatcttcatgatcacttccggccccagctctgggcctctgaacaaggcaggggataggaggcagatgaggctggagcctcctagagcctcttagtcccaggtccaaagcctggggggttcacattacccagaccagactgtgaccccaaagaagcagggtgatggaagtcaccaccctttggggaagagctcagatctgagaccatgaggacagagaacttcattctagctctcctgagcagcccggcctcctgtaaactctacccctggtttcagacaccactggcatcccggccagcagggagcagccagcacccccgaggcttcctgtcagggactatggctcaatctctggagctttgttcttcttgtgaagcctcagttcccagaacaggtcatctgttcctcttcttctagcagtgaggcctcaataccaagctgagtgagtggagggaggaggggaatcatgacccaccatctctaaggatcccaggggctgagaatcattttcttctgccaggggccaaagtccaaagaaggaagggctttgcctgagctcacacagcagctccaccccgccagccttgcctctggccctcagggtctcacagacactgagtgaccagtagccatgttccacatttgacctccccatagcctaagttcaccagggaggatggccaagttctaattcccagcctcttctcaccagggcctccttagagtcctggggcccacagagccagctaagaaaaacccgcaggcagggcccacccctcacctgtatcgcgggttgttgacaaggcttcggagtgctgcggaaaaaggttcagctttcccatgcacgaccagtcccaagggctccatgagtgagaaggggttggggtggaggagggagcctgggaggcctggccaggccctagagctggtgaggttagcaaggcctgagagggagaagcagggacttgggaggcctgtttgctgagaagctgaagtttaggagtggagcaggagaggcccaagctcctgaaggcatcagaggccagaggctcggggacaggaacagacacagggagggggccaggagaagctgaggctggagtggcctatggtcctgggaagaagctggctggctggcggcggcggcggcggcgaaagaggccctggctgggagtctgcccaggcagccgacggggtgggaagcctgtgggtttccatggaaactggagctggcctgagaagagactccacccatctcccgggcaggcccagggaaaacttcagcccttagaggggcattaagcgccatacgagggtcttagcccccgaagctgagcctgccctaggttcagagttcaaactccttgccctcctaacccttccctcctccacaggcacacagggtcaggatccggttagccaggccggggaaacccccactcaacagggaaaatcctcgcccccatagatgggtcagggccccgacctggcttgtttgggaggggacagtcccatccctgccagaggaggagtcacatgagttgtcagccctggcagaggtgtcacagcctctgccatctctgaaatgtaactttggggaaacctaggtactagaggtgtagccagctagggacaagccccaggacacttgggtcagcaaaggtcacgaggctggactcggggttcactgccgagtcactgccactttataaggcctggtgcctaccagctgagccagtgggcctcccctcccccgcacatagccctgaactgaggaagtcatccaagccccaccctaactctgcgccgggagcggaaatgtttgtccttgtcgaggccgatggggagacaacagagccatgacgtgttccttcctgtgggcccagactctggattcctgagccaccacccccgcagcctcaagatctccccctaacctaggcctctgtgacttgttcacgaatggccagtcatctggccattccacaaggggagaaaatgggccctggctcaagagtcctggggtaggacaaagcctttctgaccacagccttgctctacatctgcccctctgttgcctgcgcttaggaagtttgcctctaagctgcaagaccctgtcggccgctctccctgatgactcaggggcaccccatgctcagcacatgctcacagcaacaatgctctcaggttaagccagagccagactggagggagggatcctgggagggaggagtgtttgctctagcaacccatggcaactccacaacacaggtctttcccctcccacttgcccttcaggccagcggggccagggctgtgcagccaggacagaactcagaagccaaagcctgcgggtgactcaggtgcctgagggagtttcgggagcagagggcagccatctcagaactgattctggaggaagtgggatcagaggccaaaggcagaaggtggaagggggcttcatgagtcatctgccctcagcctgggccaggtgtaggggagatctttgtgccagccaccctagagtagatctgggtggaagatgactggattcaacacccccagggctggaaggatctgtggggttgaaggagctgagtctgtcagtccttcctggttaggggttggaggctctgcctccacagtccaggctgaggcagaggcctgcctctccttccagagaagtcgggtggaagggagaaatggcagtctctaagactccgagcgtacctggctaacttccatagtgcccagagaaggagctcagtcggcaaggactagccgaggatcccagtcctagcagcctcctgtcccctgctcatgtgtctaacagcctttaaccttctcagcacctaggaacccaggcagcctgggactatctgatccacttgttctaaaacacaggtaagaagggggtagaaggtaaaaacccttgacatcactgagcaagaggctggggtgggtagacagatgcctggtgaaggccaccctgagtgtggttcctccagccagcaggtccatggccagcaggcctctgcccccgggacgccaggaggaggagaatgccaaagactccgggcggaaaccctcaccggtgcggccccgaggctgcctgcccagcattgatgaggcccgaccggcaggtccaggtccagccccggcctcgcgccggggctccatgctgggcctggccgcgtccttctccc

SEQ ID NO: 224 - DNA, 4001 bp, Homo sapiens
atgacattgctatgcttggagaaaattaatttagtatagcatttaaggtggttgggtgagcattttgttttgttttgttttaaaaaaaaaccttgctacatctatttttctttgtttataataagaatttgagagttctgagtcctaccctcagttgtaactaagataaggataaattgttcactagcaatactttaacctcattttcttcatataaattagatgtgttaccctagaaacgttaacaactttagtattattttttccatctttttcatcagtccctccctggtagagacaaagtagcttccccagtagatagtcccaaattaaagggattttttttttactttgataaattctgtttatagctatcggagccttaagtatgggtgagtttttgacagaaagcacttcaaaatgtagaatcctggctgggcgcagtggctcacgcctgtaatcccagcattttgggaggccgaggcgggcggatcacttgtggtcacgagttcgtgactagcctggccaacatgatgaaatcccgtctctactaaaaatacaaaaattagccgggcgtggtggcgcgtgcctgtaatcccagctactcgggaggttgaggcaggagaatggcttgaacccgggaggtggaggttgcagtgagccgagatcgcgccacggcgctccagcctgggcgacagagcgagactccgtctccaaaaaaaaaaaagtagaatgctgcacaacttttaattattagtaattatgtttacctcagtggttctcatagtcaccctagccagcagcattagcatcacttggggccttgttagaaatggaaaatttcagtgatgcccacccaagtttaagaatcaatgtcttgctggaaatgtaaattagctaggtcatatttctaagcttcaatttctttgtaagctgaaattactttagctggattcccaataacccgagaaggatatccatgaggcttacaaaggttaaatgtcaggaagaccctccatttgctttggtcctcacaggagctgagagttgctgggagctacagagagctctaggtggagagaggaatccaggtcgcaatcaggaagcatttctggtaaattgtttaaagagacctcagaagagacctccaagactatagtattgttctttcctcatttcaaataatcgttttcctaattttattatttttcttaaaatagtataagcttattttaaaaattgtgtaagtttcaggacctggatccacccgaccttagtgattggaaacaactaagcgtgcctgtgttgagatatttctagcaaactagtgctgcacacgactaagctttttttgttttccttttgaatctggtacatggtgtcgaggtgctcgggattgtttattcagggcgagcgaagccacttttcggaatagtggggagactggctaacgacccgcagtcgcctgaggcgaggagaaccaagtgctgagggagggggaggcagagccgaaagaagcctcagcttcggggcggaggtgggcgatttaggaactgaagcagccagagttcccgcctcctcctacctgagcaaatcctggctgagctgctccgacaccgtcgccttcagccggcgccgctcacacggccccttcctttgcaaccccttactgcaaactccagcggaccccagaagtaccatgggggccgcactgccttccccacagcgagccatgtctcacagaggtacgacgccctggaggcccagtacttggcctcacttgccccgcccaggaggaagaagggggcgtttccgaccgaacgctcggctcctacccaaatccgccccctagggtaaaaggttgacgcctctcgtcggtttgtagacagtctcccagagaagccggaccgcggtggggagcctcagaatcccagaaccgagccggctcttgacccaggaagagcgtgcgcaggcgtactcgctctgtttacttctgccggcgggcaccccgcctcccatggctcaggcgcggaccatcccgcggggcaaaccaatcctcaggctccttatcccctcccctcttctttcccttccggttggtgttcattcatttcaatgttttactgaggctcgagttcaaatcagcacatgcagcctttctatgctgtgtcttcctgacaggtctacacttttttccaacgaaagactgggcgagtcacaccccctcacttacctggcttcttaaccctgaggtataaatgtttggggcaagaaaaattggcgatgggaggagtaggggaagaacttcataaactgccagtcagaacaattctgagttcaatataagagatacttacagcatctagaaggccccatccccttcttatccaaggagtggctcatacaagcttttggacttgatcggagaaagcacagggctttgcatataaagccctaacatttatgaccaagaagggagaaataggtaaggggcaaagtctttgagcagtgaagtgatggatggatgaaatatagaattctcttttgtcccaaataaagtagcaaactgattatcatttaaggttttggtattttttatttgattactgcctccaaaataaggaaactcagtagttccgcttcgggccgggcaagtcccatctacttgggaagcgaggcggaatgatggcttgagcccgggaggtcgaggctgcagtgagccatgattgcaccactgcactccagcctgaacagcacagcaagaccctgtctcaaaaaaaaaaaaaaaaaaaaaaatctgtttcattcacaaactctacacacaaggtgaagaatagtaattgcttggaaaatacattggccaggttgcggtggctcacacctgtaatcccagcactttgggaagccaaggcgggaggatcacttgagcccaggaattagagaccagcctgggcaacataaggagaccctgtctctaccaaacaaaaaaaaaaaaaaaggaggcggggaggggaatatatggactttgtatttgtaccataagattggccaagaggtaaccatttcttcagataatgccccctctcaaatattcagacatcttaattctgaaaaatataactggataattgattttttaaaattaattcccaaatgcttggatggataattgattcttaattattcctgtagaaacgaggggtgtcaaagataacataatagtagcttatatttgaatccttattatgtgataaacgctactctatttgctctgtgtgttttaactcagttaatccttacaacaaccatttagctaggtactgtcttcagacctatttacagatgaggaagctgaggcatacaaaggataggtaaacttggccaaggtcacacaatgtcatatatcacactataatatatggtgtgttacaccataataatggtgtattataacccaggcagtatttatattttgactggcaaatttagtcaatttacatatacttttcgtaggaatgtaaattggtgcagccattatggaaaacagtatggaggttcctcaaaaaattaaaaataggactatgacatgacccagcaaaccctcttcaggtatatacccaaaggaaatgaaattagcacctcatagagatatctgcactttcatgtttgttgccccattattcacaatagctaagatatggaaacaacctaactgtccctaggatagattaacggataatgttgtatatatacaatggaatattattcattcttaaaagagaagatcctgccatttgtgacaacatggatgaagctggaggacgttaagtaaaattagccaggcacagaaagacaaatactgcctgacgcctgtaattgcagcactttaggaggccgaggtgggcggatcatgaggtcaggagatcgagaccatcctgactaacacggtgaaaccctgtctctcctaaaaatacaaaaaaaattagccaggcatggtggtg

SEQ ID NO: 225 - DNA, 4001 bp, Homo sapiens
gctctgccatagacttaaatttgatgacttaaatcccaattcctatgctcaaatatccacagaaaaggaccaacattcacttttctcaaaggaatgtggccatgagagtgtagtgaactaacaaagagccaaaggaatttattgcaaaaaaaaaggggctaaggaaaaacattagacctagatacttggtaaaccctttgggattcttctgcattttgaagtaacaattcccaagagaacagacagaggttgggatgccaagacaaagtcttgacttgtttgaaataaaagcaagaacaaaattaactcttcaaatcaaggtatagatgaaagaacagattccattccaggtggtcaggacaacagaattgagaaattttgttcctaaggagtatctcagagaaaaatgattttagggagactgagagctcaaggcagtaggggaggaacaagagtagtcttttgtttcttggcaagttgtggtgtgtggaattcaagtaggaaagaggactggactcagtctatgcgatgtcaagctcagaatctggagtagacctccaagatcacctggtttaattctctattctcaatcaacctctactttattgcacccatcattcctatctgtgatgtcatctcaacatctgctagcaccagcaaagtataaattacaaacgaaacagttccctccctcccatcttaatagattaggaaataagggcccagaagggagaagtcccttcctaggcccaaaagggagaagtaacttcctaaagccacatgattaatgagttcttccttggggattccaggatcttttagcactgttctcaaggactcaagaaagggtgtaaacaggtttatatttattaagtgcctaagttagaagcattgtggtaggcactttcacatacatcatgtttacacagagataaaaataattgcaaccttgagtcctgactttttattatgtagggtttctctaagacaagcacaggctttggaatcagaaagaccaaggttctaccagttgggaaaggtatttttcttctctgaacttgtattcctcctgcatttggaaaggtataacaccacgtacttcacagggttgttttgagggttaaaacattatcaaccacagggaatggttcacagaagatacacagttactggtaactattgttaccactcccgaggggacaactatggtaaactgcaagaatgtgggaacggaagttgaaaccgccattcactagctgtgcaacactgagcctgtcggtcagcaggcagtgggaggggggttataaagatgggcaagggacgccgacttgtaaacaaacactgccattacaaggtgaagagtgctgtaactgagttcggttccctggactcaagggcgggaagtggtaacctcagcttccctatctgtagactgggagcatcaaatgagatgacaacagagagcctgtataaagctcaaagcacacaacactgctgttgtgagcaaggagtaatggaacagaggaggggcgtccacctgcctcctgggacagggtctgggcggcaacagggcgggcccgctcgctcccacagggggcggtggtgctggggaccttcccacaggtgccgacccccagctgcgccgccggtaaccgacaggccaagccagccgcctccgcccccgctcgccgcaccacggcggaagtggcagcctgagcggttggcgggtgtcggaaggggagggcggggggagaccgtgcgcagcggcctatggccgtgaagtggcgggaccgccgggggtctcacctgaagcagggagggtcctccaacaccagcacgcggcaagagaaagatggctgcctcagccgagacagagaaagacgacggcggcggcggcggcggcgggagcagatccacgtgatacagccgaccccgcctctccctctccggggcagcctatcccgggagcgaacatctgaactccaacgccccgcctgctttgcgcatccctcttagtgctagtggcggcaggtgcaggtggccgcgcggcatcctggggcttgcagtctcccgagcgttctgttgtgtccctgcctacaattttagggaacctaataaaagggtggtcggtatgtttttatttgggtgtgtacttttgttaggtcgctttttcgctatgcattaagtacggactttaggactcaactagtaccaggaagaaaaagaccggacattttcacctgtttgttatacagcgaaggggaaaaattgggaagaaatcctcaagctacaagaaaaataaccagaagctttacactttagcctgcagtgacttatatcctggtgtcctaagtccacctaagtcagttttgcaataagaggtcccaagtttggttttcttggagcttgcatcagttggttgcatcatccctgagtagaagatttgcggttgcaaggaaaaataaggtacagagcttctccagcgggaaagtgcatgtctgcacggcacgagcccacgcaccgcagaacaggcttgccaggtctcctcagagaccctcgcaggaacctaacaatgaaatccagttgtccagtcttgatttgtggaggggtaaggagaatccgaggccagtgggcaatccgcccactgttgggagcgactgacctcacgaatcaataatttgcttttgactaggaagtgcagcggttcttggggggaggggctggactgggtggcggacgcgaggagcaacggttctcccgaacctctcccccgcccctactatcttggcctacattttcccgctccgtcccgggacctggacacccagaatccacgaaaagcaactcgcgctcgagaacagctctcgtacccttctacgtgatctgcacctttaagctcactccatcccaaaccggaccccggaggcaccacccacatccgtctaacatcacttccttcagagtttgaaaaaaaaaaatctgggaagtagaggtgttgtgctgagcggcgctcggcgaactgtgtggaccgtctgctgggactccggccctgcgtccgctcagccccgtggccccgcgcacctactgccatggagacgcggcctcgtctcggggccacctgtttgctgggcttcagtttcctgctcctcgtcatctcttctgatggacataatgggcttggaaagggtcagaccgcgttcttatcttctctttactgatctttactatactgatcccagtataatctcttcttgccctagcaccgttcccctcccattctaactcttaggccactccagatttctttttatcttccccaaccgctcctggagtttgaagatttcttggggtagagagtagcgggtctggggaatggagaagttgtacttgaggcctctctaaattattggattggggggaaggaatggcccgtaaattaaggaaagcatgttaagagcccagcatagtgcctagcacttgggaggtcctgaggaacggtcaccttcccacctgggagaaatagagccgttggggacctgcatatgcagaggaccctgttctgggtctgaagatttctctcgttacttcttccgcgaagagctaggttactgccacttgcttgcctttgggaaacagcacctgcatcccaggtagctgtatctagtgcataagaagagccaagcgaatggtagaaggtctgctgtttaagggtccccaacaattgtccttgctgtggttcagcgaagtttttttgtaagtgagcgatcagtggttatgaatggaggttaggaggtgtggccccctactccatccattacctacatctccattctaagttttaacacctctctcctcatcagcccttacttagttgaaagttggactgacagtctgtgaactcagagtttatgcttttctaagtagatgaattgtagcatggatcccaacccctcttccttttttttttttcactgaccttactgtatggaatgattctgctg

SEQ ID NO: 226 - DNA, 4001 bp, Homo sapiens
tcttcatttaaaaatacagttccccaggttgaggtatgtggtggcctgttgtcacggcagcatgagcacggcggcgcccagggcgggggcggaagggcctagctggagactgccatcacgtagttcttggaggggctgctccggcccagcagcacttggttcttgcaggtgaggagcccacaggaggcggccagtggggcctcctcgtacaagacgcagatggagccgtcctccccaatgcggtaggacacctcataggggtccacccacagggtcagctcgctgggcagcagctggtgcagctggggctggctgagtccgatctggctggccaccctgctgatgatggggtccatcttgtggttgatgcgaatgcagcggtagccggagcccttggacggcttttcgggaaaccagtggtgtttgtagtgctctgtggagacaggaccaggggcagatgccctggttagagcagctaggccatggatactaccatagggcggggtggagggtcaagggacaggaggagagaaaggggccctttaagtaagggaggtggattcctctgagttctaggaccctctttccacttagcagagaaaattttatggaagctggaaagatccactttcctgcttccaggacaagtgtatgtgagagagtgtgtgtgtgtgtgtgtgtgtgtgtgactgagtgtgtgtgtgtgagagagagagtgtgtgtgtgtgtgtgtgtgcgtgttgggaggggattctagagctctagggtactctctagtggccagtgtattgcttttggcacacccccaaagcaagggaagggtgtgactgggactggcatgtccaggcagggcctctggagacctgtgagctgaagtttcagggccaggaaggctgccaacattgttgggtccacagcaagtcactggacctcccaccctgtgttccctctgcttccttcagaagagtcagagaaccttccttagcagtgcctaagggagtgaaaactgggttgttttgatgaaacatctgttttcctcagaaggcagggtctgtgtgggtgcgttccgagatggctatcgcttcccaaaactgacagtaaccagctagaaacagctgggagagaggtctctccccagccagcgagcgggctgcttatctcttcacctcccaacttgaaggcccgcacggcagggtcacgagctacgaggctctcctccctaccacaataggtggcagatggctaaggggaaccaaagataacacaaagggggcccaaattccaacttgaagccagtcagcaaccagtggactaccccaggcacagcgcaccccgaccggcaggaagaaccgcactgggactccaaattgttgaaaaggctcgactgcaccttcttccctcatcgggacccctcggccgaccgggcggcccgcaacaacatccatcgagggtcttaagatctcgagggtccagcgagggagacgagcccgtaatgagacaggggcataagctggggactcgggctggcactccaggaccagggtctgcgcctccgagagcgtagaggggcgcgccccatcagaaccgccacggccgagacccgagcacagggctggggaggaggacccaggaaactggggactgcgggccgccccgggggtcggaggagggccaccgagtcccaaagctgctcccgtgggtcaccctgccgcaggagtagaagaaagacggccctggcagggatggggccgacccccggtggcgccaggcccctcggcatgcgctcacctgtgagtgcctcctggagcgccccgctgaagaccttaagcctctgctcgctcacgcagccccgggtcctcaggaggctggagaggaagcccacggcggcggcgatctccgggagcatgtcggttcccttcccgtggctcatgtcgcgcgcggctcgggctcagtgagaggtctcgggtgggaagtgcgggtccacaagacagcgttaccctggccgctgctcgggctctgcccggactttccccgggcagcgtttttcaggaggtccagggaggtaggggggcagccggcggcggcgctcattggtcgcggccagaggatgggggcggggcccggagccgctccgctcggccccgctccggcgcttttccccgcccccgccaccccagcccccgccctcgcagccttggcggcgctgaggtcatcgctcgctgtcgtcagtgctaggaacctgcgcccggctgagctgagcgaggcgagaggagaaagcgaggcccggggacgggactgagagctctgaaaggagggaggcggctcccgagtactccgcgcggggcaggccccggcctcgcctcttcgcccatttttaaggctcgagttagaggccacctcctccgagaagccttcggtgacaccacctctcccagacggttcccctttctgattcccacagcattttccaaccattcacggtcagaaccactcaccaggacgtgttgtcaccattttaccgctttgcctcgtctcttaactagacgaaatgggttccttttggctctttggaaagggaggctgtcttctatttatttccgtggtaatcccacctcccacaacaagttccattctacagcaatgtcttttctcttgctgagaaccattcaagtctaagttttctggtgggtaggggtagggggtgtgttgcaagacttttgtcttctcaacttatttttctagttctcactttccttaagtgctaatttttttgaattagtggtctgctctcaactgtacgtatttttccgtccactccctccttcccccagccgtcttccttcctcattgtggtttggaccttctcgagaaagaatctggcctcagtctccctcttccacactcagggaccgccaccatcacaggcactcggtagatgtctgctgaatgaggataacttctacccaacaccgtgaagcctggcccagggtctggcatacagatgccgtgtttgtaaggtgactaaaacccagtggcctctgtaaattcctattttccttggactctgagccctctgaccaccttctggaagccgtgtccctgtcttttttccttgtgccccaggcttctccacccccctgtctggctgtgctgcccctggatcccttcgtgccccgttccccgcactatgtctcctcagtcctcctcccttttctctaggctgcctttccttggagaggtcctatgcatgtagcctgtcttgatgtttactgttttacagtggcttttctcatctgcatagtctgtcctcctgtctttccatcctgctcctgttcccaccggctctgtcctctccctcagatgtccagccaccacctcaatgtcagccgaagcccagtgtctctccaaagctcttgatctccatttctgtcagcgataccatcatttcccagtcactccgtccagaaaggtcagcccctccttgtactttgctccctaaatccagtccccaaatcggctgcttcttactatctagatggttgcagtggattctatccagtcccatccccagaccacccttcccactgttagtggagttcccttcctaaaagacttcattccctagctcttctcttgctcaggtcattctgaaacatcccctcccccattcgtctactaaatcaagtccagactcctttgcctaatgtttaagacccttcataatttagccccatctgcctttttaggttgctgctactttgtgctccagggtcactcttctcactgccctctaagtatcagcaaatctacagcctggatccctcaacagcttgcccatgatccccatctctgccctgtaacgtggtccccattccatgcatgcctgaacatgcgtgaccctgctgctccgtggctcatgtccttatctcctgcatacatcattgtctataccacgccccacccctgcctcaatctctcacactactgaaggtacagtgtaa

SEQ ID NO: 227 - DNA, 4001 bp, Homo sapiens
tccctgcttgccacaaaccccacagctgtctcttaatgtccccagtgtccagggccacggaatcctgtgctcagtgattgtgaggacagaactgaatagaggactcaccgggcaggtggctctcagccaccttcctcctttcagggaggagggggctggagatggagcaggagagaccctccacagccctgtcccagagcgtcaagctggatgccacagcccagagcctggtggtggctgaggctgatagattggtcacagcaggcctagcctggcccctgaagtctctccgttccacccaggacttggggaaacagcctgctgatgtgcactccgccctgactccatcctgctggtctgtcacctggattctgggctctctgcccagccctgaaggaagagacagcagcttgaatctttgcagccatggctgcttctatttaaaggaaaaacaaaatcttgaggatttccaatgtattttggcaatttcacaaactgcctaccctgtgttacacaccatccctaacagagttccccatttcccagacaaaagaagggaagcaaagtggaaaaggtccaggaagattgaataggcatcctgtgttgcagaagtagaattcatggcacaagatgggacccaggcttgtctgtttcgaagcacaagttctgagtcactcgggaaacctcccgtatctgaagactctcttctctctcttggcctttctgtctcctgtcattatttctctgtctctctcttcctcccactctctgttgcttactgtctttctcattttcttttactgtctctctgtctctgtctctatctccctctctctgtcactgactctgtctctttgtctctttcattctctctgtgtttctctcagtttctcattctctctgtctctctccatctctgtctctcctgtctttcattctctgtctctgcctgtccctccctctccatctctctctttccccatctctataattctgtcattctttcttcatctctctctgtctttctctcatctctctgtctttctctccatctctctttccacctctgtctgtctctccctgcttctttctcattctatctcttcttctctgtgtctctctcattccccccatctctctctttcccttcccttcactttccagtccactggtgtaaggagggaaaggaagatgaggaaggtggctctgccttcaccgctgtgcttcccgggagcagtgcaggccagcacggcagctgggagagtgcactctcaccctactgaaaagccctccacctgaacacgctgggccccaaggccatgcctggaagtagactgacagccagctagccaccagccttacctgccacctgcacctgcacagtggcctcgccgaactttacaccatccttgaagcggcagcagtatgtcctgttgtcaaaggtggtgaccctgtgactcctcaccatggccttgcccctggccacgtggtcactcatgaaggtggtccttcctctgtactgccacttttgctctccatccatgtccatccctctctcatgcatgtgcacagctagggagggctggcacctgtaccacctcagctccatgtcctcggcactgatattggggaacagctggcactgtaactccacgtgtcccccagccatagccagaataggggcatgaggcccagtgacatcaaagtcagctttccctgggggaggcagatcagaaagggctgggttaggccatgtgttgggaggccagggcacttcccccctgcccctccctcttcttggaagctttggggacctattgagccctgagctgctgggagatgcttcagcttcccgccatgctggacacacccccacctatgccagggcacctgcctcgacttgcacaggagtctgtccctcagttttgacagatgctggccagtgggagctgcaggaagaccaaggtgacaaagcagatggacaggaaggcctctggatcgcatgtcactgccattcctgccaggccggagccacgcactgtcactgggagaggagccaccgccaggaagctaacaggtgcagaggaaaagtgccatggaagaaaaagaagaaaaaggtcatttactctcactctcaaacaagttattaatgctataaatggagacacagcaagcctcatgtgctcctgtacccatctccttgcgggtaacacacctctcaccctagtctgtctgcggaattccacgaggacatccaggagggaaggggtttgattttctaattgctcataaagagctgtagcccagtctctagctggtgactgtcatgaaactccagaatgctgggggagaaaacccagactcggattaagcaaattcgaggtcagaacgacatcaagggattcccttaatgtcccttgctttcctgctgtccccatggggacttctacagtcaggggctgggggctgggcccaatcctcagagctcttcagctgggatgggcaggccaagaccctcatgagtctcttgtgagcatttcttgtaaccttggtttagagagcaggtgttggtaaaaagttctgtgaccttgggcggttctacccagcacagccatccaggttgggcatttacgtgtgtgattagggagttgtgtgggcacaggctcttgtcctgtttggttcttgcattgcaggaaggccctgtggtccttctgcccttggggatggggagagggtggaggaagcagagacactgaagagcaaaccacatcctgaccatagacaatgctcacctggcaccgagagctgctgcagcttccctgggaagtcctggcaactttgggggaatgaatttagtttcctgccaactccaggtagggtgtgacccagaccaaccacgctgtctccaagcagtgatgtgaaaggcaacctagacatctggcaaaagccgccaagtcccccagtttccagagattcttccttttgttttttgcaaaaatatgtaactgtacctttctggcagttgcagcagaaaaaaaaaaaaaggcttcctgaagagtgtgatccccagtgtggaacaccccagggctggggagcaggagatagagcccgccgggaggagacgggtctcagggtgggacccaggccagctgaaggagctgcaaatgcagataaagcctgtggttatctggcagcgtgcaggcccagcctagctggcccaggtccttcaggaaaggtgtttatgatcatgtcgcaatgtcctaattcctgtattgtcccagagggacgttcagggctcctcttccccagcccttcgctgccctccgtggctgtggggtcatgggtgtctgttctcactggtagcatccctggcccagcttagaaccttcatgctgatttctcgcacccagccgcaaggcctattccctcctcaccttcttgtttgatgattcaaaagtctgggccttttcctgggtggtttttgtgagaaaggagtccttgctttcctagagggaggagctttatccaaactctgcagacgggctgagcactccctgtgcctgcgggcggtgaggaaatccaagtgccaggtccctcctatgtccctccttgggggagcgtctctttggtcaaccggttgttcccccttttatatgtcaacacgtaagaattatgtcgtcctgtgatctgcttttaccagacaatgacgtgacctaaaactcgactcacttgtcctttttaaaaaaataattgaccagacgcggtggctcacacctgtaatcccagtactttggtaggctgaggcaggcagattgcctgaggtcaggagttcaagaccagtctggccaacgtggtggaaacccatctgtactaaaaatacaaaaaaattagcccagcatggtggcctgtgcctgtaatcccagctacttgggaggctgaggcaggggaattgcttgaaccagggaggtggaggttgcagtgagccaagatcgtgctactgc

SEQ ID NO: 228 - DNA, 4001 bp, Homo sapiens
taatcccagcactttggaaggccaaggcaggcggatcacttgaggtcaggagttcgagaccagcctggacaacatgttgaaacctgtttctactaaaaatacacacacacaaattatccgggtgtggtggtgcacacctgtagtctcagctactctggaggctgaggcaggagaatcgtttgaaccaggaggtggaagcttcagtgagccaagattatgccattgcactccagcctgggtgacagagcgagactccaactcaaaaaaaaaaaaaaaaaaaatcaaagtttgggtactcccagtacaatgccaagtgaaaccagtaacagttacttagcaaatttaatcaacttatgggccccaattaaatgaaaactagcaagttattaattaatctgtccagagaaggggcagaggaaggatattagagtcagggtcccaagacttgatgttatgtatctggtaagatttggaaaattcagtgagtcaatggaaccttgtagaatagtcagaaaatggcatgtgagctggtgagtaagttgcatccgttgactttctggatgcattttataatgccccatttccttgtaagtgttgcatctgtgctcatgaaattagaggaaattcaacctctggggaaagtcgtgccctagtgatctgaggatgcagagaaggcgtgggtggggaagtgctttgggattgacatgactcaccctggctaggagcatggtgactgtactagctgcctctgagcctgtgcgatgagaggctgtttagaagagggctcgcagcaatgagttactttgatagtcccctgttgcttctgttttctcaggcaggcagttttcccagttcaggaaggttggttcccttctcccctgactctcaccagttctgtaatgaattctgctgcctgaatactctttcttttttccttctctagcctaaattaagcccattcttcagggctttgttcaggtcctacatacgttccctaggaggcctctcttctgagtttcaaatggcccatttccctcctgtgaattcccagagcccctgggagattctcctacgcattttggttctgagtcctttcctttttggtttattggtttctgaattgatttattcattttattatttaagaaaaattagtgacaactctccaccaggctttggataaggttctagaaattcttcaaacaacgagacatctgggttttttgttgttgttgttgttgtttgttttcttaaacagagacaggaccttgctacgttgcccgggctggtctcaaactcctgggctcaagtgattctcccacctcggcctcccagagtgttgggattataggtgtgagccgccacgcttggccaagacatctgttttatacagcactttgtctcttcaggtaaaatgtgagctcctagatgttggggaccacttcgtttggtggccacgatcttcactctctttgtccttctcctaactcattctcttgcaaagtgttcgctgtccaaggagtgcttgatgcatacttcagaatgagtgaataaatcaatcgatcagctaactcagtaacctgttaatctagttcacagtttttaaaacctaggtcttcttgtatcacagagaaccaattatcttatttaatataggtgtacccgtttctaagaaaaaaaagacacgttgagttaaaactatgacaagaattcaaagttgagagagatgagtattcactttccaaaagacatttttgctttaccaaaaggcttgccatgaagtttctttatgttgtgagttcctgtctctaaaatatttgaaatgcagtcaaccatttagtaatgcaacctctaaatgaggcgagagagaggtacaggcagtaacaaccaaccgctattacctgcttgggctgccgtgggcagagacctccttgttcttaaaagtactctgaggacagtgatgggtacagctgcctcctgctgctggatcaactgcagagtggcagggcctgattcctttacatcattcaaagggtattgtgacgcacactggcttgcaaggttttgccaggcaatgcctttcaggtcctgggcttagaaaaagagtgctcctttggtctctagggagagaccagctgcacatgaaagaaggggcaaaaattactgtgaaaaggaaaatcatgtaggcaaataaccaggctatctaatcactagagcttgctttcctgtaaagattgtcccaaggacaacgtaaggtgaaaatctgggtggtgccacactgaggagtcctgccctttgcaagctggaattgaggaaggatggtttggcacgaggggcagatgaggccagccccgccttgtccaaggttaggtcaggctccaacctgctcctttgcaggtatcaaaggataattttaattatttaaaaatatgctgcaaaccaatccatggagtatcacaacagcaccactatatagaagcaagccataacctgagaagaagagagtggcaaaaatatttattctgaccaacctctgtcaaaaccaaaccaaaccaaaacgaaacactggcatttttttttctttttttttttttgtgatggagtctctgttgcccaggctggagtacagtgccacaatctcggctcactgcaagctctgcctcccggattcaagcgattcccctgcctcagcctcctgagtagctgggactacaggcgcgtgccaccacgcccggctaagtttctgtatattagtagagacggggtttcaccacggccaggatggtctcgatctcctgacctcatgatcctcccgcctcggcctcccaaagtgctgggattacaggcgtgagccaccacacccagccaacactggcattatctacagtaggttgtcctggaaacagggacacttctcacttatatacagtttgcaggttagaatgtaaaatatttccataagattccagaaggcactcaggagagaccaggggccaggctgggttcctgctgggagcttaacctacatggaacaggcataaaataatgtaatgacagagtcttggtgacagcattttgttgaaagcagataagctagggaaaacttaaataaatatatgaggacagaagcaacaaactggaaccacactaagagaaaggataaattggtttgatttgttgagtgagcaccacacgtttttttagctattagacacacaccatctagaatctccaccaccaccatggaaggagattctcttttgaaaatgaagtatttctatttgaaatgaaggctaagagaagaagctacggaacttgcctaacagtcacacaacgaggccgtaatgaatctatgatttgaatccagctatttgacgtcaaaggcgttttaagagtaataaccagtattcttcactgaggaaaaaaaatgaacaaaaaatccccatgttctttacgtaagacatacctggcaatataacagaaagtacaaagaagaaagtttcactcgcgttcgtgtgaagagacaaccaaacaggctttgtgtgagcgataaagctttttaatcagctgggtgcaggccgtctgagtccgaaaagagagtcagcaaaggggagataggggtgaggccgttttataagatttgggtaggtaaaggaaaattacagtcaaaggggggttgttctctggcgggcaggagtgggggtgacaaggtgctccgtgggggagctttttgagccaggatgagccaggaggaggaatttcacaaggtaatgtcatcggttaaggcaaggaccggccattttcacttcttttgtagtggaatgtcatcagttaaggcaggaacaggccatttaaatttcacttcctctgtgattcttcagttacttcaggccatctggatatatacgtgcaggtcacaccagcaggctatcagtaaagtcctccttaccggtgggaggtggagtagggctagcccctggcattctgtagggaagcaagtg

SEQ ID NO: 229 - DNA, 4001 bp, Homo sapiens
agacagggttttgccatgttgctgcgatggagggttcttaattcccgtctatctgattcatctaacagagcactgtccaatataatacaagccacctcctattaattaaaaatgttcaagtagctactttaaaagcacaagaagaaatgggtgaaattaattttaataatttttagcttttaattaaaactaaacaaattaaacttaaaattaattaattttaagttttattcaacatgtaatcagtataaaataattattactgagatatcttacattcttttttcagactaagtctttgaaatctggtgtgtacattacacttacaccacatctcaatttgggctatatttcaaatactcaaaaggcacatgtagctggtgactatcataaatcaccaccctacaattccttcgccttccatttgcttcaagaatctattccatgtctacattgcatacctaattgcaactggaattgctccatccctaaagctttaaatcagaggccttttttctgtatgtagaggaagagttgctaggatatcattatgcaattcccttatcagaattatacaagccttaatagcactctgaattcttatgtttaacggaaatcagtcacctttataatgaaacacattttctgtatatacagatcgaattaaaaaaaagtcatgtattttacatatacctataaataaaaatgaaatctattgtcatcaaaggctttttttgaagtgtgaaccacctcacacttcttatgaatctaagatccctttcaatacagagagaaaaatacaagtggcaaattttgtactttaatttacaaagttaaattatgtaatttaataagatctggtagtgaaaggatgaaatgacctttcctggcaggccttttctcctcacctgctccctcaacagcttctcactcctactggggctaaggataggctagggagagaacagtagctcaaagagtcacgtttaatttattaatttagtcccagataacaacgataataccttttcatccttgctttattaattatgtcttatatttaatgtattcttgttggaaacagatctaagaggcccataggtgtgtggggtgtgcagatggacatgtgctattttttaatgaaaagggcactgttatatctcactcttggaccacaacgatcctctcctctggcaaaagaaggctgcacaaggtgagaggaatgtaagaattcacaggggccggggcgcgatagctcatggctcagagctcatagtctgtaattacagcactttgggaggccccggcaggaggatcacttaaggccaggagttcgagaccagcctgggcaatattgtgagaccctgtctctaccaatttttttttttaatttagccaagcgtggtggcgcgtgcctgttgtcacagctatttaggaggccgaggtgcgaggagcgcttgggcccaggagtttcaggcttcagggagctatgatggcgccactgcattgcagcctgggcaacggagcaagaggccgtctctaaaacaaacagacaacccccgccctaaacaaacaaaaaagtaagatttcattggggctcagatgttctgaggacagcagcatgaaggtactgcgaccttactgcaggagctggagcagggtagcaaagtgctaactgcgtcccctctcgctcatggaaaactctcgggtgggagcggtgggacactggggctggtgttggggagccaggagacgaggcagtggtcggccagggcgagcggtcccgaggcgcatggggtggagagcaggaccctcccgcctgccccgccgggggtaatccccgcctagtcgctcgcctgcgactggcgtctctctacctccaaagggcggagccatagcagctcagccacagcagcagcacggccacttcccgggctgacatggcgcctgctccgcctccgcccaaccgcctcggccactcccgtccaggcctcgcgcattcccgtgggacgtcggcccggcgggcggctgcaggcgcctgggtcccggcgcctctggacagggcgggccgggcctgaagaccagcgagggagaagtgtgcgcgtgcgcgtgcgcgccgctacctgggctccctagaggcctgaaagtagccggagtgcgaacctgcacacgagattttaggaaaggcagaaccaggctttccagcagtgagatagcaaaaacacttcgaaaaatctgagttgccaattaaaagaaaaaaagaaggaaggaaggaggaaggaaagaaaaagaaaaatccaatttgccagaaagaatgtgaaacttttaaggtagtgtgtcttttagcccaaatcttcatgtgactgcgtatagacactgcaatagcaaatacatatctggcagtgctttccagggagcaggcacgccataagtgatttttgttgttgtttgtttttgagagagtcacactctgtcccccaggctggagtgcagtggcgcgatctggctcggctcactgcaacctccgcctccggcgttcaagcgattctcctgcttcagcctccagagtagctgggattacaggcgtgcgccacaaggccctgctaatttttgtattttgagtagagacggggtttcaccatcttgcccaggctggtctccaactcctgacctcaagtgatccacccgcctcagcctcccaaagtgctgggattacaggcgtgagccaccagacctggccaggcacagcataaatgatttttatttaattaatttatttatttattgcaggagactggagttttattattactcaaatcagtctccccaagcaattggggagcacagtttttaaggataacttggtgggttggcggaagccagtgagccaggagtgctgattggtcaggggtgaaatcatagggagtagaagctgtcttcctgtgctgagtcacttcctgggtggggccacaagatcagatgagccagtttactgatctgggtggtgccagctgatccatcaagtgcagggtctgtaaaatctctcgagcaccgatcttaggagcggtttagggcaagtcagaatcttgtatcctccagctgcatgactcctaaacctgatttcaaatcttgtggttaatgttagtcctacaaaggcaatctagtctccaggcaagaaggaggtctgctttgggaaagggttgttaccgtctttgtgtaaactataaactaagtttctcccaaagttagttcagcttatgcccaggaatgaacaaggacagctttgaggttagaagcaagatgcaatccgttcagttagatctctttcactgtctcaatcataattttgcaaagatggtttcaatccttccctttgggtaggctatgaagatgggagaaggccgttgatagctctggcttcttcctgctgacaggggaggtaatgggaatgggagtgaaccccaaggtgagaagagtggaattgctttgcaactgtctgagcaactcatgcaggcctggttgagtttccaagagttgcatggcaaacacattagtactctcatctatagttttactacagtgtttaagtgaacagcctgctataaggtaaataatgagtcctagtttgaggagtacaattcccaattttaaaagtaaagatttgaaagcattagtctggggacttctaacccacaaataatttagtgtgtagtctaaactgcacaagaaaacctcaagaccagctaacaactgtatactatagtttttcttttgaagcataatttttctctctccagtccccatttttattcaaaacaaaccatgatagaaccgatttgtttacaaaataaactttagtcttactgtacttggcctgattatttgcataaagtgcagcaagaataattatttttcacttaggcttttttcattggctctgatagaactctgttccatgaaggatctcagctaagactttttaaaagccaagcccaggctgg

SEQ ID NO: 230 - DNA, 4001 bp, Homo sapiens
gacccaaagagctggcttggtgctctttcccactgtggctaagctggtacctaagctcaagacggagtcccctttattcttccctctgttcttctcaagcagaagtggtctctcctcgtagccaccagacctgtgaatgtgctgggtcacatctgaagccagtgcatttcggagtttcagctgaggcccacggtatgtagtacttggctactgctactgatttttcagggtccaaaggctctttattcagcatgtgatgaaatctgccaagactgggtccttcccttcaaggcagttcccttttggcccagggtatatctagaaatgtcatccaagagctagggcctgcaatgagtgcctcaggattttgcccagtaccctatcctactctggctgaactggtatccaagttgcaagacaaagtccttttcactcttccctcttctctcctcaagcaaaggaaggagtcccttttggagccataagctgtgttgcctggggttgggggaggggtgctgtaagcacttacttagccatcctggctggtgtcttactagatcgtgcgctccccagtccactggctcagagcccagcacagcactaggacttgcctgggtattgcagttgttgtggcccagacaggctttcaagtttatttaggacctcagagcactttagcccatggtggtggaggtagtcaaaactcagtttctgaaacctgggatgggcaattctcctctggctaagggtggtctaaatggtccctccattggcaacagctaagttctgccccgtattggcagcactgaattctagagtcccacaatcgctgtgccctccctccaagtgcacagattctctctccacactatgtggctgctgccaggggatgggggaggggtggtgtcagcaattcaagattgtctttcttatcttcctcagtgcttctttcaacaatacgaagttaaaaccaggtactgtgatcactttgtgatcactgatttttggttcttatgaaggtgcttttttgtgtagatagttgttaaatttgatgttcgtgcatggagaacaatcagtgaaggcttctgtttggccatcttgctctgcgtcctccccaacttaggatttttttactttatcatgggttcatcagggtattgcatgcatttttgacttacaatattttcaacttgtggtggtttattgagatgtaaccctatcataagtcaaggagcacctgtactatggtaatagagacagctagtatatccctttaaataggaaacatacagtgtcataagctcaatgtgatttattcagatttagaccctagtaattataaaagtctatacaagtttttttttctttctcagcaatcttaacttcctgtgactgagattcattgttttaaagtgcattcacagttgagaaggtttacttcagaatctcagggaactgcactaaagaatctggtatcaattttctgaggatttaaaaaaatcatacttaaatgctgagttataaaagatgttggcaagtacaacattttttccaaactatacgataaagagcattgaaatttatcatgccccaaacccattaaaattatcttcacctgtaactgaacatcagctgttatttccttaccttcttttggctttcaacttctaggatgtctgttgaaacacccctcaatgtttatgtggcctccaaggcatacaaacatttaccagggtaaccccataaggaaagaattggaagtttcatttatttttttcctacctttagttctcttttttccatctttcagatctttagatgttctgagtttttctagctggagactggggaaacctagctcccctcactgtggccagtggaagactgctgtggagaacctgaatccaaagtgttttttgttaggagacgaagtaaacaggccagtttacagtttcaataccagtatgcctttttctctaccaacatctgtgtgatttacatcttgaatcatataattccattcagaatgaaaagctcagtttctgattggctgaaatgagttctagtattcctttctttgttagaagtcaaaatcacaatgttctggaacattagcatgtgttgggtaaagttgataacagtatactaaaactcagatagctgcttcagtactgaagtcagaacagttctccctggaaagacaaccaaacttttctcttattgtagcactacattgtaattgcttatttagctattttgtaagctacttttattctgttacttctctggtattcccagggtccaggacattatcatgaattcaagaaatgtttgatgcataaataaaggaatgaaaatatataaggaatattatgtttactaaaggcataatagtttggctcttcctgactatcctgagttatgatcaactctgaaaaagggagtaatttttcaagtctattaaacatagcagggtggaggtggaggtaagaagagttggggaaaggtatattatgaaacatagaaatactatttactaaatacatattaacaaatcttagcataatttaattttactccaggctgccccccatccctttcccctgccctcttttttcttgcctatagaatgtaaggaagggaacacacttctttgttaaggaaaactgagtaaggttgtcatttcattctgttatgactggagtttttccttctcatcattcatcaggtcaatttaagttttatacatctaaactgtgtaacactgcatataaaaataagtccatgtttaagacaaagtggaaaagtaccaaacacttttaaaaaatgaattgaagaaaaccttctctttgacaacttcggttttcatttggggaggtggtatgaaatcatctaggtacatttttgtctattgggatgaagaatgctatccactaagaatattgatttaaaaatcaaatgcctggactggaggggaaggaaaggacaaaagactgcatgctatgtgctattttacatcaagtcacctccttcctgctatacatgagcttcagttgatgccttggtttggagcctttgaactttcttagttatcactgattttaaatggtagtcactggaccggggatacaattaaaataatgtaacatgccatatgaacattttaaaccaagaaactgatttttcatttttgagtggagaactcagtccttaaaaaaatttgtggtccgaagaaacagcattactaatgaggactctcccttttacaactgggggttcctgcccacatcttccaaatacctcctttgccagggcttgcctaggtcagatgtgaagtaaatagaactgatgaatgatttttttgactctcttgtcatgtagttttctgtcatcttaatatgctgaaggggagcacattcagaagtgatctcatttgagaaggactactttcaagttctattttaggccacataaattttcaaaaaataaaattctgaattaaatcttaaacctttgggaaggcttcagatcacatatttggtggaatgtactatattacctaaataataaacattttatttggatacatctttgggatgcttgttaaaaaattatagattaaaattttagtgttagaattaccatttgaggatagaggaataaaaagttctctattccttcaaacttatatggactccatttttctagtgctttactgacatcatgaagagtctttcttctcaaggtggcaacatttccttgccttgtacttttattctgaatgatgtggtttttcgcccttacatttgccatatagaatttatgaggtttatgtgtttttgctctacagtttcttctatgatcttacattttatctcccttaagagtgtttagaaaaacaataataggaaaaaatattttggtgcaataataagtaaaaatgggattcctggaggtggattggaattatttagtcttctgtgttttttctagacatccat

SEQ ID NO: 231 - DNA, 4001 bp, Homo sapiens
taaataaataagacatagtttgtgacctcaagctgctcaccatccagtagcctatacatcaagaagtatgatggtgttgaaggtgctacaacagaaatatatcgaggctccagtgaagctgaaaggggtcattgagcttaactgggggtggggcagagagggaagggtctgagaagggtaaaaaaaaacaggcaatgcttgggtaggtgtttgtggagtgaacaaggatggtgagggtgttgcaagcccaggaaacactatacaacaacctggaagaataatctagcaaatcagcttcgggtaagtgaatgtaggttgggatggacaggttgtctggtgggaggttgaatggagtgagaagagagactagagaggaaatgtctgtggatattgactcctctgctttgggctgattcaactttctaccatgtcttcctgatacccctgggggtgatatcccctgaagctccagctcctccctccatccctcacatctttgaggtatgagagtgaggtacatttctgaaactgcaattaaggtaggacacactagatatcatacaagaggcactaatacctctgtgccttcagaaaacagagagaccacttctgattggagaaatcaggaaaggcttcctagaagtggaatttgtactcagtctgaagggatgaggaagacctggacaaggggaggcagatatggaagaattcttgggcaggtttgtttttagtagagatataagttcttcactgaaattatttccttcacctttttccagacttctggtttctgctaagactactattagaccctataggaagtggaatctcagagctcattgcaaatcaagcaacagatattatttgcaagatccccaaagtgcattgcaagatcttgctaggttaatgacaactgtaaatgtgagtacagagtcccataacataatgactgtcatctcttagaatctgagggatgaaatgcttatatattgtcccacctggccttgatagctactcatttaagacatagtgtaggtgttacatcctcagaaaacctttctcctgggctgctaccatttctcaccctcctaacctcagttgggtgcctgcctctttgattgcatcataaacttggtctagctttctttgtatttgcactattcttgattttaaatgtgtttatttcctccaccgggctgagagttattatatttaagagcaagaatcatgttttacacatctttgtattcctagaacctatgatagaacctggcacacagcaagtattcaacaaacattgggcaaatgaatgagtcattgtaagcaatttaaattatgaggtctaaatatagacacaatcaacctaaatatataaaacgaaaaatacatatataaatgaagatcactattgtaacacggtcttcagggaaacgttacagaacattagtgttgtagtacaacaaattcattctatgtaatgcactggggaagaacactggctagacgcccaaaaagctctgttccagtcctggctcacaaacaacttgggtgacttttgtcaatcatataaactctccaagtctcccttcccctaccgataatggtctttgtgttcaaaaagacagaggcggatgctctaatcctgtccctttacactttacatttaaaggtaaaaagcaatctttgatctgtgctgtactctacctcagacttgctatcagctgaagcctggcctccaagaagagctgctccatttctatctggagaagggatgagggcattgaagagtcgtggaaggcagctgtgacaggctactttaaaggcgacgcaaacatttgagacgccatgtcctgcaggcctcatttcctccattctgtcttgctttctttcccagccctgaaacccaggtctttggtctttttcttctgttgcattcccttctcactcggtttccttacgaccagctcagcagcaataacaggaatggagagggaattgtccacattcacagtacaatgctctggttttatcaggtctagagccagaggcactggaatgttaatggggccctcatttcccaagcagctgtcctctggatagcagatggcagttgtgacaggagagtgacagcaacctatgtgtagcctggccaaggtatgatgcagatttcagccagtccccagaagccaaaaacacatttgacaattggaaacatcctcataccctaggacaatatctgctgcggtgtctaagggctgactcatggcccaaggccatggccttcttgaacccttggtaaagaaacagagaaatatatttctctccatctccctctccctctactctcctttctttctctctttcgctccctttctttctctctcttacacacctgttcacataaaaaacaaaaatgtaagcaccagcttgtgattaaaacaggcttcacaagcaccctgtgaggagtactgacacatttgcctctgtcctttccttcaacacctctgtttcttttctccttcccacttgtaacttaactgagagagacctgataggacacttggttcaaatctttcaatttacccaggagaaagctgtgacccagaaaggttaagagatttgtccaataccacatctattgaacttcagtcggctagaaagtttttggataaaaaggattatgtttcctcaggggaagagtaaactcttagaatccatataaaggccaggcatggtggctcatacttgtaatcccagcactttaggaggccaaggcaggcggatcatgaggtcaggagttcgagaccagcctgaccaacatggtgaaaccccctctctactaaaaatacaaaaattagccaggcgtggtggcatgcgcctgtaatcccagctactcaggaggctgaggcaggagaatcacttgaacctgggaggcggaggttgcagtgagccaagatcgtgccattgcactccagcctggggcaacagagtgagattccgtctcaaaaaaaaaaaaaaaaaaaaaagaatccatataaaggcagaattatttctaccacatagaatcccaaaagtagtgctcaaagaacaatttcaatattcaaaaaaaaccttatgatattacacatgttccttctatctgaaaatatcagccatttaaaaaaataaagctgaatatacttaaaaaaacccaaaatgtataaaaaataatatccatatccctacattcagacttattaaatttgatttttattaccatcactattttaggtcaatagcatttaatattctctttaaaaattgtatttgtaattatatgcactagatcaacataagcaatataaatatgaaaatgacttaggagtatatgaggtagtttccttggtagttatgagctttgaaaatttagtcaatgtgagagaaataataaaaagagagttcttagtggtgagaaaatagaaagtaaacatcctatacatcttccccagctatgcctctgctactgcacagtctttttagccagggctttttgccacaggtctgctaaaagcaaaataaatagtgttcttatcttcactctgactcattagactggaagaacaaacccagatcaaagtgagtagagagagagtgggggcaggaattgagagggtggagtggcattttataatctattagtaactgaggagctctagttaatttacacccagtaccagcaagtgggcaaagagatttcagagtctccagctgcagttttccgggtcacccccacacacctgctgttcctttgccttggatcactgagtcagtcaccttttggcccagttagccaactatcatgatgcacctttctgtttctcagcatcttgaggagtcgtgagtggatgcctgcaaatggcaggagaaaatgaagaagcttctccacagtagatgtttaaacgaggaaatgtttaggcttcatttgtcttcactaaaaatctttcttctttgacagacctgcc

SEQ ID NO: 232 - DNA, 4001 bp, Homo sapiens
aacacgacagaaaagtcggccttgggaaagctggtaacaaagcaaggccaacagggagaggggactgctgtcagccaggtccctggtgatacctctccacccatcaagatgataagagcaggacgatcaagaacttttatagacctacataaacaacacagcaaccacaggcagcaacaatcaaacacaaagccctgaaagcaacatgtaccttgcactttggaatttcaattattcaaggaagtctagagaatgcatgggagaattattttttttaactttatgggaggcctttgcaaacatgccaaagttctgaaagattggccatatattctggaaccccaccccgcaggatacttaggatgactattagctctgcactgtccatctgtcccaaactctatccctcgtagagataagaacaggacagaggagcaggcagctcacccccaccccttcccacccaccctagccatcctcccaccctccccagaagccaagagcagggtgcagccagaggtaggaagcaaggtggtctcagctagcatgctgagtgtgtctgctttgcacagaggaggaagtaatgtgggaggggaagccattaattagtcacgcttgctaattaattattaaccactaagtagttgccttggaaagttgggccaactcagcccctgcttctcaggggctctgagactgttgcagaggagtggggacttacagggacagaggggtaccttagcacgcctcccgtctccgccagcttccccttctcccagctcagcccagtctctgactgccagcatcaaaggggaggcactgatcttcccagtggtcccagcctgatgctgggtcctctctgggatgacttgctgccccaagtagagcaaagagaacagcgtcagatgcccagagcccctggctgtgggctcaaggcttggttctgctgcggtctgtactaccttggggaagtcaccaggcctcccggggcttcctttcctcctgtgcacaataaagactgcacagtgtctaaagcctttccaggtccccggtctgaatctcgacctcttggtcaatgtcaggccaagaaggaaacccgtacagccacatagcggaccctcacatctgcctctgccgaggccgccctccacagctgtagggaacctgccccagagtcaacaggtgagagcgagggcaccacccccacccaggaggctatgagtcttaagtgtctaaggcattgcttttagataaaggcagttcaggtaacatccccaccccctccctaacacagggatccctcctgggcctcttcaagctccagtactgggccctaaaaagcagcccacccggctgaacaatgtccccagaaaaaggcagaggagaccagaaggggcacagagggagggagggaaactccagagcaccttccctcaggccgggccatgggggatcctcctctatcccaagtgtgtcccccaaagccaggtctcaggcctgcctgtcccagctcatctctgcttgctctccctctggtggaaactaaggcctaggcaaccacaagaacaggctcccgtccaagcccaccagcacccctctgtcatccctacacaccagacataggctggcgggggtgggggtcggaggggggtgatggccactgcttgggctcctccactcccaggccagcctgctctcagccccaaagacccattccacctcccccgccctcacctgcttctgggctttagtccaggagttgaaaaacagcccctgcttccagtcagggggctcagggccctcacatgtcgcctcagggtctcccaagccacaggcctgtgctctctctccagctgacggagctgctggccgtccgtccgtctcggctcacctgcctaccttgccgtccctcccaggctgccgggccaggggaaccaggttacttgttatgacttgagtcagaggggaggagcaggtgagcaagtccttccctgaactaatcccgtgcaactggtgccagcaggcagctcctgggcctctgcacttccggggggcaggagggtagcagggaaaaaggggctcccatggaggaatccccaaagaagacaacaacaagagtcatgtcttcatggcctcaagagaccctagtacaacattctgagctgtgaggtacctgcgtgccctcctgtcctgaccctggctctccctgccttcctttgacctcagtttctctttccagaaattgaggcctgttaagcaccccggaagcaaggtgaaatgtccactgtccatggaaaaaacaagcaggacatttacaaactgacagggatgggtcactgctcttccccacatatggaaatgaagaccaaggcctgggttttatctctcccgagtgaggattttaaaacctcaggcaaggcagctggaattccaatatgcagaagttctagaatcctagagagagaggatcaggctgttctttttatcccagacattgtcccccaagggtatcgaggccatcacttctctgttgattatttacatccatcccccagcaacgcatgttcatggggcactgacaggcactgacctgagcccaagtcctgtttcctactccacaggaggtccactgtgaccccagaccctaagtccactccccaaatgcaaggagccagagaccaaaatggaacttatttcctataaaaaataagcctcaagatctcccatcccaccgacccccaagcaaatgggaaactggaatctagcctatttcaaggcggaagcagagctaacgctgactgttgcctggcctgtccccagcaggctgcacccctcaagtcttcatcttaccacctccctttccccccactctctgatcttcccaccattcccccgacccagattccagtgcctcaatacatgtctggattgcttcccctcccccagcccctaaaaagtcctgtccccactccctacccccaagtgcagggatgacagaggaagtttgctttcaccaggcatctcctgtggagcggaactcatggggctggagtcccccagcatcccccactgctccggtacacacacccagcacaccttcacattcctgtacacaccctttttccaaacaatgctagccccagagtgctccaggctgaccacctcattttctgcccaggctgaggctgaggggccctaagaggggacagttcttcctccccccgccccattgggagcttgttctctgggtctcccaaagagcctgcagccctgcccttccccagtcctccgtgacacaccgtccctccccatagaggcttggcactttcttacaaagtcaaacagagaggggttgactctgggcataagcggcccttcctccaccttgcccatctccagctccaggtgggggttggtggaagtttctaccagctgtgaattggctcacagttcacatttcttgagcataaaataaaattaagaagatcactaaaaaagtcaattatatgaaataaagttctaaaaatataaaaacatagcaatatatatgcttctttattaacattaagcagggtctagcagtgggtaatttcacacaagggctgagtgtaaacaacatttcaagactgctgtgactgcagtgtgatatgaaactatgaattctattaatggcaaagtcacaggtactgccaatgctactgtgatttgttgtcttcataactaaaggtgatgttaaaatctgttaaaggttggtgaaaaacaatgatatctttttttgcctcacctagtttacacatcctctgaattccatctacagatgcctaatgccaatgaacccagttaagaatccctgccctcaggtaatcctccatctctgacttcaggggaggttagtacagatgctcaatctcactgtttgcattgatcctttggaattctcaaaaacaccttgctcccccaaattcacgctcaatatttcccaaccttgcagaatctgaggt

SEQ ID NO: 233 - DNA, 4001 bp, Homo sapiens
cactttcttacaaagtcaaacagagaggggttgactctgggcataagcggcccttcctccaccttgcccatctccagctccaggtgggggttggtggaagtttctaccagctgtgaattggctcacagttcacatttcttgagcataaaataaaattaagaagatcactaaaaaagtcaattatatgaaataaagttctaaaaatataaaaacatagcaatatatatgcttctttattaacattaagcagggtctagcagtgggtaatttcacacaagggctgagtgtaaacaacatttcaagactgctgtgactgcagtgtgatatgaaactatgaattctattaatggcaaagtcacaggtactgccaatgctactgtgatttgttgtcttcataactaaaggtgatgttaaaatctgttaaaggttggtgaaaaacaatgatatctttttttgcctcacctagtttacacatcctctgaattccatctacagatgcctaatgccaatgaacccagttaagaatccctgccctcaggtaatcctccatctctgacttcaggggaggttagtacagatgctcaatctcactgtttgcattgatcctttggaattctcaaaaacaccttgctcccccaaattcacgctcaatatttcccaaccttgcagaatctgaggtttggaagggagctggctaaccaaacctcctgccaagaaccccggggagccatccttggagctctctgatggccatgtcattcaattcaaaataccaatgggggaggtgggcactccagaggccagctgggaatctgaaacagctccccactccagtcaggccggggagtcaggggactgatgccccagccccaaaccccagagtgccgtccagaccaccagttggtgaggaagtggtatttccttgcaaaacattatagtacttggaatctgatctttgcagacaagagcccttccccagggaagagaaactggacctcttcagtgttttcgtttcctgaggaaaagtcccgagtcagaaaactcttccccagcgctgtagccatccactctccattttttttaaaaaaaagttccttcttttagggtcttctgataacaccagattggaagttctttaaagcaagggcctcgtcctaccatcttcacatccccaacagcccccagcaaagtagtctcaggcactgctaaaatcttacttcaagaattaaggaatcaatggccagcgctagagacaacagtgaaaaaaggaagaagtgaaatagcccgggaccctccaggcaagaggggtaggagatggttccttcactgttttcttactcgcgtctgctccctgctcactaggaaaggtgttcgcctccactaagcaaaggtgaagtgggctgggacaggggaactccaagccagcttggaatgcgccctgaaatgagacctctaggctttctctaaaaagcccctttgtcctgtccaccctgctcccctcccccactgcgccctccacatccaggctggcccgagactttgctccttttgtttggctgctttctggcttcccggaacctggccaggaagatccacaggcacgaagaaggtcgaaggagaaaggttgagggactggaaatgtgcatttttggtaggaactcagaattcctgcccctttgaaaaaattaccccattccctgtagggcaccctccgctaaggctgaagaccgtgggttcaggggcccgatcccccgccccagttcacccgcactgggtgccccgaagttttcccgcttacctgtcccatggagctctggcgccgcccgcctgcccctgcgccctccactccagcctcgcagcttcaggacctgtttgtccaggccatcttccctccccccgagcctccctgcggcctgccctccccggaggtatttcatttaacttcggcatttgcagcatcccaaatgttaaagatcccaagacatctgtcccctggggcataccaaggcccagaggaaagaggggaagacgcaagaagggactgaagagtccgatccaagagtcgggacggggccgcacgcgggagtgacgacgtacccgcaggggtgagcgagctgcgggagcagccgctcgaggggcgaggctgtcccctttgccccgctttcggacgcccgcgcggtgggacacccctggcgccgccagtttccgcagcccaggcgggacgaagcttctctcttggtcccagtgccgcctttcattcgcgcgctctggcctggctggggccagttttcattcctggagacccctaagtggaagaatgaaaggagcctgcggaagggcgctcccccgaccctgtcctccccgcaggcgccctccccctcgctgtgcggcgctgcgggtcgcgcggggatggcccctctccccggccctggccccggcccactcccactcctcccgccgggcccgctggctgaactccggctggctgaagggaaggagcaccctcccggcgagcgcctcctgctgcccgctgcgagctgctgtgtccccgttcatccattcattcacttcccggttttcagttgttcaataaacatttattgagcacctactagtgcccagcacgatggatcaaagctcaagccccattcactggaggattctccaatctagacgagtgatgaagcagcacagtacctgaagtaagggctaggaccccgggcaagaagagggaaggctgacccaggctgagcctcggcaaaacttggccagaggaagcaataccagaaaataagagagggacttgaaacagcagtgacaggtgtacaaaagcacagcagcaagggagcacagcaggttccaggagctgcagggaggttagggtttgggatgaggaaggagtaaagggaaagaacatggaagagagacgaggctaattcgtcagtcagtggctcatccagaagcagggcagccagacgcagaggctcacgcctataatcccagcactttgggaggcccaggccagaggatcgactgaggtcaggagttggagatcagcctgggcaacattgtgaaaacctgtctctaccaaaaaataaagaaattggccaggagtggtggcacgcacctgtagtcccagctacttgggaggctgaggtgggaagatcacttgagcagggaggcggaggttgcagtgagccaatatcccgagactacactccggcctgggagacagggcaagaccttgtctcaaaacaacaacaacaacaaaaaacccacaacgaacggccaggcgcggtggctcacgcttgtaatcccagcactttcggaggccaatacggacggatcgcctgaggtcgggagttcaagaatggcctgggcaacatggcaaaaccccatctctacttaaaatacaaaaaaaattagcgagcatggtgctgggagcctgtagtcccagttactcaggaggctgaggcatgagaatcacttgaacccatgcagcagaggttgcagtgagccaagatcactccattgcactccagcctgggtgacagagcgagactctgtctcaattaaaaacacacacacacaacaaacaaacaaacaaaagtaaggcaactccatgtggttgtccaggttgtgcactatactaagagggaaggttcaccattctccacccacctcgccctatgtttggtcagagctgtatctgcctagagagggtggctttttctaatttgtacaaaggcattatatgaggtaagatgactaagagccttgtgggctaggtgaggatttaagatttttatactgaagttgaagagaagctacttgaattaatcagcactctctgagaaacagaaccagtaagatgtgtatgtatagatagctatatctagagagagagaatgcaagagagagattgattgattttaaggaactggctcattggattgtgaaagctggcatatccagaatctgcaggatagactctcaggctg

SEQ ID NO: 234 - DNA, 4001 bp, Homo sapiens
tcttctactcaactaagaacaggaactaaatctggttcatttttatattcttggcaccttgtgcttggcatcccacaaggtgcctaatgaacgtattttgtacaaataaataaaaggaaagtcctcatctgtgacagtttcctattagtctatgacagactctatatactggaactttcttttgttccagttcaaggaaaggccacacatgccctgtctcccctctgtcctcaataacctgtaactctcagcctgggcaacatagtgagaccctatctctacaaaaaattttaaaattagctgggcatggaagtgcacgcttgttgtcccaggtacttggggggctgaggtgggaggatcgcttgaaccagggaaatcgaggctacaatgagctgtgattgtgccactgcactccagcctgagtgacagagcaagaccctgtctcaaaaaaaaaaaaaaaaaaaaatctgtaacgcaggcactgggtctgacaacaagcatatcagaacttggagacgtgctactcctgggcacagagacaccaatctacagcagaacaaagtggtgattaagagctctagcctttgtgtcaggcacacttgagttagaatcccagctctacccttttctagctgcgtcaccatgggcaatctgcttaagcttcagtttcctacctgcatagaattaagtgcagttaagtcacagatatgttgaagagactttataacgtaatatacataaaccccttagctctagcacctactaagtttacacagctcctcactgccttttaccaaagaaaactatagggcagagctaataggctttctccgctccttttctcttcttcttttgtgacttctactaagcccaccactgccatgcctagtctctgacaaagaaaatgccagaaaatggctttctgaccgaggtcccactgccccagatgaagtaaggaaggttgagatacctccacatgccacgctttcaaggagaaaaacaccttctggactgacactagctacatataaaacacctcgttttaaaatccttccaccaagaaacagcactagggagctgcttacagcctttcccctagcttgtccaggacgatgtcaccagccaccagctgcttacgcctcagccgctcttttaaatctgggaaggcccgaagcgccggcacatcctcaaaccgcaggttctgtgcggcctgcagctgttccgccaggttgctgagggaggacaggaggggctggcagtcccgcagggcactctgccacaggccctgctgctcctccaccacggggaagcacttcttcagcgcctcctgcacggcaagcagaggccggtcttgagtcatcttctgctgaaaaagataaaaacagaaaataaccacgttggggtgccaagtcagtcggggaggcactgggtcgagggtgggcgtcatctctgttatcgtgttcagacaggagttgtctcacctccagaagcagggttttttttttgtttttttttcgagacggagtctcactgtcgcccaggctggagtgcagtggcgctatctcggctcactgcaacctccgcatcccgggttcaagcaattctcctgcctcagcctcccgagtagctgggaatacaggtgcccgccaacacgcctggctaatttttgtatttttagtagacggggttcctgacctcaggtgatccgcccgcctcggtcttccaaagtgctgggattacaggcgtgagccaccgcgcccggcctgcctcagctttctgaaggagaccctggtttcccctcgggaagggtaacctggatagggcagtctcctgcttcagaggattcctggcgtccaagcgccgtctcttctctgacatacagtcctgtctcccctgcccgaggctgccggtcgccttcctgaaaaagcggaaaaacttaaaagtccagacagccaaagcgtgagaaccctccagggactgcaccacgcgcccacagtctctctgcgcatgctcacacgcgacctccccacaaagctactccgcgggcctgcctggctactgagtcgcgaaaatatatcgtagtgccgcaatgacttctgggtactgtagtccaacatgtggactggccactcggcttgaagcttccttgggattggatgttgggaccgtccaaacacggcgacttctcatttgtcagcctgcggcagtttaaattgggtggcggtggtggcatgtcctgttagctgtggagtcttttcctcttatcttgcgcctccggttgtgccttaatgacacttttgacattgtgtatcacaaccaactggcaaaaactagtaaatcacgggctcctgacgtggcagctctggctaaaatgcaggtggacgtcctaggtgcccagggagttcgggctcactggggagtagggtgaaggaaaccctgaaaccgagaggctggaagcccgacttgcgcagcataaaaacacctgcagggggaaagcctacatgaggtacgggttgtcatcccgtctcatcttggccatctgactgatggagatcctcaggcacccagcagactggggtgtcacccccactacccactgcccagggctgacctcgggcggaagagcgacattcaaatatttgttgcatatggagcaacagaccagggtggaagagagagaaaggactttccaggaaggtccaggcttgccaggacttctatgcttggactgctctgtccccaagctcgctggtgcccatcaggagcctgcttggcacctttgcttatttcttcgattgttcctcaactcagagggggagaggcaagattatcactcccatagcctataacatgcacgcttaaacacaacccctctgacatggcttcagaccgcatccacaggtgaaaagcaccaaatccaaacaatcaggccacaaacccgtcaagagctcgccggtctggccgtccagtcgccgcccgccttgagactcagcctgagctacagcttcgaaactagcctctagccttctgggtctcagcacaactcttgagcaatccaaccctgtggccgtgggcagataccaagatgcacagttagcacctccgacaggaccgcggctcggcggggctcgccgtctacacgcccattcccaggcccacggccacgacacccagagctgcctcctgccctgggctccctggagcctggtggccgcggctcatgctgcagtcaccgtgtggccagctgccaagcgccactacttgcacctgaagtcgcagccccgcgctgcgcacccagtcgaggcgccaacacgcgaactgggcgggagtggccggcccgcgggggagcgaggaacgacagggttccccccactcgctgcccagactggccgcgggatagcgcgccccccccaaagcctgcacccctgccctgctcctctatcattccgtcccccttgctctgtcaaaccctgccggggctgctctgtctctgccgacccgccacttgcccgaagttcggcctgaggagcttggggccctgaggagcgccgacgtaggcagccagccagtcaatcagtcagagggtcacggcggcccctcggctactcagtggcagccaggccagaaagaagcagccgccaaccctggagcagaatcctacagccgacctgacctagtaggcccccagccctccagagcttggggtattgcagagccgccacaaggcctgccgggagtagtagtttgtatagttcgcagccggccagggcggagccgggtgggttggtggggagggcggggaaacaagcctggaccacaactcccaggagtacccgcgacggcggcggcctcgctgtcgcactcaggctatagggggcgcattgggcggaagaccctgggccggcaggaacttgcttgtgattggatgttgtgggacggcggcttctcattcgtcagcctgtgactgtggagtttgaattgggtggcggttgactgtagag

SEQ ID NO: 235 - DNA, 4001 bp, Homo sapiens
gaaacaccaatataatttaatgggggggaaagaatattctttttacaagtagtattggaacaatgggtatctatgtggaaaagaaatcaaatttcaatttttatgttatcccctacacaaaaattattttaaaattgattatataccttaacatgctggcaaaaactacaaaacttctagaagaaaaataagaaaagaaaatttttgtaaacttgagtttggcaaagatttcttatatagcagaaaaaaagaccaaactataaaagaaaaaatttgataaaattgacttaataaaaattaaaaccttctgttcttaaaaaaacactacgagggaaaacaaaaggcaagcaagaacctgttggaatatattgacaacgcaaaaaaacctaaccaaaaaactctatctatatctaaataacaccaacaacttaacattaaggacacaaataactctatttaaaaatgcaaaaaatacttgaatagacaatccaaaagaatatacaaatggccaataaacaaatgaatatacatttaatttaattagtcattagaagattaaaacaacgaggtaaccctttttaccgttagcacaatttaaatttaaaaaaagtggtaaaagcaagtattggtgagaatatggagcaactggattttattcattggttttgtgaacataaaatggtatgaccattttggaaaacattttgggaatttcttacaaaattcaacatatacttacatatgacccagcacttccactgctggatacttaaccaagagaaatgaaagcatgtgctcataaaaagatttgtatagaaatattgtatagcagccttattcataatagtcgcaaactggaaacaacccaaatgaccatcaacaagtgaactgataaacaaattgtggttcatccatacaatggaataccactcagcaataaaaataacgatacattaatatgggcaaaagcatgaatgaatcttacagataacatgctggtaaagaggctggatagaaaagagaagtggattccatatatttgaaatattataacatgcacaattaatctatgatgacagagatcagatcagtggttgcctgggctgagaggtatagataaagactgattacaaaaaggaatgaaggaactttcctgggagacagaggtgataattacttgctgcatatatttgtcgaagccaacaacctaaggacttaaactgtgaattttagtggatataaattttatctcagtaaagttgattttaaaaaaaacttaatatcatagtaaaagaaagtaattttcaggcaagtaaacaaaaaatagagtttgtctccactaaataaaattctgcaggatgtatttgaagcagaaagaaatgtttctagatgtaggactaagatacaagaaggaatgaagggcaaagaaagtggtaaacatgtgggtacatctaaatgaagattgaatgtataaaactgggacttggaaaatgataattcaaagtaacacagcacagagctttcaaaaaagaacagttaattgttctgaggttctttttttgccctgagaaaggtaaagacattaacattatactttcatagattaagattcatgttgtcaattgtgaattttagctccagatcaactgcaagaacaaatcaacaatcccaaaaggacccacagaccctctggaggaagtggactgctcctgcaggacccgggagaacaccccaaatgctgtgtgtcccagctgtggaagtgggaaagggagaccctcctctcccaaacgcacacccccactggagaaactgaagacctctttgtgggagaagttacctggagttgagtcaatttggagagccaagtgaaatacaggggtggaggaggcagtggagaggtcctgggggctcactgcatctcctagcaggccattcctgcctggcaccatggggatccatcaggagggtgaccagaggagcaggggtagaactccatggggagagggaaatgtccagctgaactttttaacaatttggatggggcgagacgcctcctggtcagaactcaggggagggcgcaaatctggtgtgcagactccacaggtgggggacgaaccaagcccttttctttagcagccggtagcctggggcaagttttcaaccctgttacagcctccacctggaaacagacttggggttgttgcgggggggcatggtgggagggagaccagcccttcattttgtgtgggagctgggtgaggcctgtgactgctgggtttcccccacttccctgacaacctgcgtgactcagcagaggcagccataatcctgggtacacaactctattgacaagggaacctcacccccatcccccacagcagccaagcgagacccacccaagcagagtctgagctcagacacgcctagccccgcccccacctgatggtccttccctacctaccctggtagcagaagaaaaagggcttataaccttgggagttctagggccccacccactgccagttccccccagtactaccacaactgatgctttctggaaggcgccacctcaggcaagaggccaaccagcacagaaatagaacattaaacaaccaaagctaagaaccctcactgggtccagtgcaccccaccacctccactggaacagacactggtattcatggctgagagacccacagacagttcacatcacaggacactctgtagacaacccccagtgttagcctggagccaggtagactctctgggtggctagacccagaagagagacaacaatcactgcagtttggcccacaggaagttacatccataggaaaagggggagagtactacatcaagggaacaccccgtgagacaaaataatctgaacaacaggcttcaaccctagaccttccctctgacagagactccccaaatgagaaggaaccagaaaaccgaccctggtaatatgacaaaacaaggctcttcagcactccccccaaatcacactagttcaccagcaatgcatccaaaccaagaagaaatccctgatttacctgaaaaaaaaattcaggaggttagttattaagctaatcagggaaggaccagagaaaggcgaagcctaatgcaaggaaatccaaaaaattatacaagaactgaaggaagaaatattcaaggaaatagctagcttaaagaaaaaacaataaaaaattcagggcactttggacaaacttttagaaaagtgaaatgctcggcaaagtttcagccatagaattgaacaagtagaagaaagaaattcagagcttgaagacagtgtctttgaattaacccaatccaacaaagacaaagaaaaaagaataagaaaatataaactgagcctccaagaagtctgggattatgttaaatgaccaaacttcagaataatcagtgttcttgaggaagaagagaatcctaaaagcttggaaaacatatttgggagaataattgaggaaaactcccctggcctttctagagacctagatgtccacatattagaagtacaaagaacacctggaaaattaatcacaaaaagatctttgcccaggcacactgtcatcaggttatccaaagttaagatgaaggaaagaatcttaagagctgtgagaaagaaacaccatcattcttcacagaattagaaaaaacaattctaaaattcatgtagaacaacaacaaaaaaacctgcatagccaaagcaagactaagcaaaaagaacaaatctggaggcatcacactacctgatttcaaactatattgtaaagccatagtcaccaaaacagcatggtactggtataaaaatgggcacatagaccaatggaacagaatagagaacccagaaataaacccaaattcttacagccaactgatctttgacaaagcaaataaaaacacaaattgggaaaaggacacccttttcaacaaattatgctaggataattggctaaccacatgcaggagtatgaaac

SEQ ID NO: 236 - DNA, 4001 bp, Homo sapiens
cttttagttggtaagccttggtatttgtcgaggccttcccctcctggagacaccatgtccactgactcctctaaggatagacacagacaggtgacccagcggatagccaaaccggcggcctcccacagtccctcttttcgccacccatggctgtgacccttttttcagcctcactgctcatcttgatccctccacggcccactcagccagaaactgctcttgcacaccagtttcagagacaggagaggggaggcaaggcgagagccccaggcctgtgggtgtctaccaaaggaagaagggccagataggaggctgcaggtgacaagaccgcgcatgggggtccagcttccagacacctctgcttccttagggaagcagccccttttcatccttagcctctcacacattcccgcccagagtcagagaagtcctcacctggtgagagcgctgtgttctgtatcccttgcctgacaatgatgctttggtactggggtggcagggcctgagctgggctggatgcctcagtgggtactgctgtctttgcaatgtctgggttatagaagaaacactggtgagctgagcaaggttgggattccactttctgggactcccccaggcatacctaggggctcaacctctgtacttcaaggcatctcaacgctgaaacagaacagtgacctctcaaactcagccaggcagagctattctggatgacatcctggggaattctgaatggggccatttcattcaggcctcagaaagatcctctggaaagtgggatttatgatgtagcccagatgacacctctccgcctggcctgcccctcacctaaccctcctgcatctcatcacgcggatggcttcactccgcattgccagtctcctgagcatcctgggacccagagtcacaggctgcagagcaatgttccatgcccgctttgaggattgtccagttgaaacatctcatacccacagtcagggttcccgtgggccatcactgcacggcacaccctggagtgctaacacttggacaaaaagctgacctgcctcaaatcccagaatagcagctgtgttcagtttgggggacaaatttataaatgtcatatatgtagacaaatggatgcttaggaggcctactccactgagcagtacttctccattttactgtgcatagagatcccctagggatcttgttaataacacagatgctgattcagtggatctggggtgggaacctgagattctgcatttctaacaagctcccagacgatgcagacgttgcaagtctaaggaccgtattttgaacagggagtcctcagggtgtccaactttattccatgatgtgctcatcagtttacgctgctgcttaggcttctctgatttggctaactccaaatcctctccaaacttgtcaaaacagagctaaaactagtttctactctatgtagacatactgccaccttgagatttcatgcacaatctagggggaaaaacttgatgataaatggagactgaggcaggagaatcacttgaacccaggaggcagaggttgcagtgagccgagatcacatcattgcactccagcctgagcgacaggagtgaaactctgtctcaaaaaaaaaaaaaaagttttcccctttcttcccttaccaaaaatcaatacacagcagtaactacttaccacaaatgcagcattttgaaaaattattttctccccatgcgtaatttgactttctcactaaatcatggtcctgtaacatgatctggtagggtactcaattaaaagcttcaaaaaaaaccacatctttgtggccctagtggcaccaaagtttacctggcaggctggtggcacgagagaacataatgtcgggaaaagcactcagggcggaggaagagattggaggtccagagatgctgaggagtgagaagttctccatattctgaccactgcgggggtacagagatcacacgcctgctctggagaggctggctggtttgtccagaggataaacattctgagcacagttgatgtcacaaggcacatgattccactaccaactaggttaccctttggaagatgaatggagtctactgaaagcaagattaaaatgtgtaaagattgtatttgacttgccattgcccagtggcaggccctgattgacaatacccagagagaagaatgtagtagagatactgtagtgatgctgtctatttgtccccttttatctttgttatcatcagttttctgtgttgacactgtctacccccagccctccagccctggaaacctctgtcctgtctgaataatctccttccttttcttctcctttatcagcctaatctctgtcagcaaatatttttattgttttgttttagtttgttttttgaggtgtatatatttttcacattttctttggaaattcaaatttgtaaaagttgcagaaattaggctgggtgcagtggctcaggcctataatcccagcactttgggaggccaaggcgggtggatcatttgaggtcaggagttcaagaccagctagacaaacatggtgaaaccccatctctattcaaaatataaaatttagccatgcgtggtggtgggtgcctgtaatcccagctacttgggaggctgaagcaggagagtcgcttgaacctgggagacagaggctgcagtgagctgagatagcgccactgcactgcagcctgggtgacagagcgagactccatcttaaaagctgcaaaaaataaaatcaatacaaagaacacccttatgccctgtatccagattttcctattaacattttaccccatttgctgtatccgtccccttcctcctgccccctgccccatgtgtatgtgtatatacttaattttttctgtgaactatttgaaggtaagttataaacactatgtccttttatacctaagtacttcaatgtgtatttcctaagaataggggccaaatattgttttcagtggttggtgctctttttagcaagtgactaaagcacaaatgggtggcttactcaatactattttgctcattgcttaagtcagtttgatggggagactctgggactccagagaggcaaggttgcctcttcgtttcgcttgtcctataacaaccttgtgcactaacgaggtgtggaataaggtgaaagatgattgtgacacttggaagataagctgaagacacccctttctagattatcacaacatgtcaactagatacagagcagggctgcagatctagatggcaggtatgtttatgctgcatggggagctatggccgctctggaaatagtgatgggcttgttttgcagtgctgtcgagcatgtgtgagtgaggtgtgagttagcttctgcacgtgagagcccagagttgtcttcctgtgtgtatttattcacggtactgaaacattcgaaggacaatgggagaacatgattcccctcgtgttcctcccagatagcctggtttggaacattagcatgtattggaaagtaagttgaagccacatactttggcagtttggggggtatcagcaatttcatttggtccattatggtgtagagaaagctcatgagtctgggcatcagcttatgtgacttctaaccctgctccgccatgagctacctgtgtgatattgggcaaatctctctgctacttggtttacccatgttattagtttagactctaaactggaatggatgaacatcttcctggctaaaacccagtgactgacatgtggacagtagcatacttgtgagtgatgcacacaggaccccgaggacttggaattgcattctgtcttgacccatcacatttctccgactgccaacttcagactctcccactgcaacctcagacttaaagtaaagggagcttaaaatactggggggaaatatgggaggcagaatctctcagtgcctgtgtagagtttttaaaatgcgacccggttttggtttagtcactgaaaagtttgtgggagcctggcggttccag

SEQ ID NO: 237 - DNA, 4001 bp, Homo sapiens
agtaaagctcaaataattaccagctgttccaaaattagtcagttatgattatgcagacatgcaggtaaggcctggaaaataatacgtaaaatgcaaaacatgaaaaagattttggggggtaatggcattgtagatttattgcaaatttttcatttgttaaaatagtgaagctaaaatactaccattaagctgaaaaaaagtattgtctaattagactcccaagtatttttaaaacatgaaatatttttagccctttaatgaatgcttactatgtgtcaggcactgttctaggtgctgagggtaacgctgtgaagaaaatcaacatcctgcctttatgaactttgcaacataatgtgtagaagtggaaaatatacaaagcaaacaagagcatttcttttaatggtaatgtgctttttagaaaactgaacaggccaatgtgatacaagtgtaagactgcgtttgggggaactgcctaagattgaaggctctgaaaaagcccctctaaggaagtgacatttgggccaagacataaacatgaaatatgcaaaaggctgagagaacaaatcaggctgagcaaaaagatcttgaggtaggtgagcctaatgtattcatgaacagagtgtagttaattaactaggtatgagagaagggcaaggcttagatcacctggaaccttgaaggtaaagtggtttaaaaagggaaatgacgagatctatgtttttcccctcttaacttttttggaataatgaattatgagtagaaacaaggaaactattaatactccaagtgagaggtgataagggtttggaatcagagtggtagcaatgaggatggagataaacggattgattcaagacatagtttggaatcagaaacaatagaacttactgatcgggtgtgtgagacagagaggattcaaggtttcagtttgtgaaaccatttactcagatgaagaaaactagaggaagtttgggcttttttgaatatgtcgtttgaagtgcaaagctaggtgggaatgttgactttcaacttaatgaagtctctctataagcttgtggggaagaagaggaatcacgttccgtgtctctgttctcccaaagcctaacaccatgtctcacacacattatgcacgcagtttaagtgtttttgaatgttttgagggtggctatttgttttcaagttgaaactccttgaagacggcagttctgtacctacacaaaaactaaaaaagggggctttggcaccttctgagattttgctaatgcctaggtgaatgacttctatgtgattacatagggctttagctgcacaatatttgtgcagtattgagattctctcaagtgaaggttactttttttcttttgagtgtaattgtataaagctgggctcaaatgttgtgaaaaagatacatatacatatggtttaccatgaaaggctaggattccaggcacatttacaaccacaaaggcatgagaccaatcaagaatgtgctgcacccggacgaagaaggcgctaagcgcctcaaatccaacagttgaaagccaacaacaagcggaagaactctttcagaaagactccagcctgggtgagaggagtgagaacttgtcaaaaaaaaagaaagaaagaagaaaaagaggtctgagaggggaaggaggaaaatcatttttatttactgaacatcttttaaagatttcacaccacagaactatgccctttaattcttataacgctaagaaagcccttattcatattcaccaccctttttacgggagacaaaagctcagagtatctcgctttacctcaaactattaagagccagagctatcgtcataccgcaggtctcagtccttgcctcccccattatccactagcaaaagtatttacacttaattgcaagcaacgagtacagaaaaactgaaagaaggaatggaagaaaacgccacatccactgctaaaaccttgggtcagaacacgtccgcgaggctttccagggccaaagccttacttaaatctaccacggttgtcgcttcccctccagtccctcacttttcatcccactcactgacaaagaaaagagggggttcaggccgcggtaatataacccagcctggcggtgggtctgaagggacagaagagaaaggttcgcgacccgcccacacccttctctaggtagaagtgacaaccaaggaaggatatgaggagtcggggcaggacggacggcagttcccggcggcatagctcctctggccagctacttaattcttccaggggaaccgcgctagctgggaccgcaccttcctgagacatactttcgtcaaacaggagagcttcaaaccagacccgccaaagcccagaccggaaactcgcagtcccgccaacccttgcgcgctctccgccggctccaaaaccatagagaggagggcggctggtttcttggtgagcccgggtccctcaaggccggaaagaaagtcgggcttctctagcccctggaggactcgactcactggtgcgcgatttaggtccggaggaggcgttgtgaggtgagctttttcagaagcgcgatcccaggacacgtcgggaagcaagcatccccaggtctggatcactgtaaacattacattcaaatggggaggtgagggccagaagtccccacttctggggtcggatttgttccgggacctgcagccggaagtgactccaagccttgcagcgtgatgggagaggaaagaggcgcgttcctagccgcgggactgggtgacccgcctctcccccaaattgtaaatcttgtataaagggaacaaagatcccacttgccagaactgtgaaaattgaggcagatggtatagtgtctagcgcagtagatagaagattctcaataaagttgcttcttatttctacaggtctctccaaactactgcagtgccctagtttgcgtttgctctgccaccgaattagtctttactaattattgccaaattacccccacttctatacacttagggctgctgttctcgactaaatgtttggagtgaagtcttggatgaatttacacacaccaggccatacctatgcatgtttttaaagggacgctgacttaccaaaataaaatactgcacctcttctgtaaaagacagaagtgaagttattctggaagcttagggggtgaatatggttggacacaaatcaagacagctgaaagacagcaagtagctaggctgtcctgtctgaatatcttggactttatgtttgtccaggtggtagtggtggtggttgctgttgttcttctgtttgtttttatagttgattttcttctcccactttggaacccttaaggtgtgtatgagtgtccaaatctcttatctctctctcttccccacaactttttaagaaaaagcagctgtatggtgggacagggaggggtgggggtggctgtttaatattacactttagtgaaatgtgccattttgctttaatcatcattttctttcttttttttttttttttctttccagagctgcttggaaagaggaccaaagacgtctaaaaagtcatttggaaatatctctaaatatttgttaccatgtataagctgctaaagagaaattgggcccaacaaaactaattgaataattgaggcagatttgtgtgtatcatcaaattctatccagaagttgaagaatctgaatttaaagattgtgtgcatttaataagaggatgacctttcagtttaatttcactatagaagaccatctggaaaatgaattaacacccattagagatggagctttgaccctggattcctcaaaagagctgtcagtctcagaaagtcaaaaaggagaagagagggacagaaaatgttctgcagaacaatttgacttgcctcaggatcacttgtgggaacataagtcaatggaaaatgcagctccctctcaagacacagacagtccactcagtgcagccagcagttcaaggaacttggagccacatggaaaacagccctc

SEQ ID NO: 238 - DNA, 4001 bp, Homo sapiens
gagtggaactgctagatcacagaataagtctacactgaactttttaaggaactcccaaattgttttccacagcagctgtcccattttacattcccaccagcaatgtacaatggttccaatttctctacattctcgccaacatttgttattcggtttgtttggacattttttggagtagccgttctagtggggatgaagtgtgcctacttcataccacttcactgttatctggtgaaatcttaactcatccttctgtgcccagttttcatgtcaccgtgatttgaaaacttccctgagtttacaagctcaccgctgaggagtgaactgcctgagctctgtgccctgaagcccccccgggggcggggggagccagctatgtcagtgtctccctgggaggctgtgcccttctctagggcagggctgcactgtattcattttcgcatctctactgctcagcacaatgcctgacgcataatgagtgcccccaaaatatcttcaagtcctagtccttgagctgaggtttctgcagtatcagttcaccaatggagagggacatgatggcttctttgtgctcaactgggacccaaagcagagatgaatcgtcctagcagggctctaagcctgaaagacccaactttatagttttacccctgcctgtattctgctccagaagctgctgacatacctttaaagaggatgataaacctaagctcccaggcatggagactgaatggcttcaggtgtaagacggcattgggcaacacagataaatagacaataaatcagatggggcccgtggcctttggccaggacacagtaacttctgtgactttattctgggtggccttgtccaggccagcagagcttccggcagcagcttcgactgtttccatgcagagacacctgggaactgcatctgcgctttgatttccgcgaaggaaactgtcattttctcccatattcattcttcctaaccccatctccccgagacaaacggcagaatgttttgaaggccccagagtacactgatagttggctagacgagaaaaattcaacgagcgcctatttatgtatttgttgcgctcccaggctcgggaaataaccttgggaatatttgggagagtaacccaaacatttctcaactagtgggatatcctggaggggatgttactggaaaacaaatacactgggttgcaatttctttctttccaactgggccaccttctccaagtcacctgccgcgctaacgcttcagtattcccatctgtaatcaggaaactgattcctgatcttacataaaaaccaccgcggtaggagccccttgagaatgttcttaagaagccaggagcgcaatagcaggcacagcagggaccacccagcgcaacccccgatttaagtttctatcacgactcgcaactcgcggcttccctccggcgagggaatgggagcgggggcggaggggtcgcaggtgcagcccggagaaactgggtgagtcgatggtaaggacccggctcccgctcccccgcgggacaccacacccgcgccccccgggcagtggtggcgcagggcccctaccttgccgtacttcttcagcttcctccggtacctcttcctgggctgctcgctcggcgccggctcctccagtggctcgtagcgctcgggcaggagggcgaagtgcaccctccgcgcgccccgggtccccgggccccgctcgtccgccgcgctcgtcccgctctcggccgccgcctccgcctcgtccgcgtactccaggtgctccaggatggcggccgcctcctcgtccccctcggttcgccctcgccctcggggcccgcggcgcaggaggctgctctccgccttgcttcggagcctggctcccaccgtcatgatgtcccggcccctctggcgaaggtccgagcgcaaagacaccaacctttggtccccgcccgctcctccgccccagcccggacggggcgggggattgggggggccgcagcgccccctggccgtggggcccgggatagcgttggctccgctccgaactggcctaccaggcggcgggcgcgctccgccagccccgcccttcatcccacctgccggccaaactgtgcagactacggcgcgcactgcacaatgaacatgcaaaacaccttcaactgcacttgctacgaaattaatgaccccaaataataggactccatctgctcatgttcaaattagcaacgatggaaaatgatactagagatcacgctcagtgctagggagggcatggcgagatagtcacggtaacaggattcgtgggagtgcaaattggtggcaaggttttggagagacgatcagaaaatctttatcgtgagtcttaggaaacgtccgtattctaggaaatattcggaaacgcaagacagtgtgtccacggtgttcaacggtctgactcagtgaaaaagtggagcaaaccaacagggaggcgcaaaggaaattctggtgcagacatgccagcatatggcgcagtctttaaaatcatgattttcaggaatatctctctgtgagataagcattatcagtgtactgtgaatctcaacaagctgagagtgccctattttcttaagtgggtaaatgcctttgaattctggctaatgtagaattaagggccgaaagcagtggctcacgcctgtaatcccagcactttgagaggccgggaggatagcttcagcccaggagttggggaacagcctgggcaacatagtgagacctccatctctagaaaaaaaaaaaaaaattagccaggcgtaggggcgcacacctgtgatcccagctattcaggaggatcgcttgggcctgggagtttgagactagcctgggcaacacagggagacctcatctctagaaatagaaaaacaaatacaaaagtttacctgtagtcccagtgaggtagggagatcgcttgatcctggaaggtggagattgcagtgagctatgattgtgccactgcgctccaaaggggtcgacagagtgagatcccatctcaaaaaaatacttaggtataaaataacatagattgttagatacactgatattttaacattaaagtttgtgattaaatttaagaataacgtgtatatgttggtataagcacatacaatgtttacgacaatttagttcactaggatgcaaaagaaattagttttgtgattccaacttaaaatgtgagccagcatggtgactttcacctgtaatcccagcaactccacaggctgtggtgggaggatcccttgaggctaggagttctgagcaacgtaggccccatttctaaaaaagtgaaaatgtgtggctcggtgcggtgactcacacctgtaatcccaacactttgggagaccaaggcggtggatcacctgaggtcaggagttcgagaccagcctggccaatatagtgaaaccctgtctctactaaaaatacaaaaattagccaggcatggtggcgtgctcctgtagtctcagctattcggcaggctgaggaggagaatcgcttaaacccaagaggcagaggttgcagtgagcggagatcgtgccacggcactccagcctgggcaacagagtgagactctgtctcaaaaaaaaaaaaaaaagtaatcagctaattgatttacgcttttatttaacttatgtaataaggtaataagtaatgacttatatttaatcttaaaaacatagagtctttatatgtaaaatagtatataaaatttatgtacaattcaatttcaggtgaaatgggtatgaaaatgaatttaacttactatatttataagaattacttagagttttgttatagaattgaagtacttgaaaagaaagtcaaatattaaatttgtaaaagttgcttgaaatgtttaggagaattaactaaacagtaaaagtgcctccttacagtaattgtaaaattttatcgggtgagtaaatagtttaaaacagtatgtaatttgaatttaaaaggttaagagaaagtagatt

SEQ ID NO: 239 - DNA, 4001 bp, Homo sapiens
ggtgagagtttggtatcttaacccttgacctctttgggaacttaacgggaggagggaatgggttaagaaatatgcagcacctatagtcagggccacccatccaaagacacattaaatattaactacaccactgactaaaatactaaatactgccaagccttggaggagaggaaataaagaacagttcaagttctggcatctggagatggtggggtggggagagggctccagctccattccaggttggcttgtctgtaccttctaatcagacccaggtccctctcatcctcctcccacgaaccccccacatgtcctccaagagctttgcctctctgcctactagtcaaagaggtttcctgtctttcaatccaggtgtctttgcttcttgttgactacccagaaatgtgccttgggctggaaaatatcctaagaaaaatagcagaatgactaaaacttgcacagtttgcatatctgtctccatgaacacatgggcaagtttctgtgtgtgtttaggcaacattatcatcttccctttcaccagtgtgtttgagggaaggagcaggtagaaataccctctgcatagcagagctttgttagacactgccagtggtctttattcctaaattcaccatctagggcagccctcagtctgtgagtgtggggtgttggctctgtggtgtgaggtgagctcaagcctaaatctccagttgccaggactggaaaacccatatattcactcagggctgcgtgtgccaggcccttgagcctggcactgagggcttcccacttccctcttctctgcagcaggaggaaaagagtcaaagttagggaccaaagggttaaaccccccaagatggataatggagaggcaacttgctactctgactcgactcctacatctgccttccttctgcaggtaaatctgccacacaaactgccaactgggacacctgcaggaaaacaaacaaagccaccaccctggtctgcttctctgtctgtggactctgccacactaccttggcttgagccccacttggaactctaactagacttgacatgcagccacgaaatattcatgtgggtgaggctcggcacagccaggtagctttctgtttgccagtctctgtgtctattaacaggctgagtcagaaagttaattgagtagaatccaaataaacttgactttgcagctagattatccatgggttttccaaagatgagctggtagctgaagttttctccatgtgccccaacctcatatccctttacaaacaacctagtacagctcatgcctaacacacctgtacacagagagctccattatcacatgagcatgatcaaacacacacacacattgcacccattatttaaataaagatcgacaccgagttggtaaagccacgggagaatttcctgttacagtcgctatggaaaaccaagatactctcccccattttgactccctctatttcaactgttcttttctaaaatcacaactcaatttcaattgttcagagatggaaatttccaaaacaaatctattttctttttcttgttgtttgcacaatatgcctatccaacctaaagggataaatgaaaaagaaggtgcctcccagccccagtctccacaaaaacactacaatctcaagttgctaccaacctgatctgatcccagaatggactcagagaattgaggaacagagaggaaatctccctagctggggtatagagggacacctcccctcccctgtagctctgatttcccatgaaaccccttcctattgctataggataagcaatagttggttagtgattaactcacctccactgggttgggggctgaagagagaaaagaaatacccttttgtttcaaagggcagagatggagacagaggctgcttcccctgcctcctactgttttcttctccttttgagctcctcctgacttacctagataggtaaatgcttcatctgtgctgcctggcccccaccctgccactgactcagccaatcctagcctcccctccctacctctcattccagctgtttcctcagggagggaatgggaggggaatgagcagggtggtgctgttccctcttagccaatcatctcctaccctcccctttcctgtttagagctaataaagagctctttaaaaaaggagggctggaaggaggaggagccggtttgggctgagactggaaggacaggtggcagggagggagtaggcagagatagtatatatatttaatgttgatataaaggaacgcagacagtcctctgggcagtgtgcttttccataggtctatgtgaaacaggtttttcatctagaactaccttcttccgcttggagcttagttttcccctgaattctctaggctaaactcatttgtgttcagttttgctgctagcttttctagatgttgaaagtcactttcttccccaagcctaatcctagctcataagcctagcaattccattcatgtccactgaagaaggtgtccccaggctagggatgctgtagttgggccagtctcgccccagtgcttgccaacaatctccttggcctaatttatttctgggggaaataaaaccattcatcccctaagaggtccgtgtcctgatgaaagagtgactggacagcttgaaaggagagagcatgcactctgtcatttggtcctctgctctcttttggctgttcatggaaggtggcaatacatattatgaaataaaaacaaaacaaactaccaaccagtttagcaactcttgtctcctttcatggactgatacttggcattcgtagggagaagagagtaggtagaagaatctactatttttgggaagaaatttcccaccaggtacagagaccactcttaacagatatgatttttgcctggaagctggtttttcctacaggtagattatccttgataggtatcaggatttgaggtattccacttactagcattaaaaggtcagggagaaaatttaaaatcaatgtacacaataattgccaaaatgtattaagctcttgctatttgctaggtattgtgctgagcattttcatgtatcttttaatttagtctttaacttaaaaaagtaggcatttgttaatatctaaattttacagggaggttaaaaatctttttcaaggccatgtagctaggaagaggcagggcagagattttaattcaggcagtataacatcaaggttgctatgaatcagcataatgccaatccgcctctattttggaaggaatctcaagtgggaatcatgaaatacacagataatttgcaagtgtaattctagctattagattcgtccttttctgtttcatttcctacttaaagctattaatatgttttataacaagacgacacatggctttcatcttttctctttctgtgatcatggttggataggaaataaaaagggcagtgatcctggggccaaggtaaagatgaagtggagcaggactaatggataggaaggaggttggaggaagcctgggataacccagtaccctatcagcagcctatggatatcacagctgaatgagcacttcgggctatgacctctttccctggtgtgtcattcaaacatatatgatgtcataatactaacaaaacaggaagggcatctccaaatcagcagttcagtgcaaccagagtcacacccatggatgaagtcaatgaagttgatccagctccataggtgtgtgatttgaacatttgctaaaaaaatgaattgacttatgagaattaacttccaagaggatagtaggcaacagtcttatttgtgaacagacacagtttttcagttataataaaattaggataactaggaggaacccctatcttttaccaggtagaagcagggacatagacaaaaatcatctttcccttcctccctttcctctcaaaaactttttctttttgtaaattatgaaatatttcagatacactgacataacaaacataaccgtacctaacatccagt

SEQ ID NO: 240 - DNA, 4001 bp, Homo sapiens
gttacaggttcagtacttccaaaggaagaaacctccaaacccaaaaaagaataaatatgaatttgtatttttgaagaatgtgaaataatggtgtttgcttaattgctcattttgtataaacttaatattgtactttaaaatatctgctaaaaagtgaaaatttaactttttggaattgaaaaagcaatattaaatactaatgaaatcctaattaaatgcttatttaaatctggtagtatctgtggcatttcttaccaaccctgcccatagttgacatttttccaccactccccccttcccagccatcagtcttggagaggggacagaaaggaaacgtcggtcaccaggagagtctgcaggtttccttttaatcaaggctctactgaaggtgttttgtggggctaaaagcccccaaaacatgaaatggacatgtaacaccacctggatcccccatagcaggccagaccactctggcgagcactgctggtctgcccaaatctgggtaatcagactgggtattcattggctgcatttcaaagcacagcactgctttcagccaggatgaagtgggagtgaacccagctgctagcagagctgccactccaggctgagagccaagtaccagccactgccagtgaagactggcccctttactgaagggagttgttcagagtccagccaccggccctggggagggagagaagtcagggtattctgctcggggatggtcagggctccgcagctccatcgccagcatcctttggaaagccgcctctggcggagacagccggctgggggggcgctccaggtttggctgagacgttctagttggaacagaaaggaaaaaagtgaggctgggaggcaaggccttggattaggccccacaaggatgtggccatttggcatttggatagtattaactttttcgaaacctctcaccagatcaaaggaggttagggataaagcggcggagacatacttcccccctccagggtaagctagggcttggccagcctagccagtgggcagaccccaccccaccccagcccagcccagggtgggcactaaccccgccaccagccggctccgggcgccggcggcccagctgccgtaacatctcctcgcaggctgcgatggtgtccaggagctgccgctgccgctgctccaccgcgtccagcagctgctgggcgcgctcctcccggggcggctgtgggggtggcctcccgccgagccccagccccgccttcccgcggtccacgccggcagcctccctgcccgggagagagcgagagacagacggtcagggccggcgcttgcgcggggccaagccccttcctcccgccccgacgggccccctctcacccccgtgaccagtctgagcccgggccccattccatctccgcttgcgcggcccgaccaccgcccccctttcggccgcccccctccccagcgctgcgttagggcttcgcaaggctgcgccccgccccgtccccaccggtctccttcaatcctcctgggggtcgtggtccctttaagctgcccggcgcagaggcggggccgagtctcctggaccggaagctggctgggagcgtcacttcctcccggaagcgggcctgggcggatgtctccggcgcgtcggtgcagggggatgagggccgcggtggctgccagcgtggggttgagcgaggggcctgctggctcccggagcggtcgcctcttccgcccgccgagtcccgctccggcggcccccggcgcccggctgttgcggctcccggggagcggggccgtgcaggccgcgagcccggagcgcgccggctggaccgaggcgctgcgggccgccgtggccgagctgcgcgccggcgccgtggtggccgtccccaccgatacgctgtacggcctggcctgcgcggcgagctgctcggcggctctgcgcgctgtgtaccgcctcaagggtcgcagcgaggccaagcctctggccgtatgcctcggccgcgtggccgacgtctacaggtaaggccgccccgacccggccccgctaggggcggcaccgcgggaggggtttccggtgacaggcttgggagactgaggcgcagagagcgggaggggcttgtccaggctcaccaaggaatccggaactggaaatatgtaccgaggacttaacgtgccccgggccctgaactacatgctgctgggaagcagcaacacacgagaaaggcagggaccctgttcccttggcgtatttgtgctaattggggaggcccccgggaaaaaagcaaacaaacacagtagcttaatttaatagcgaatgccttgaagaaaataaaacgtggagcttgatcccactatcatgatatcacagcggtgcagctgttgtagtccctgagaccagaggcacatgggcgtcaagccaggggtgcgcctctggagccctgctttctgctcaagctcttagggaggtgaagcagggagacaggcggctcccattgtaaactcgaaggattccttttctacgtctgcctagagtctaggaaaggaccaccagtggcccttcaattttgaatggatttattcttctgtgtttcccagatactgccgtgtgagagtacctgaggggctcctgaaagacctactgccaggaccagtgaccctggtgatggaacgctcggaggagctcaacaaggacctaaacccttttacgcctgtgagtcaagttttctcttgtgtccccagactccaggccacttggctttcactaggatccagataagacttaccctcttatcccttccaacctttctcatgatccctttccccttgccttacagcttgtaggcattcggattcctgatcatgcttttatgcaagacttggctcagatgtttgagggtccgcttgctctcactagtgccaacctcagctcccaggccagttctctgaatgtcgaggtgagtttacccagtccttcccctggaaatgtcaccagcgcacatactgttttctgtgaatcagtggcattgatagtacactgggatggccaggcatgagagttcttgggccaacagtgggaaggttgcccagctggcagggaggtggtggggggcaatataaattaaaaaaatttgaaagattttatctcaaagtctgaaaagccagggggagaattggtcttttcttcagtctttataataataggaaagattataagaacaatgtcttcctgtttttctggagataacagtttctggagaacacagttaggctataaatcttcacgacagtgctgtaaagaaagatgaagaaggccaagggcagtggctcatgcctgtgaccccagcactttgggaggcccaagcaggtggatcatgtgaggtcaggagtttgagaccagcctggctaacatggcaaaactccatctctaataaaaaatacaaagattagccagacatggtggcgcatgcctgtaatcccagctacttgggaggctgaggcaggagaatcacttgaacctgggaggcagaggttacagtgagctcagattgtgccactgtactccaggcagggctctagagcgagactctgtctcttaaaaaaaaaaaaaaagatgaagtttagcctccagaaagttaaatcacttgttccaggtcacacagccattaagtgactgactcagatttttaaccagtttttgattctcgcccctgttctcttatctctgccacaagccagatcaaagaaaggatcatcctaatcctttcttggctacatagattagaacaaaggaggacacatagaaatttcgttttttttcttattactaagatgtaaaacgtagtaataagctacattgtgtccccagactcggccagacacatagtatcacacatagtatccagcatcaggccttgggccttccttgggcttattacatccagctaataagcctggatagagtaacttgcgtgcagtcacatagagatacgatggaaagtccagagttagag

SEQ ID NO: 241 - DNA, 4001 bp, Homo sapiens
gacaagactcctgggaaggcttcctgaggaaaataaaaaaagggcttccccttgattttgaactctgcctcatacctcaaagatgcctattgaatccagtgctgatcacactgacacctaccctcccaaaccacaaaaagcagggagcaaagaactggagagatgaaggccagtttccccaaatccctgcccagaagtgtatgtgtgtttgtgagtgtttatgttgggggttgggcggggaacagttaccatcagccggatgtactgccacttgtccgaaatctcaccacagttgccacatttcatctttggggaaaaagaatgttagtaaagcagctggctctgctgcacagacaccaaggaaagggtaagaacagtgggaggtgggcaggctcatgatctaccttcttgatggcaatctcacttcatccctaacacctgccccaacaaggacaaaactagaactatctctgggcaaaggataggtaaggctgtttcctatgccggcgtgcccaccctcctctatgaagtgctcagtgtggccggggattcaaggcacctgtggtgcagaaatggtttcagcggaggtgaggggggggaatatggagagatttgttagaagatacaaaattacagctatatgggaggaataagttctagtgttctatagcactgtaggatgactatagctgacaataatatatagtttcaaatagctaggatattaaatgctcccaacacaaagaaatgatacacgtttgaggtgaatatgctaactaccttgatctgatcacaatacattacatttatcggaacatcactatataccccataaatatgtacaattctgtgtcaattaagaaaaaaaaagagaaatggcctcagcaggcccccgacccactctgcttggttagctttatgttcccacaggccctgtatgtcactggtataagcacttatcactctattgttactctatttttctgtctccttcactcgattccgcttcttcaagccaaagaacagattctcccaagtaagccctggtattcaggcttcaaaatcctgggaaacaaaagtagtccggaggcagcttcccgaaaaacagggcttttgagaggtacagaaggatgctgggatttttgaccaggagtaaaacagagcagaagctctgggatctggaagagtgaagagcctcgaactgctggggaaggggaggcctctgtagaccatgccactagggtaccagctttaccagtgtgggagggctaaggaagggtggattacgcacaaaattaaactatttcacaataaagaaaaccaaatcaataaacgaaaggcgaactattcaccttattaaataatcacaagcgtcccttcaagtagcatttcgtttagtgtccatttacagaccacgaaatatttaacacagggaagaactacaaaatgaagctttccaagactgccaattagagataaaccaatacactttaatagaaagcaaacgtaaaattctaactaggaaaaccccgaacacttaatgtgcctggttaaatattttctcatactgccggagagaaggctccggttcagcactgagatcaggacgggcctcctctccccgggccccgccccggccgcaccttcaggtaccaccggaagtcctcgcccacgggccggaggttggtgatgttctccagcgtggctttgagttgcagcgcgattttctgagggggagggccagagcgactgcgtcagccgtgcctgcgcagccccacgcctgcccgaccctcccgcattcccagccgtgggtgccacagggagacactccttctgcctcctgctccttcagcgcgcacccactcgcttcatctcctcctggcgcgagctgttgcctcccagaccctcgccacctcccctccgtgtccccgcggcgggcggcctcccctcacccccatggtagccctctccgcccggtgctggctgcggcccttgccgttgctttccggcgcgtcgtaaaaggcgggtgccgtctgcgcaccctcagtagggcggggccggggccgggccgcggggcagggacttctgcgcgccgctgctcgcctggcccactgggcttttcgcatctggggatctggggccagtggaggtcagccaggtccgcgagcaacctgtgctcaggccagcggaagcctgactccaggattcggtggtgccacagacagttactgaacgccaattttgtgcctgctttaagcgaacaggacagttcctgaccctcagttctttccaggctcttcactactctgcctgccctggaacttctcagatcacgtcagctccctctgcccaggggaaaagctacaaaaggaagagttccaagactgccaaataaagataaaccaatacgctttaaaaagtagaatgtattggtttatcagatttggggatgatgcctttcttcaaactgccctttcctgtttcacccaagagacctggtttctaggcccttctccagagtttgccctgtgtccacatccttctcactgtggtccttgcgactggacattccccttcagctggctcttttttgggagcccacctggcttatccttctctcataacgtttattgaactttattttacctggcctcctgtccaggctacatctgagaccatgcaggagctgtggagattaacggtaaaaggaacagcacattcaagactcttctaggaggtggggcaagatagccaaatagaaccctccagtgatcctcctcctcctcttccctggcaggaacaccaaactgaacaactatccacacaagaaagcaccttcatgagaaccaaaactcaggtagcaatcacagtagctggttgtaacgtcacatcaagatataaggcaatggctgggtgcggtggctcacacctgtaatcccagtgctttgggaggctgaggcgggcagaccacctgaggtcaggagtttgagacctagctggccaacatagtgaaaccctgtctctactaaaaatacaaaaatcagccgagtatggcagtgcacacctgtagtcccagctactccggaggctaaggcaggagaattgtttgaacccgggaggtggaggttgtagtgagctgagatcatgccattgcactctagcctgggtgacagagtgagactctatctcataaaagaagaaaaaaaaaggaacaaggcaatgaagagggtaggaaagacagtcttgaattgctaccaccacccctccctcatcctctggcagcacctggctgcctggcatagagagagaatctgtgtgcttatgggactttgcattggaactgagttttgccctgtcacagtggaaagcaactcagggcagaattcagctagtgcccacagaggaagcacttagagaaaccctagccagaggggaatcatccatcccagtggtcaggttctggcgagccccaccaccactggctaaagtgcttcagggtcctaaataaattcgaaaggcagtctaggccacaaagactgcaattcctgggcaagtcctggtgctgtgctgagctcagagcccgtggacttggggtgcacacagcctagtgagataccagttggggagccaaaggagtgtttatgtcaccagtcccccaaccccaggcagcacagctcacggctccaggagagactcctttcccttagaggaaaggagaggggaaagtaaagaggactttgtcttacagcttggataccatcccagccacagtagaataaaacaccacgcagagtcccgaagcccccttgccaggctctatctcccagatatttctagagctaccatgggccagaagggaacccgctgctttgaaggaaaggacccagtcctggcaggattcatcacctgctgactaaagagctgttgggccttgaataaacatttgtaatagccacagtactgggtgaggcccagtactgtgctgccttcaggtgtgaccc

SEQ ID NO: 242 - DNA, 4001 bp, Homo sapiens
actccgtctcaaaaaaaagaaagaaagaaagttaacagtttaaaaagcaatgtgaaaaggcaggaatgggtgctgcatttccttctagggctgccctcgttgagccattcgattcctgggtgggcagagggccagggcctcaggcccagcccagggaggccaaatgccagggcccacagtctccccagagtgggttggcaaagaatgacaggactggttccccagcctggaatctaagctgagcctgcagcctttgagctgggaggagcttgcggctgcctggctgccccgctgccccgcttcattcgctgaattcagaagcgcctgtggcgagcctctcccatggacggccgggtacccgccctgggctctgctgcctggacactgagcccaatgcggaattcctctcccagcagcggggaggcgctattattagttgattaatttgcaaaacaaaaacctggctggggcaattggtcttgaaggaaggttctcccagagcgagtaaatctgagacaggaccagaagaataatcttggggaaaaggaaagtggctgactctggtgctgagtcccggccttgccagggaccccgactctgctgttacacagggaatgctgtctggaatcggcccggtggcaggtggggggtagacagctctcccctccgtctgatgcctgctcctgttctcctccttgagcatcaatcgggagaaagatgtgggtttgggtttttccccctcacttctcagacccagaactgccccatcccagtctggggggagacatgatgctccatcccccaaagctgagccccctcatggggcatccaggagaaggcaatgggtccccaggacagggcccggacctcccccttgctcgcccagccccacaaagccccactcagcttctccactgccttcattgtctacagacttcaacctcacaaaacgcccaacaaaagccctgcagtccacggcccaaaggccacaagccagctattgtgacattccagctggcctgggaggcttcacttcccactctcaggagctttttaaagtatctcttaaaaatgcatctcagatggggaaaagaggtagcaattctgttgccaaggaaaatgagattttggccaagtgcagtgagtcatgcccgtaatcccaatactttgggaggccgagacaggaggatggcttgaacccaggagtttaagaccagcctgggcaacacagtaagaccctgtctctacaaaaaaattaaaaaattaccaaagtgtggtggcacatgcctatggtcccagctactcaggaggctaaagtgggatgatcacttgagcccaggagttaagagatgacagtgaactatgatcttgccactgcactccagcctgggcaacagagcaagactctatctcaggaagaaggagagacagagagggagagagagagagaaagagaaaagaaaggaaagggaaggaaggaaggagaaaggaaggaaggcagggagggaaggaaggaagggagggaaggaaggaaaatgaaattttctcctaatccttacaatcgaatagctagcgaccacaactcctatcatttgaaaactccttgaaatcaagcatctcttggtcaacttgacccctaatttgttttgttttaaggaccctctaggacaaggaagacgtgttctgttttctcccaatcttctggaaatccttcccaagatgggaggactggaattccagaacaagggatgacaggagcatgagaaaggtgggagagactgtggccggacctcacctgagaaagtcagcccttcccaaggcatccatgcatctgggcccctcacccatttggcccccttccctcttagatgcaaggcttctgattctgatggaagatatttggcttcttcaaggagtgtgggcacactaagcatgccactggcttctcccaattcctgaataagggacacttaccaggcaagtgctggggacccccacatcctcaggcccagcagctctctcctgccctgggagaatttaatctgaagcagttccaagcaactaaacgaaaggttggctcctccccttcccctccagtgcaggtctcgggtcactcaggtgccagaaaacacaggtgggtgtcaacactctcagcttctccccatccctctgcatgggtgagatgaattgcttcagccgtgggagctcaaaataagattgcggatcagaaggctgaagatgaattgatccactgaggctggagtgcaggccctcattctccgctcccgggagaagcctgtctctgtgcccaaggaaggaaagaagctaagaaactgagcttcaccggaggaacagtcacgctgtcttgatggggcttcccagaaccctgctccaggcccctcctggcagagttcaaaaggagctgaggggccaggcatggtggctcatgcctgtaaccccagcattttgggatgcagagatgggcagattgtttgaggtcaggagttcgaaacaagccaggggaacatggcaagaccctgtctctacaaaaaatttaaaaactagctgggcatggtggcacacacctgtggtcctagctactcaggaggctgaggtgagaggattgcttgagcccaggaggttgaggctgcagtgagccctgattgtgctactgcactccagcctgggcaacagaacaagaccctgtctaaaaaaaaaaaaaaaaggggccgggcacagtcactcatgcccataatcccagtgatttgggagggcgaggcaggctgatcacctgatgtcaggacttcgagaccagcctggccaacatggtgaaaccttatctctactaaaaatacaaaactagccaggtgtgggggtgcacgcctgtaatcccagctacttgggaagttaaggcaggagaattgcttgaacccgggagatggaggttgcagtgagccaagatcgtaccattgtactgcagcctgggtgacaagagcaaaactccgtctaaaaaaaaaaaaaaaaaaaaaaaaaaaaaaaaaaaaaaaaaaaaagaccaggcgcagtgactcacgcctgtaatcctagcactttgggaggctgaggtgggtggatcatcaggtcaggagtttgagaccagcctggccaacatggtgaaaccctgtctctaccaaaaatacaaaaaatagccgggcttggtggtgggcacctgtaatcccagctactctggaggctgaggcaggagaatcgcttgaacctggaaggcagagattgcagacagctgagatcgtgccattgcactccagcctgggcgatacaataagactccgtctcaaaaaaaaaaaaaaaaaggaagaggagattagggcacggacacatacggaggaatgacggtgtgaggacacagggagaagatggccagctgtgagccagagaggcagctccggagaaaccagccctgcctgcaccttgatctcagactcctagcctctagaactgtgaagaaatcaattggtgtgtaaatcccaagtctgtggtactctgtcgtggcagcccttgcaaacaaatatccctgcaaaatgaggatttaggactagatggttcctaataccctttgcaagtgaaaaaaaaaaaaagtcttgattttaactattccattttatctgtgtttatcccttcctccccccgccccaaatacttgccattattgaaagtcgaggaagccaggcacagtggctcactccagcctgggcaacagagcaagattgtatctcaggaagagagacagagagggagagagagaaagagagcctgtaatcccaacattttaggaggctgaggttggcagatcacctgaggtcaggagttcgagaccagcctggccaatatggcgaaaccccatctctactaaaattacaaaaattagccgggcatgatggcacacgcctgtaatcccagctactcaggaggctgaggcaggagaatcgcttgaacccaggagg

SEQ ID NO: 243 - DNA, 4001 bp, Homo sapiens
cctgtttgttcaaacacaagaaggaaaataaatattttcagtcttagctatcatcagtatcaaatcctacgaatgtatttgtacatattccagggctatatgcacctagaagcacacacaaagaaataaactatttgttttctttcaaataagtgtatttgcaaaatgcagagaatccaaaatgtagtcatcttttcctaggtaactatgtctttgacccttattagcacaatcactttagtctccactttggttcctactcaaagtgtcatcacagcaatagtccccagggctggtaatcccaattggctttatactaaaaatatcaggcactgcagccactgtttctttttaacactttctgggttacaggaacatggaatagtcttcctattttctttcacagttaggaattaagatgaacctaagacaactggctcaatttgaatgcctttgttttctattaattcctctttctatatttcacttgttgaagctctgaccagtcacctgaaagttctaaccagaatcctaggcatccttactcacatgtattacaaataccacagagctctctaaattaccagctgctgatttatgcttgctactatttgcttaatcttttatacaataaacatttaagagccaactaaactttggcattaaggatataaaaatgaatagacacattcaatgccttcagagctcctaccatgatttccagcctgtgttgacatgaactatattattttgcagaatagtcttttcctctagattttaaacttctcaaggtcagagactaagtcttctctgtcctccaatatgtccaagggcacagaaatgctagttaatacaagcatggggtctggggctagaatcagaacccaggctctgcaaaaattaccagtcagacaacctgcatcaggtttcatgaacttctagtacttgtttctacatctgcaatcatggatttatgacagtgtctatttcatgaagttgaaaattaaatgagcaaatacacgaaaagcatgtgctatatggcaagttctcaacagttttaactattattcctactgtttaggtgaacttagaattttgagcagtcattccaaaataaaaatagcttttaaaatatcacgctgtaaatttaagaaatgtgtgttgtcctgaaatctaatgattttctttggtgcatgtgcaaagggtgtcaccttctcccgggaaagctcttcagagtatgaggcactgtcttcctactgacatgccatgcgactttaataggctcttttattttccttttcccccatcaagacaaagaacggagagtaaaagatcagcgcacttgtttaaaaaaaaaaaagtcgtgaaaaggacaactcgccaaggactatgatgtctctggagagggacacacaaggatgaagctggtgtattatccaacaggcccgaggccccagagcgaaatgacaccatcgcaccagggtcaggcaggtcttgggggtggcatggggaaaggggacttcccagggctcaagaaaacgtggaaaagcgggctacttttaaatcggaaagccttggtgcttcctacaagcaagtaggatggtccccacacttggggacgagttggaaggtttgatgaataactcagcagagcccggtcgaggggtgacttccgatggagaaatgtgttcgctactggaaccaggtgggacgaagggtgcttgacatgcaagaacctttagcctcaaagcagaggccaacccaggacgggcaacacaggagacccacgttcctcaaatctgttctccacgtgggctcctgggaccccgcactcaccaaagtcgtaaaggttctggagcagagcgtcaagaagtgtcggagaactgggaggcgtggaggaccccggcccttgctcctgcgacattgtggggtcagccgaggaatcaaccctcattctgccgcgctgcacccccgcttccgggttccgcgactgcgcgcatgcgctgcagggccctgcgcggcttccgtcctggctgagatggcggcgcccgggatcctgtgtagcggctgcagagggtgccgccgccctaggcgaagtagggccgtcctgagcgaaagaaccgcccccagcaggagcaccaccacggcttagcaaagaatcccagaccccgcccgggaaggcagccgcaccatggagtcttccagttcatctaactcttatttctccgttggcccaaccagtcccagcgctgtcgtgctcctctactcggtaggcgcccagggaaaagaggcccagagcggagccgcgcgaaatagtacccctttctcccagtccctattcctccggcccaccacccttgcccaaaagagctggcccctaggctcccgaggaggggttagttggttggattggtttccaggacaacagtgtatcgctgtgtgtctgtgtgtgcatgcttttggaagtttctacggattatggttcctttggttcctttccactttttccttctctttctttctatcaggccctggggccttcagaaagctcctggacacgagaatgaggaatgagaattggagtctccccatctctagcgagggcatgtcgagctaccttttgggcaaacctgagaaacttgcgggtttgacccgccctgagatagcctgtggctccgcaccccgccctatgctgctgttatattcctgggagtagagcacttggcttgtatgtgggaatagagttttaaacacttcaggaaaatttagaacttctagacatttttattgcctgttcttgtcttccagtcattattgtaccttttccacaaatcattttggaggacagccagcgccacccagcttctctcccgcttgtctttttttcctccaaccccctcttcctctcttggttttaacgggtctttttggctggcagatgttggtcacccacgattttcatgaagaaattatgagatgggagctttatagccttcaggattgcacagacctggggcaactggtttggtttttgtttgtttcttgttgtttttaaccactaaattagtttttagctactttaggagaaaatgaaagaattcattttaaaagcatattagcatatcctggtgattactgtccaattttggcttaaatgtagtgttcatttgtgcagaaaggtcaaaacagggataacacagcagagcaagataaacaccccagttttgaaagagaatatatgggttccttcaaattgagacaccaatattctttggaacatggagaaacttctgttccctctctatcaagacctttcggtttctgattgctaactgcctataagccttattatttagatatatctcttcattgatcttatcttccccacagttctgtggtggatatcaactttgttttctgactctgctactccagagcaggcacgaagggaagagggttgctgtgcagatccagcttttaacatgtagctttttaagctcccaactggtttgtgaattggttggaattttccttttgtacattaaaggaaggagttggttttgtttgtttgtttgtttgttttacttcccctttaccaacggttctttaataagacttgagtccactttttcatgtgaaaaactatggcagttgtatctgagcattctgtagttctgatgctggacagcaacccactctttactggtagttctcactactgttttgtgactggataacctttacttccacggtaaccttactttttcttagtacttcaggctgtttttatttccccagctacgctgttattgtgtaatattctgatctaaaagtagcactttagaagcgtagaagatactgctgattgcagcaaacattaggaatatatacagtatcctactcattattctcagtttccaagatatagaagttacagatgcaggctctgcctttaagggcacaaaaagtcataaaagtaaacaaacaatcacagttaagta

SEQ ID NO: 244 - DNA, 4001 bp, Homo sapiens
catgcctgtaatcccagcactttgggaggctgaagtgggcagatcacctgaggtcggaagtttgaaaccagcctgaccaacatggagaaacccatctctactaagaatacaaaattagctgggcgtggtggcaggcacctgtaatcccagctactcgggaggctgaggcagtagaattgcttgaacccgggaggcagaggttgtggtgagccgagattgcgccatcgccctccagtctgggcaaaaggagcaaaactccatctcacaaaaaaaaaggaaaattatgccctagtctgattcaataaatatgtgttgatcccgcatatgtgctcaaggaggctagccacaaaggtgtcttcacactcaagacagcccaagaatgccactcatggcctaggtgtcttatcagaagttctacaaggtagagggtgggcaggggaacagaaagaagaggctcttgaatgtaaaggaccttttataaaattcaaaagggacaagggcagaaggcacattgaatggagacccagactgaaagtcaggaaacagggtcagtctagctctgccatgaggtgcatgttcttggtccaaccacttcacctctctgggcctctgttttctcatctgcaaaatgaagcagttgacctaatagcctccaaagtttctttcatgctgatattctatagcaggctggggctaaatttagatttagatttgtccaaatgatggaatgacctcttttcccatcacttcccagatgtctacctggattctggagctccaggaaagaacccccctgtgttcacaatggcggtccctggtgcctgcagaacttaggacagggaattggggaggtggggtggttagggacaaaacccaaatatggactccttaagagaaatttcaaccttaaaaagaaaggaatctgtcccaggcagcagcacagttgcaattcagaggaagctgcggttccgagtgtagggtggtggactctactgtaatcagcccaccctaatcagccaccctgaagtcaagcagacatctggggtgtctcaccaatctcccagcccctagaatgccaaacaaccctgctctgaggccctgtaatattatcacatgggggtcagggagctactctccttcaatacttccaagcaaactgcctagagccaaaagtccaggaagactaagcactttgcagatttgagtgagaaatccccagggacttccatagaaactgggagtctcagaaatacctaccaggttggtttcctgaggcagtgagccagggaaggaggactgatggtgatgttgcctcatttggatactccatgagcctacgcaagtttcacaaaagcttcaaaggaaaacaaaatatcaaatgaatccagtaacaacattctggggaaaaggctacctggaagagggacaaaaagggatgagtttccagaggaagcctagggaggatgcctgatgtcactgctgacagaggaagcaggaggactcagcgctctctggactgaccaggctgtgatgggtgtggcaggccagaactggacaggatcattaaaaccctcggagaggttttcactgcaagaaagaagagctaccaggcctggaggggaataagattggggacccaggctgccagtgaacttatgcccacccagaaactcagccgcagaaaagtggtagggattattacaccaaactgagaattacagtctctgcctcctcagcccctggcagagctgccacacatggcagcagcactgtcctgcctccaggtgaaataggagccactgggatcacccaccacgctgcaggagctatgaggcgtacaggagcatggggaagggatatcaacacacataaacaaagtagttccatccttgccttatgtctgtcttttttatacctccgtagatgtggccaacaaaattgctccataaattggacactgcccaaagaagtctttaacgccattcctgggttctttgtcaaaaccatggtggcttttcctgtcttcacagagctaagcccattgttttgtggtccctgcagctgtacctctgacctgggtggagctgcatgtctaggcaggagaggcttgggaagctagagttgttgctggtgatctgttttcagcttggggcaggagccaggctgggtgccagaagcaacttttgattagtcattaggcacagactttgcttcagccacacagccacctcattcctgcctcagggcctttgcacttgctgttggctctgcttggagtcctctctcttgatctgcactggacttgttgctccctacttcatcaaatgttaccttctcagaggaccttccatgtccgcctccagtgcaggccctgttcacactctgtccactgctctgctgatttccttatgatagttacggcactctacaaggatcttgtttatttgtttacatggccaccgtctctttccctacgggaacgtctggaaccttagctccaccagggtcatctgaaggctcccagggtgacccacacagaccagaccccagcctgcaccccaggaggctcctgctccccacatacacagagctcacctcagccttacctcgcagatgaggaagactttggtgcccacacaaatgcccatgtgtgccacggcccagacagcagtgttcatgcctgcgagaggtcagggcaagcctatcagtcccatgctgagatgcgaggccctggacgcctccccacctcagagggtgaaggggggaggcctggacaccctctccatctcaaagggcagggggtgaggggaaggtctggcaggggagggatcttgtctctcatgttcactactgtccacaacctccagcacaatgctgggtatatgatagataatatctgttgaatgaataaatgaataaatgcacacagcagcaagctgtgtggctgcttatccaatataactgtatccctgcgcttctcccttcctaacataacttcagtctgcttggcaacatgtcctattcatgaccacgtgtttgccctaagctgttcatagtattccctctttccctgtgctaataactgatttttcaaaaggacccatgacttagttctgaccaaaaccatgagcagaagtctactaggtagggccgggggttctaaaagaggttttcccctttgtaaaaagagaagcaggcactgtcatattatctggattagatctgcttagtacagctgtgcctcacttctcactctgaggagagttaccgtgaggaaaagtgcaacccgatgaagatagctagggtgcgagctggaagaaactgggtcttctatgacattactgaagaactaaattaaccatctctggagcttgcatacctctggatttcttgttatggagcataataaattttcctattattaagccattgtgagttgcatcttttgttacttacagccaaaggcatttgaacgatagagactatggcatacactgtcccttagtcctggtggctgccactggcctgtagaatagagccacggcttttatccaccagatatactgtaggtaaacatgaattaatgaattagttttttctttacttcattcatacacccaacaaacttcattgaaaacttatgtgtgcgggcactgcactaggaggagagatcagaaaggcaagctgccaaccccgaagaagctcagagtccagtgggaggaagacttatcaacagagaatgacaatctagcatggacacattacaacagaggcatgcagaggtgccacagcagcggcgaagagcagcagggacatggcttgaaagaggacaggcaggagggtagctaagttggtttcacaagaggttgtgtctgagctgagtcttgaatgaaaagcaggagacgcccaggaggaccagctagccaagagtctctcaggcagcaggaacaacaatatcccacatcgcagagtaggcaagaccactttttacaatgggccag

SEQ ID NO: 245 - DNA, 4001 bp, Homo sapiens
cacagtgaatcatctacaggcctcactgcaaaaacttgctctcaacaaaaattgtaggtcaatattattagcatatcagagactaagtcatatctaaaataaaaatgtcttaaatattttaagagaacaattttattttaacagcacctttgggactaaaaacaaacaaacaaaaaataacaaaacccagtgtcgtcaatataataggctcagctgagaagagttcttcagcaagttctaaacaactcaggaaaactaagaatctctaaagttacaaactaaaggcctgagaaattatctagaaaatgcaggcttaaattaaaattcacttccattatgtggctttatcagttcaaatgcttactccttgaggacgaggccacttcttacactcttatctgacacagtccactactgagaccacagtagggactcacttcatctgttaaatgattaatgtttactcaataattagataactggctgagttatctccatctcacattccaaggatagacttaggggaatcttttttctttaaatctaaaatgttgataaatggcccatattataggctgaattatgttgcccctaaattcgtatgttgaagtcctaggccccaggatctcagactgtgattgtatttggacatacagcatttaaagagtaaagttaaaatggggttgttagggtaggcctctggccagtatgactggtgtcatataagaagaggagattgggacaccgaggatacacagaggaaagtcgttgtgaagattcagtgagaaggcagccaccaccccaagccaaggagcgaggcctctgaagaaaacaaccctgcccacctctccatttccaacttttagtgtctagaactgtaagaaaacaaatttctgttgtttagccactctgtctatgatgttttgtcatgacagtcccagcaagctagtacagcccaggcactgagaactaatttaaaaacccgacctatgtgcttagttccgcattatgcattttcttgtcccttatttatttatttttatttttgagacggtctcactgattctgtcacccaggctggagtgcagtggctgcgatctcagctcactacaacctccgcctcccaggttcaagcgattctcctgcctcagcctccccagtaggtgggactacaggcgcccaccaccatgcccggctaatttttgtatttttagtagagacggggtttcgccactgtggccaggctggtctctaactcctgacctcaagtgatccgcccgccttggcctcccaaagtgctgggattacaggcgtaagccaacgcgccggcctggaagggaagtttctaagaaaaactactaaggaattttaaaactatgatgtacgtggattgtggagtattattgtgggcgactaatcagataatgattgcaagaattgattagccagctcgaaatcgcagcacaattaccgcaggggcgatcagcttccaccatccattccaggatgttgggagtcgtcaatttggaaatgtatcaattaagcggcccccagagcctctcgcatctcttgcccggccccgagtcaccttcccccaggtgcctccatctcgctggaaacataggaagcccgactcaaacgctctatgcctatggtcgtttcatgggaaagcaaaattaagggcaacattgaggaagctcattaatatttagtttagaagatgcaaagggttcttccgcgaacctggaagagccccccgggctcgcctctcgccgcggtcccacacttgcctgacctcaaccacactctcccggtccaggccccgctggagaacgtcccaccgactccggggacagaaaggccgtttatgtaaaacgacgtttttcctatttcgcctcccaccctcatgcaaattttgattttcaactcttccaacccttccgcaccctgaaacaaacctcatctcctttcctccctcttctggctccgcgggttactcgccccgcccccacccttcagtcccttagcaacgcgtcctcggtccgtagaaaccggttgccgagctctgcctacctctgaaaggcctagagagcagagttctcttctcagaggggcttcgcccacagacttttgtcactaaaagcccaggtgactccccagatgcttacggatattaaaaccgattatgctgaaggagtggaaggagagtcaagtaaaagaagaagatcaagtaaaaagaactggggaacagtgactttgtttccccttattgtacctcctttctccttttgtgctttcctggaaacatcgaatttcaaaaagaagcttacaaagtccaccatacagcttgcaggtctgaatggaagtcaacagtttatatttgaatatttgatggaagattgctttcatggcttatgatattaaaaacagcaacaacaaaaaaccattcttatttccaaggccaagaaacctcccgtgtggttagtaaaatcaccactgtattacgcaagttgtgtagcagacttggctgcacacacacataccacttagcatttttatgagacataatggagatacactgacatacattctgctgtatttactgtatcctaaggaaccatttgtccttattgctcacttgtgtgagcagaaaatgcactaaggccatgggaatcatttatttttagagccataatctaaaaatgactgacttgaaaacagcttgtatttaatttaaaatgatggggaatttcacaatattggttacattttaagtcaggggttgttcatcattccaagaatgtaccttatctgatgcatcaaaatagggggaaaagctttaaaaaacagcacttcaacatctgtgagaagaaaaggaaaaaaagcaccagaattaatcatcacaagtctgtgctagtggcaatggcaaaactgcaaaaaaaaaaaaaaaaaaaaagtatagttatgtagcaatccaaatttggctagaaattgatattaatagtcaatgcatgaaaacactggaatcaatttatttcaaatatttaaaaaacaaaaatacaatcattaaaagtagaaggtagtttgattcttttctgttgcccagactggagcacagtggtgtgatcatagcccactgcagcctcaatcgcctgtgctcaagtggttctcccacctcagcctccctagtagctaggactacaggtgcatgccactatgccaggctaatttttttatttttatttttttgtaaggacaggggtctcactatgttgcccaggctagtcttgaacttctggtctcaagtgatcctcttgccttgttctcccaaagtgctgggattacagatgtgagtagccactgcgactggccaaggtagcttgattctattatattttttaagccatatacattcaggaacaatggtttgtatggaattgataactggaatctagttgatagtggtgatttgtctaagattgttgtaataccttcagctcaaaaatttgtacagaggtgaaaattagcttcttaagaattcagttcagaaacgttagctactcattaatcttcagtcaataaaatttgtaaagcatgaatcttatgaaattcttagaatattatcattatctcagttaatatttatggaacacgttctgcatgtcaggtactaggctacaactttaaaatagttctaatttcatcctttacttttcattcttaaaccttaattcgtatctatggaaagggtattatctttgattttagaaaagacctgactgaaattcaaagaaactatgtgatttgcccagcatcttataattagtaatacaattattaatataacacaaagtacaaagtattttctctttaataacaaatgtttggtaaatgtacacaaaaaagaattcaagtggattttttcctaactactttaattgctctcagttaaattcagtatttactgaatgagttcatgaacctattatagataaatactg

SEQ ID NO: 246 - DNA, 4001 bp, Homo sapiens
agctcccaatggctaaagctggaacaatttgagcaaaataaaatagcattataatccaaagtataaagtgaatatccatgagtctatactgatataaaggtttgaacaaaccaataaatggagaagagacaaatctgtgcagaataattccaaaaaatttatgtatatatactccaaccttaagaacaggagcatggagctgggcacagtggcacacacctataattcaagctactcgggagactgaagcaggaggattgcttaaggccaagagtttgaggctgcagtgcattatgtttgcacctgtaaataacaactgtactccagcctgggcaacatagcaagaccctgtctctaaaaatattaaacagtgggggtggggaatataactccccattccttaggtgtggctgcacacccaggaggtggaggttgcagtgacctgagatcccattcctgcactccagcgtgggtgatagagcgagactctgtcttaaaaaaaaaaaaaaaaaaaaaaaaagaaagagaaagtcactttcagtgatggtaagttagtatctcccaaggtgatttcattctacttttcaacaactttaataattagaaagttcttcctgctgagttgaaaccagctgctctctaatttcctcatttattgcatgaatgaatgaatgagaagttaactagctccatgagagcagggacacattctgattctgttttaccttactcagcacctggcactcagtagacactcaaagatttgtgaatgagtaaatggtgagttggctgggggaagggcttcaacttctataaccccccctacacatacttactaatacacccacatagctatgaatacatatatgcaaaggttacaagaactttttggagtagttactggtatgtatgtggatatgtatgtttgtgcctatcagttagtaatccataaatgttcatttaaatctttacacccttatacataggttttaaaaacaatttaactaaagctaagagaagtaaagtaatcacgtgcacaataagtgagaaaggagtggggtcagtcgtgtcccaagtccctgttaaaggtgaggaatgaatcagaaacctggggctggggcagtgccttctcagcatttctggggaaaagctcctcgaccagcagccaagcaaggactgtgtggctttgggcaaatcacgtcacctctggttaggctgcatcctcacctgaaaacaaaaagcttctaaacgggaggtgaacgctgagcgtgcagggacagaggggaggggcaggcgcgggggacgggaccgggggaccagaaggtggaggagggacagtcactaatgggcacctgggggacgacagaatctggacaacaaactcccgtgacacgagtttaacctatgtaacacacctgcacacggactcctgaacctaacataaaagttaaattaaaaataaaaacaaaaagcgtgggcccagtggcctcttaaacctttgccagttccaaggccctggtattctgggcttttgttgctactgttttgttttttccaagctctggagtgtttgcaaatttaagtttaacactgccccatcatctccagcaagtcactttccctgctcagtctcctcacgggtccagtgaggcgccggcctacaaggatcttcacggtctcttccattctttacttttcggagtgaccaacaaagcctaaagcaaataaaatttacactcgcaggtgggtgacggacttctgacagggaaaaccccgagggagccctttccacaccgattctcaaggggaaaatagggtgggcaggatctcctcccctcacccgccaaagccctgaggtaaagctctgagctcggcaagtcagagagcactacgccggcgaagaacgaagaaagaaaaacgcgaagagacaggtctgccgaggcctcatccccagcgctgcaaacccacctgctcaccaggtcctcagagaccgctcagggtttcccaaacttccagaacgttccgtgagcagtgagaggcgccgccggtagggcagagcgcccagggtgcctggggcagggttctgcagtcgctgggcttctgcgcaaccgcagaccccgcaaaccttttccgcgcttctggctccctagagcgaggtttgcaggaagccggaagtggttaagaagatacaagatttgtaggcctggcgcggtggctcatgccactaatcccagcactttgggaggccgaggtgggcggatcacgaggtcagaagtttgagaccagcgtaccaacatggtgaaaccccgtctctactaaaaatgcaaaaattagctgggcatggaggcgcgcacctgtaatcccagctactcgagaggctggggcaggagaatcgcttgaacccaggaggcggaggttgcagtgagcgagatcgcaccactgcactccagcctgggtgacagggcaagactccgtctcaaaaaaaaaaaaaaaaaaaaaacaagatttttgcgtgttagactcagttgtccggaattgattttcacagttttctaaaattcaggctcaattcttagatttctgtcatttgcaacataaaatcaaagtggccttcagtttatccaaattatgaaaaaggtagattttcatgagcagctgtcaaaaggacatacaggggcctgtgtgtttgctttttaggaccccattatgttcagacctaattgaagctcagcaatttattaagtgtcacaatcataaaaatgtaaaaagacaaagaccactacttgccttgagcctaatggttaggatacaaaactatgtgccttactttgtaaaacaggtattcctgtagaaagaaaggtgctccaggaaaaatcctttggagcacacttgtgatgtgctgttaatttttccctgtgataaccattttgtatgtttggcattttgtataactgatattaaaattaggtgcactcttgctgcctcatttgggcagtttgttaagccaccacacctggcctcttgtttataaattacctggtctaaggtattttgttatcgtggccataatggactaagacaattcctcctctcttcaaatctccagaacttattcctcatcttcattttcggctgaagtgaaatagttactgctaatatttcataaagatttatgattttaatagtatttagtatttaatattaaatactattcaaatgagataaataaaagcatccagaaacgaagttccacagatgtccacctaccaatctaccaacatctatatgccagattctgctttctttccaactatagtaggtgaactgtataatcctatgtaaggccagccctcaaatggacaacagagcccatctcttcttgcttacccaagaatatagctccaccggccagtcgcggtggctcacgcctgtaatcccagccctttgggaggctgaggcaggtgaatcacaaggtcaggagatcaagatcagcctggccaatatggcaaaacctcatctctactaaaaatacaaaaaattagccaggtgtggtggtgcacacctgtagtcccagctacttgggaggctgaggcaggagaattgcttgaacctgggaggcagaggttgtagtgagccaagatcatgccactgcactccagcctgaacaacagagcaaaactgtctcaaaaaaaaaaaaatatatatatatatatatatatatatatatccaccaattatttcctgactcttacaatcttcaattttctcctctccactgaatagtctcaatagcaaataaatatgccattatttctctcatcttaaaatctcttaatctcctctcccacaccagctaacaatccatttctctgctctctttacagaaaaactcaaaaggattgtctataatttctgttgctaatgcccttttttcccattctttatcaaatttattccaatcagactttttcatttccaccataccacagaaattgctcatg

SEQ ID NO: 247 - DNA, 4001 bp, Homo sapiens
agacaggttcaaatgttgctccactcactctggatttgaaagagggaacttggagccgagctgccacttaccctaaaatgcagactatgctgtgctgtgctggggtggtagtaggagaggacaagtaaaaacatcatggaatttcctattcattttgaatgtgtctttttcttgattgggcatttgatttgtcgctatatatctttgactgttttccagagctcctataacgtttttgtgcttttttctttaatgtttccatggggaatgagaacctggagcttcttagtctgctaccttgttgacatcactccaactccactatttttatgcaatcttctctaggtgtgagaccatcccataatatccctgagtactgcatcacccatgggcacctgaaggtattttcaaccagtccttcttgcttttggaacttctcttgcacacacctgctcaccaaacaaggccaagtacatttgtagctgatgatgactgaaggttgtatctggccagagaggtggtgattactaatgttctccaggaaaacagcctttaaccttcccttcttttccccataccaaagctgagtattctatttcaccttcttttccttgcccacttcccaagaagacatggggaagtctagatgtctctgaaaagctttaagtggctcagtcttgccaaacacaaatgaagatattcaatttcaagtatgccaacttgaaactttgccaactcaggcaaagtattttccaaagacctttaaaacacagtggaaaaccaagagccaaattgttctgtttgaaagcaaaaattgaggccaggcacagtggctcatgcctgtaaccccagcacttggggaagccaaggtcggcacatcacttgagctcaggagttcaagaccagcctggccaacatggtgaagccccatctctactaaaaatacaaaaaattagctgggcatggtggcatgcacttgtagtcccagctacttgggaggctgaggcaagagaatcgcttgagcctgggaggtgaaggttgcagtgaaccgagatcatgccactgcactctagcctgggcaacagagcgagactctgtctcaaaaaaaaaaaaaagtaaaaattgaaatgcattagtagggcaggattgtggaaaggtgccagagagcagcagcaaatccctggacatcagcacagagagtggcaagctggcctcaggagataccatattctgggaagggccagaatgaggagagcaaatgttcttcaaattaaggtacaaaggaattaaggacagaaaacatccagatgcctagaaacacttcactgagaagagtgctgagaggcacgactatattgacaccctgttacagtattttcaatgcccctgttatatctgtaagagagtgtcagtggtcttttcgataaccatcatgtatgaaacagtcatagaaaccatgcaaaatgcgtgaatattgatgattgcttgaatgtaactatcctttgtagagcacagagaccccaatgccacatttttaagatgcaatcatctgctgccctccatttgaaaatagtgatgaacttcactcctgcctctccccatcagtccctctgagccctctctccaacctctctcgtttccttacctttctcctctcttccatccaatttccagtgagcactttcgttgaatacttggtctcaatctgccagctcggagtagagagtggctgtggatttactgcagtcaaaaacatgttaaggatttgccccaggtttctttgacttgatgcagtttaaggcttcaggcggggagaggaaggtgttatgaagttgctgagtttggggtgcctattttgtcttcccagctggcctcctgaatggctagtagatgactccttgctaacctcagagaataaaacggccccaagagttcactgtcagcctttagggagagttgatctatcttggattctctactgttgactgtctccatggtgacagactctgagtataaatactctctgtaagagaacagctgattctgcagaagcaaaattgacctcacagaaacaaatcaaaccaaccaccacaccacaaaagcagtcgccagaagaacctggtttctgtgttctcaccacaatactagtatcatccttgctacactttcacatttggggtgagttaaagtctgctactatttaatgaatgttgatgtgcttgctccaagcaaagacatttatgcacatttattcacctgtttaatcctcacagcagccctctgacgcagatgccattattatacccattttacagatgaggacactgaagcaaagagattaagtagctgcctaacatcatgcagttgtgatgggatttaaatccacgctggttcagacctaaaccagtgggctccattcatttcctatctgctactttgtaggggcttgcacaaagaattctgtctttgtgctcacactggtataatatgcttcatttgctcagtcttcattcattcattccacaatcatttcccattctatgccaggtgcttagctacagctgcaatgcattagcaattagacctgggcaccatccccacagagctcagtccaatgagataagggcctttgtcttgctcattcattaggaaaaaaaaaaagtcaaaaagcaccaagatatccatcagcagagggcttgttcaataaactgtaatacatccagatgatgaaatcctctgcaagagttttaaaggctgactttaaaagatgcctataacatgtggttaactaaacaaaactctgtgtgctatagtattgcttgctaaaagtgaagaggctggatttcgctaggcaattcagagaaagtttccaatggccttcaaacaaaaatagaggaactccaggaaactatgtgttccatcttgaaactaagcctgaggcaggaaatgaccatgaaagatgttctgcaggttagaataaacctttatttagcagagaccacagttggggcagggctggagctaggaagaggaggtgtccttccaattaacatgcagaggaggcatgcgttcggtataatttaatttttttttttttttgagacagagtctcgctccgtcgcccaggctggagtgcagtgggatgatctcggctcactgcaagctctgcctcccaggttcacgccattctcctgcctcatcctcccaagtagctgggactacaggcgcctgccaccacgcccagctaattttttgtatttttagtagagacgaggtttcaccgtgttagccaggatggtctcaatctcctgacctcgtgatccgcccgcctcggcctcccaaagttctgggattacaggcatgagccaccacacctagcgcggtataattcaattttcaaaaccttttattgtcgcataaaacacaaatatcaaaaagtacgttaaaaataaatgtacagataaatgaattatggaatagcaaaaccccacaaaaaacactgagctggtcaagaaataaaatatcgccagcacgcccaaagtactccacatgtccctcccactcacaacccattcctcccctaaaggaaaccactctcttgacttctatagcaatcacttccttgcttttctttatatgcttactgccaaagtatgctcttaaacaataatgttcagttttgcctgtttggggactttcatatagtttcaatcctatagtatgcaatgagtctgatttccccagtggggttaatatttttaagattcacgcattttgcatgtaaccatggttgctgtgactgttttatacatgacagtcattggaaagaccaccagcatggctaaatagtaaaaagaagagctttaatggcgatagcagtttgcaaactgcacagagagacagtctccagcatggatcagaggtactctctcttccaagagaggaaggacaggttgggtttcatgcttcacaaggcctgtgtttatatatattcagcaggt

SEQ ID NO: 248 - DNA, 4001 bp, Homo sapiens
tttatagagacgaggtctccctatgttgcccagactggtctcaagcgatctcccaccccagcacccacagcgctagctgttctttaaatgagctacccagtaagtcaaagctcaggtggagagcagccgcaaggcagggagcagctgggaggtatctcaggggttcccgggatgctgcctgtgcaccccagggctgaggtgactgcgtgtggaaacacctgcctgactggcttttaggaggagtactgggggcgggatgtgtgtcaggaaaacaacgtttctgtataattcataaacatgtatgttaaaaacaacgtggccatgacggatcctggctgaatgcaaacggggaacataaacctgagtaatcaggcgcatcactgaacatcccaggcggccgcccctaccctggggctcaaaaccggctccctctgcgagggtttcccaggttaagccatcaggaaacaggaagacgcctaagaacgatacactggactttggggactcggagggaagggtgggagggggacaaggataaaaagctacaaatagggtgcagtgcgtactgctcgggtgatgggagcaccaaaatctcacaaatcaccactaaagagcttacccatgtaaccaagtaaccaaacaccacctgtaccccagtaacttacggaaaaataaaagaggaagacgcagctctgccttctctgcacaccctggtaatactaagaaaaatgaaaaccaaaaaaaggaggccaagtttgacatcctgaaatttaacaggacgaggcggctaagaattcagccacaaaatagttcccggggaagaagccgcgtttgctttgaaacgcggtaagaaatgcccccgaacacctgggcttaaattacacccaaactcaatcatcgactcgctgccaccggaacacgcgctcccgaaaaactgcaccccgactagccctcggctactccaggtgacaaacggacaaaaacaaatcctaaagcctcgcgggaaaaagacctgaatcgtggccgacttctaggacaccggggaccgcgccggtgcccccactcccggctgccgggaaggcgaggcgaacgcgccccctttcttcccccgggcgcccgtcccatcccctccccagggaccccctccctgccccgagaaccccctcccctccccaggtgccccctctcccccagagaccccctcccctccccagggacccccttccctgccccgggaacccttcccctccccagggacccccctccctccccagggaccccctcccctccccagggacccccttccctgccccgggaacctttcccctccccagggaccccccctccccgctccgggaaccccctcccctccttagggaccccctccccacccctccccggggtccccctgccctcctcagacgccccttcccctccccaggcgtcccgctcagcccgggcgcctttcccccataggaccgcggccaggctcgttgggaggcggcgacgaggacgcgggcccaggcgctggcggctcctccgcgcgccgcacaatgggggacgcgcagggaacgtccctcgggccgggccagggccgccgacctttgtctgcctctcgcactccctgcgccgacccggccgcccagacggaccccagcgccccaacccgctaccctcacgcctgcccccagcccctcactcaccccggcgccctccgggtttctctttcgtacaccccgccctcaggcggtggcgccgcgccccctgggacttgtagtctttcttccgccccggccccggcgccaggccccgcagctcccaaagaaaactacaactcccggcggcccgcgcgagagccgccctcgcctggtggtaccatcgcgcgcggccgtgggtggggcgccggggcggggcgcgaagcgccctgggaaatgtagtcctagaagaaccagcgcatgtctcgggtccctgacacggagggactacattcccccggattcctcgcgcgccggctgcttggcgttgccgggagacggggcggggcgtcgtcggggtctcccgggcgaccgcacaagcgtcggcgtccttagcgttccgccggtttaggcggaggcggaggcggagcgtttgggggcggccggggcggcttcggcttcatcggagaaggcggcgcggctgcaccaggtttggccgcgggcgcgcggggccagcgccctccagacccacggagcgccccgagcgcctcgcgagccgccgccaaatgcgccccaggtccgcggccggcgccagtgctgggacctcggcggccggtgtcggagcgcggcgggagagaccctgccttgggtgcgggactgggacggctcggacccagagggctcccggggcttcgcctctcggacgggtcagggctctgcggtctcaggacgctcccccgtgagtctcggcggccccggggtctgggcggcgtcgctgccccacaggccgggcgcgtgggtttttccggggctctgcctctgagccaccctcggagaaaagacagctctgtgcgtcccgcggcgcccgcagctttcggcaaacatgtttaaaggagctccccgaaggaactggggacgtccgtccgctcatcaaaggcttcaatcctgtcggtgtccccgggccctctcctagctgggccagcgcgcagggtgggggggcgctgcaggtgtcgcggccccccccaacctccgcagacccttccaacccctcagaccccccaaaacccccagatcccccaaccccccatatacccccaacccctcagaccccccaaccccccagaccccccaacctcccaggcccccagaccccccagctcccttgctcccgggagctcccaggcccgtcctgcatgcgccttggggttgttcctccttgatggacgccgcctccgggttccatcccaagtttaaatgccagagatttcaatggaaataaagcccccatcttaacagcgtgaggatgttttgtaaacagtattggggacagctggggaagtcacatttgtgtcttctctttagagggacagtgttcgcctgagggtccatcccagggttccctcagggcctctggaggagttgatgccaccagtgtctggccgtgggacacctgggcgtgggcgcccagcaccaggggttcgctgacagctgcagggtttccggccatgcgcccgcggacgtgcagcttctgtgtcggtcccattaagaggaacctggcctgggcgacgtttgaggaccacggggaggacacagtcgcggtccccttctcggagtccagtctgtgccacaggctcttgccgtctgcggcaactcattgtggagctgagccagtgtttccacttcctttttgtttttttgtgtttgagaggatttcacgctgtcacccaggctggatgcagtggcatgatcgtggctcactgcagcctggacctcctaggctcaagcgatcctccacctcagcctccagagtagctgggaccacgggtgtgtgccaccatgccttgacacatatttctttatttttttgtagagacgggggtctgttttgcccaggctggtctcaaactcctgggctcaagcagtcctcccgcctggccctcccaaagtgctgagactacaggcgtgagccaccatgcctggcgtccactttcttgactatttcctgaagaccagcgtttcccgggtggtttcacagctgcggaagctgcctgtgtcagtgtcaagtccctacccctcggcttggcctggggctgtggccctgggtgaccgtgtccttatgctggagcttggtccacaagtgtccccgccccttgttccgtcactcatggtggtctgcacctctctacacgttggcccctgtcagagggaagaaggcaaagtcctggagctgcgggaagccgtgcagtgcatgtgtgtgtgcctcgggcccgggctgcaggccccaacagggcccacccagcacctgct

SEQ ID NO: 249 - DNA, 4001 bp, Homo sapiens
catcagtggttaacaattctggtgttgtttctgcagctcagcagccagccttcaggtttgcaggtccagaaatttgatcttatcagggcaccaagaaatgactgatttctccagaactgattcccaccaaccaactcacaggagactgatgtataagccgaaataacattaggtacatgttggtgcaatcagtgaattttgcctatcaggggaacatataagaatgccaatgaaaatcataaatttgcttggtaagcactgaactgaagtaagtatgagagaagatgaatggatgatttttatattgactgccaactgggtctgatgtatcaatcttactcttccctggcattgctacataaactttgacaaacttgctcttggagacccttactctagacctcattagacacttctaatctgttcacgtattatcttctcaagtttgccaatattcttgtttaggctttatatcaaaatgtataaaatatctaaaggcaggaaagtgaaatcacccaaactcctactactcattaatgtttttagtgtctttccttttagtcagacttccatgcattttttaaaaagctacttgagatatttctttttataagaggttatatcttccttttacactcagcattttgccatacacattcttctatgtcactaaaaactttttataacattttttagtggtgataggtctttccattatagctatgtactataacttgcttaacaaattccccacttactgatagaattgtttccatttttatttaaatcaataacaatgaaagagatatttttgtgcataaaacattgtatgcatccctgatttttttttttaggaggccaaaattttactttgtatttaggcaaactcatgggaaaatgttttggctttgttatttcttctatattttaaggtcatttctttaaacaaatgtcatcaattatttattgttttattgttcagctctcaaaagttaacttccaagtccttggacctgtgggagggttgggagaaggacacctcatcgccctgtacctgttacaatagcagcaacaacaacattaccaagtaccttacaattcaccaaacatttttagatcatgcaatgtcagataagaaaagggccaacgggaaaatgtgttgaggaatctgagccatgagaataggaggcccacagtccgcagcagaatcggcagtggtaatttttctcacactttttgctccttttctaacttgtaagtcagtggtgctctttgcagaccatcataaaatattgacataatatttttaaaatattgaaatatatgctggtgctaaacagagtatgagcttacactaggctttgccactggagaggtggaagaagataggatcataggtttctgtaaaatcctgaaattcacagtagcagttctgaatttacaaaaatgttaccatagccgctgtgaaaacattaggccaccccaccctaactttcacataaatggacaaaatcatcgtacaataccacagggaaatagctactcacaaatccaggccaagaaaagcaggaaatatatttccctttcagcacaacccaaacagttggcagaagcataaattaaaatagaagcggtgctatatatactttttcacgtttcatccagcactggagaatcttactgatagcgtaaaatccatcaacttaatagaaccattcaaatacaacccttcctgcatcaaagaaaacaagtgatagaaaccactaacaattagacgacactttcttttggtgagtgattatttaatctagattaaaagcatgtggtaaatgcatttacctttcaagaaaaagtccggtcatagcacgacgcagtcgtctaagactgagcatttcacttgcttccgttacggcttctatgtttcaaaaatgacgaaataaagattactgcccctgccactgccagcatcacattgtgtgtagcaaagatcttactaaactcaacggtaggcttcctctttgaggtcaacattatgatttattttattttttgagacggagtctcgctctgtggcccaggctggagtgcagtggcgctatctcggctcactgcaagctctgcctcccgggttcacgccattctcctgcctcagtttcccgagtagctgggaatacaggcgcccgccaccacgcccggctaattttttgtattttgttaatagagacggggtttcaccgtgttagccaggatggtcttgatctcctgacctcgtgatccacccgcctcggcctcccaaagtgctgggattacaggcctgagtcaccgtgcccagcccaacattatgattttttaatctttcttttgtaccttttctttgtgtctgacacatgaatgacagaacataaggaggcaagacaggtttcttgctaattaaatatttattaagtgtttactttaaccactgtgccagatttactgtggaggtcgcatcagtatgacattgtcatcaaaaaccttataatctcatctattctaaccagggagatgaggctgataatgaaaaatgaagagcaaacagtgctaagagttaagtactagctgtgcagacttcaaatgtgttaagagtgttaagatcccttcaaagggaaggcgaatcatttctttataaatatttatttgtaaaataatattaataaatatactcattaagtaaatgctataggccatacagtgagctagtattatagggttttttttttctttttttttctttctttttttttttttgaggcagaatttcatgcttgttgcccaggctagagtgcaatgttgcaaccttggctcactgcaacctccacctcctggtctcaagcaattctcctgcctcagcctcccaagtagctgggattacaggcatgcgccaccatgcccggctaattttgtatttttagtagagacgggtttcaccatattggtcaggatggtcttgaactcccgacctcaggtgatccgcctgccttggcctcgcaaagtgctggaattacagacgtgagccactgtgcctgaccaggttatataggtttaataactgaccagattattacaggtttttcggagagcaaggcagaaaagttccttgcctcacagactctaccacataattgagaagagaaatgaaaaacaagtaaatgataagtcaatgacacattgtattaagggccttgagggaaaaaaaagagtgctagctagacagaatacactgggagaatgtcttcagagaagatggaggactggggaaggcttctctaaggagtgcacatttccacttagagaactcgaagatgagaaggagctagccaggcacagagtctggggaagaggtttccacgtggagaagagtaactcacagctggcagagctggagaaatcaggcaaggaagtattcaggtaaaccttgagcgtggataggctttggatggatggagggagaaagggctgtgggaggggtgccctaggcccagggttggttgctgaaattcaagtgatgtatttctgggatattagcacagttcaagagtggaacattttggctgggtgtggtggttgacgcctgtaatccagcactttggggggctgaggcaggaggatcctttgcgcccaggagtttgaggctacagtgagtcacgatcatgccattgcactttagcctgagtgacagagtgcttaaataaataaataaataaatagggaggggcatttggagagggtgggagatgaaaaatagttgacttagatggattgcagccagatggtggggagctttaagtccaagcaagacatatttgaaatatttaaaaaataaacactaaatatttttgattgagatataacatgataaacatagcctttatgacagattgtaccatatcatataagataaattgtgggtagagacaaagaagctagatggtacggtgatattctgggtattgtgtagtaag

SEQ ID NO: 250 - DNA, 4001 bp, Homo sapiens
tctctcagtggctcctctccctgccctacttatcacccccctttccatattaagtgtccaggtcaaatgctgccccatcctgccccccagacctctcggctgatctgcatacaggtctgaacatgcaggtccagcgacctcctccacgcctacccggatgtctaacaggcatctcagcattaatatgtccaaaactgaactccagccgtcctcgcaaccagctctctcccatcttggtgccccccttttccacggatggcagctccggccttctggtggctcaaacaaaaatcctggagccaccccgattccccttctccctcacaccagtggctgctctgacaggctctgcctcccacacgcatccaggatctgacccctggagcactgggcggagtggccctcacctgccacctcccaactggtcacccttattctgcctcgtcctcacgcccgacagcctcctcttcatgcggcggcagggtgatcctgtaaacactgaaatcaaatcatgccctgcctcaactctaatgccacagaagctctccagccccctcaatgccccgtgagccttcaaggctgtaggccagaggttagcaaattactgcctgggccagtggtctattatgtgaataaagttatattgaaacaaagcccatttgtttacagactgtctgctttccagctgcaatagcagagctcaatagctgcaagataccttaggctgcaaaacctttttttttttttttttgagccggagtctcactttgccacccaggctggtacaatggcgtgatcccggctcactgcaacctccgcctgcctccctgggctcaagggatcctcccacctcagcctctaacaagctggaaccacaggcacatgccaccacgccagactaatttttctattttttggtagagacagggtttcaccatgatggccaggatggtctcgaactcctgacctcaggtgattggcccgcctcggcctcccaaagtgctgggattacaggcgtgagccaccacacccagccccgcaaagtctttaaaatctggctgccagttatggtcctccccaattcctcttccccttgcccactgtcctccacacacaccagccccctggctgctcctccaaatggcacacacgacctcacctcagcgcctctgtgctgctgtcccctctgccttcaagtcttgcctcccacatcacagtgagccctccctgcccactgtctctccaactgcagcaacctggcctctcctcactctctttgccctgcacttgcggccacctaacatagtgaagaaattagtgtatttctccctccagtggcctaggagccacacgagggcaggctggttttttttgtttgtttgtttccctgctggatttgcagcccatagaacaatgcctgacccccagcaggggcttgtaaatgcacattgaataaatgacaaccgtgctaggcaccttgcagccttcagcaggcgtcctgccatttaatctgcactgcagccctgggacttaggttccctgttttagaaatgaggacaggagcttagaagggcctgtcccacccaaggcctcagagggagcaccccagggctggctccacagcgcagactcctaaccaagaacaccccaccatcccctcttgcccaagttgacttgaggccgctcaatccacaggagaccttcctgcacccctgcccctcacgccggagctcttcggtccatttctccgctcctcgtccgtctccctcagactcccccctcccactccacccccacccctgtccacttaagggggctcacagcctccctcctcttgccaccaaaagagtctgaggtcagtttcctgccctcatggatctgccctcacgtgcgtgggtcctcctcgggtcctccttcacccagtcggatttgaatctagacgggggctgggaccgctaacgatccccgcaggtcggcaggtcgcgggcgggaggggacgtcggagagcagagcgtgctgccccgcgcttggccccgcccagccctgagccgtgggcgtggccaccgacgtcctggtacaggttttgccgggtcctccgcaggcaaggcacgtggtcccagggcaacttttgcacgtgcaagatgagcgacattctcttggccatcaggtccccgggaacctcctccaccctctgccccgaatcctgtggcagcatcactggggtctgggcttcctccaccaggcgtgcctcctcttggctccttcccgcacctagagctgcctcctggagcccccgcacatctgggatacccccagccatgtccccaccacctatgcctcttggggctgcaggacatgcccccggctcccactggtaggaaccccaggggcaggacatccgggtcatggacactcacatcctcacccgttcccaataggtgcgatgtcccatccagggatgtctcagatgcagctggcaaaccatggccctcatggctgaggacacacccgtgatgggaccccaggatctggggggcagccaccaccctgatcaccacctggaatgcctcatcctggacctcctccaatgagcatgtcccccaaggggtctcggtctggatctcccatgggtcactcacgtcctatgcctccatggtatgtgtggacctcctccaccgatgctgcctcatggatacactggccctccccaacacccaccctatggcttccgggggggactctccctccacccagacccactccggggcctccagttccccctcaaggcccactttggggccctctccctcagtaaattcacattcttcttcctcctgttatatcttcccaatatctttttgattccttggaccagagatgctgcagctccttgcaactaaggcacaaatccctttcagccttcccatcttcctttttaatgccatttttttccccatagaaggtatttctttttcatgttggtcctaagtattttgcaaatgcaaaggaaaataaaactataacaaatttcttgttaaaagaaagaaagaaagaaaggctaggcacagtggctcacacctgtaatcccagcactttgggaggctgaggtggacggatcacaagatcaggagttcaagaccagcctggccaacatggtgaaaccctgtctctactaaaaatacaaaaattagccgggcatggtggcgggcacctgtaatcccagctactcaggaggctgaggcaggagaatcacttgaacctgggaggcaagggttgcagagagccaagatcctgccattgcactccagcctgagcaacagaccaagactctgtctcaaaaaaaaaaaaaaaaaaaaaagaaaaaaagaaaagaaaagaaaaggctggatgtggtggctcatgcctgtaatcccagcactttgggaggccgaggcagccggatcacttgaggtcaggagttcaagaccagcctggccaacatggcaaaatcccatctctattaaaaatacaaaaagtagctggtgtgatggtgtgcacctgtaatcccagctattcaggaggctgaggcaggagaattgcttggacctgggaggtggaggttgcagtgagtggtgatcatgccactaccctccagcctgggtgacagagtgagattctgtttcaaaaaagaaaaaaagaaagaaaagaaaagaaaaaaaagaaagaaaaactctcccagccttcaggcacctcagaaactggctggactccaccttaatacccaagctttgccgtgccgtcagcctagctcgatcacacttccttcaaggctgcaaaggtccgtccactttccacctcccaaacctttgcccacattgttccccactgtgcccagccatcccactccttcctctgtccagactgtatgttttctcctttctaagcacctgctgggagaggaaagagcactcagtcagaaaacctgtgatgaactccttctgctggccaggcgcagtggctca

SEQ ID NO: 251 - DNA, 4001 bp, Homo sapiens
gagaaaccactcttatttctctcttgatttttttctctctctgagcagtgaaagttatataatcatattagcttatcccataaaaatgtgattagctaacaaacatgctcttttgtacatttttgtctaatttgcctaacattcttcctgctgtcctattgtaatccttgctagcgatgcttggcttatagttggcactgacacatgtaagctcatgtcccagctctgctgccagtggtatgatactgagcaagtgataacattgtcagttacctcatctacaataaatggggcaatggcatagaccacactgtattgtcatcagataaactgaaataatggatgccagtgcggatcctggcccatcagagatggggaaaatgtaagtcagtttccttttcttacaagcacgctaaatctattcagcctggcactttcccgtcaaggaggagtttcttaaaaattgctaagtggtatggtcgaggtgggggtggcggggagaactcagaggagggagatgaagtcataccaacatgcccctgctcacccctttccaaaactcagctatttggactggagtgatttgccacagagagaaacatgccctttgccctgagacaaaggggagcttttcctgaccagcaaaagctaaaatggatcctctgccctgatttaaaaccaaacttgtgggtgagaagccacatgattcatgggagaaaatgacttgactccaaatatataataaaaagtatggaagcaacacacacacacacacacacacacacacacacacacacacacacatgcacacgcacatcaaaagaaactgacttactgaagacggaaatagaggagagtggagaattggagaaggaaaaaggaagatgtggtcagtcaggcaagacgtctccaactgtgccaacagcactcagccatccaaggggcagggaatgctggcgtagggcaggatacttttccatacatctctatttatacaagcacctctgatagtctcacaaagtagttattgtaccagtaattctctttcatgagtgagggacccagggctcaggatgacggacacacttgccccaggccacacagttaacaaggagcagaacccggtctagagccacaagccacaaaagagcaatgcacagccggcttcctagcaccaagcactgctctctgaccaggaggcccgctaatcactgcagaggccagatacagtccacaagggcaagtaaacacagagagaagccagcgggcgcttcaacggaggatctgggaataggtcaggagtccagctggctgggtagagctaggccacatgctgtcattcctcagcacctcctgtcccctcacactccaggtggcacaggacatggcacactcctcttccctcccacccgccctgagcaaagccagtgtgagcagaaatgcactggctgacacctgacatgtttattcctgcccaggaggcagcacacacaagcagtttttccccagggctctcaagtgggaggaacttgtcctgcaagaaaagacacacagaaagccagcaacaaaactgagacagccttaccccttccattgctttcctccaaggcagagtcagggaaacaagcccagcctctcagagctgggtcctggggccaacaatccgctttcctctgtctctgctagccagggagcaatcacttcccacaggacacacctgagcccaggctccccacctgccccatctgggccgaggctcctcccttgcctggggctgggccagggccggccgccatcctcccagcttggcttagaccagcacctgcaggggactggggagagtactccacctgcagtcctgccaagcccacctcttctcagcaagcggctcttcccgttgctcccctccggctggtctgacagtcactcactctccagggcatttgtgcccaggcagcaggagctgtgaaggaatggggatggcaggctcctgttagtacagaccatgcaggctggacagtgtgatccccgttagtaacaacctctgccagctccgcccctgcagacggctacttaatttcacaaaccctttctcacggtcagggaaaccaaagcccagcaggacagcatgcctaagcccacagggggatttagtggaggccagaaaaggagttaacataaaggagcaccctgtttttggcctggtgtttattgaggcatttggattcccattttaaaaggtgaagaatggccgggtgcagtggctcacacctgcaatcccagcactttgggaggtcgaggtgtgtggatcacttgaggtcaggagtttgagaccagcgtggccaacatggtgaaaccctgtctctaccaaaaatataaaaaaaattagccaggtgtggtagtgggtgcctgtaatcccagctacttgggaggctgaggcaggagaattgcttgtacctgggaggcagacgttgcagtgagccgagatcatgccactgcactccagggggacagagtgagactccgtctcaaaaaaaaaaaaaaaagtgaggaaactgagtctcagagagatggtaacacctgcccatggtcacataggtagtaactagaagagccagggttggaacccagatctggctgactctaaagtgattttattttgctggggttatttttgtttgtttgtttttctgacagagctggagatggaaacccaaacctcagttgccagttttggggctttcagctctcccggggttggggatgggcagagtgggtggcctgcgccctgctttatgtgtaaccggtgtgacttttcttgctttgtcaagttcttagaaatcttctcctgtcctgaccagggagaggcggggtggagcacaggtgaggagaccccgcctgagggccatttcctctaacaggtgattcccaaacctggctgatcaccagagctgcctgggaatctatcaaaaatacaggattcaagtcccagacaaaacactgcatcaatgcttctggcccagggactggcagtttgggttttataaaagcctttgaggtctatgtattttaaactttattaatgaatgactcacagtaagatgtaccttttacatccttcctcaacacacatacacatcagctaaaagaaaaactccccaaagcagtactcactcttaccttgtgtaatcgtgctgatattttccattctgttctgagccatgacatgccattgaattaaataaatggtagcactttcttgacttcatgactctctgtttggccaacactgctgtgtagactctgctcccagtcagttggggggcctatttctgaagctaaaggggacccaggccaaaagtcatctgtaactttcccttagcactctggttcatgctcctatgtgtataagtttgtaaataaaacagtggaggaagctctcgggagaacttggagccctccccgcagtcccaactgataattgggctgtcaaattccctttgctcctagtgcaagggctccccctagtggcctcaggccagcctacactggcagagtgggtggagcagggcagcaggactctcatctccgccttcctgggaggtctgcgcattttgctttggtttctggctagttacagtgctaggtcctaggcactaatcattggtagctgttaggggtgggtactgttttgccagtcggcttaagagctatgactcttggaatggcagaggatcccttgctgtatgtcttacgatcctctaggtgctaaactcagtttccccactagctgctggtcttgggaaagtcaactctgagatgtatgtttctcatctgtaaaagtaaacaagagtctggcagcgttggcttaaggacaaatggccatgggaaaatctcctgatagggttgcttagcaatgagtaaacaccagtaatgtcagttcctctctttctttcccctctcctcctcaatggttggtggctgtgtcattgtcaaagtgc

SEQ ID NO: 252 - DNA, 4001 bp, Homo sapiens
gaggtcaggagttttagaccagcctcgccaacatggtgaaaacctgtctccagtaaaaacacaaaaattagccgggcgtagtggcagcctcctgtaatcccagccattccagaggctgaggtgagaatcacttgaacccgggaggcagaggttgcagtgggccgagatcacacctctgcactccagcctgggcaacagagtgagactctggtctcaaagcaaaaacaacaacaacaacaacaacaacaacaacaacaacaaaactcactttacaagaaacactaaaagaagttcatcaggctgaaagcaagtgaccccagacagtaattcaaaaccacacacacacaaaaacagcaccagtaaaggtaattatgttcttatatagtttaaatgcctattcctctacctccttctcttaatttaaaaagcaattgtatacagtaatatgtgtataatatatacagacatgtactatatttgccaataacaaaacaaagtgggtgaaagcaaacccctgctggctaaggaaatgaccacagacagaaagtaataatgataacacagtactgttgagtttgtaacattatcagatgtaatacatataacaaaataccacaaaaataaccatataagagtaacatttctgtatcacttggaattaacctagtacaaatctgaagcttaagatgtatatggagaatatgaagattaagctgtatacggtaaaacataaagcactggaaaaaacccaaaaaagttgtggaaaaaaaatcattaaattaaaatgctacattaggaaatattcactttaatccacttaaagaaggaacaggggaagaaaaagacagacttgtataaagaaaagaaaaagtaaaatggcaaatgtaaacctaactacagtgtatcaataatattaaatgtgcatgggctaaacaattcaatcaaaaggcagaaactaccagactgcattttaaaaaagatccaagtatatgtgcctacaggagacaagttttggttcaaagataaaaatagtaaaaggagttggaattcacaagtggccactccatttgaacaaaccaggagagcctccatgcagctcagagcctcccaagtggaccgggacccgcgccgggtccactgtgaaaagggtccttcgccttaactgttacacccacgcaatgagcacttgccccttgccagacactggcaccccccttcaatcctcaccaccctcttggtggatccctcatcaccccacttttagcacattcagtagatggggccaagctgaggtcacttgctgtgtgacgtccattggagtggcagcagttgaggggcacaaactcagctctgcagcatctagcactaccaggagttgaaaccagttctggagagggtgccccaccttcctaggaaagtggcccgaaacctcccttcaagggggcgtgacctgggagccccctgttgcccaggacgtgaactgtgagctccacttctcccgagggcgtggaccggagccccccttctcccgcgggcatggcctgggagctccccttctctcgggggtgtggcccagaggccccattctgcgggggtgggtaacctgggagcccccttctcccggggacgtgacctgtgagctccacttcttccgagggcgtggcccggagcccccttttcacaggggcgtgacctggcagccctccttctcccgggagcgtggcctggagccccccaactactgccgggggcgaggcccaagcggaggccgctcctaggccacaggcaccccgtgaccccgccccggttctccagacagcaggtgacccagagtccccgccctgcccggcgcagctgctgccgggacccagccctcaccttccggctcctcatgagtgtgagcaccgcagccaagcaccgcgcgccccggccaacgcgtcccggcggagcggcgacccggagtctgcagagcgcgccgcggcggcgtccgacgtcagcacagccaatcacagtgcagcaccctcgtcatgtgattccccccccccccccccccgtgttggctctttcgtaagcggcgggcgaaggtcacaggccttgggccagtggtgggacactggagcaggaagtcggcctgtggccggccatgttcatgagggcgcgtcccttggcacccctgtagccgctatgtttcccacgcccgtggcaggcctgagagattatgtttgcggggggtgctttttttgtagcttctgtgttcgccatatttgaaaggggcagacggccatgttcgtgaacggcgcttcccttggtgcacctgtggccgccatgtttgagcgaggtgggcaactatgttcttgaggggggagcaaccatgttcttgaggggctcttcccttgaagcctctttggccaccatgtttgagaggggcagacggccatgtttgtaaggggcgcttctcttggtgcgcctgtggccgctatgtttgagaggggcaggcaaccatgttcgtgaggggcgcttcccttgaagcctctttggcgccatgtatgagaggggcggacggccatgtttgtgaggggctcttcctttggtgcgcctgtggccgccatgtttgagaggggcgggcgggacgtccgtgaggggcccctccccttgcatcccctggctaacagcctgcaggagggcgggaagtgctttctccagtgccgcagagcgctggtttctgagtgccggttagcggccttgagcagcgcgagggactcccaggcctgcccgtgctgcggtcccgctggggagctttgcgcgcttgtcgcaggctgtgctgccccgcgacatgccgctttgggttggggtggcccgcccgggaagtggcctcagctgtcccccacgttgcgggcgggagggggccttagtggaggccgtcggtgggcccaggaggccagggtccggcgtcgggctgggggccggttttcgtcccccgttacgtgcaaggcgggaaatgacccctccgccgtcccgttactctccggggccaacgtggactcgcaggggccacgccttttccaatggccacgcccctagcaggcctgggtggacccgcagcggccacgcctcctccaatggccgcgccctatcaggtctggatggacacacggcggccacgcctcctccagcaaacacgcccctagcaggcctgggctgctgtgatgcgtcctctttggccgccgctgagggaggtgtttgtaaagctgaggaccactgttctgttgtgggtttttttgtttgtttgtttgttttttgagacggagtctcgctctgtcacccaggctggagtgcagtggcgcgatctcagctcactgcaacctccgcctcatgggctcaagccattctcctgcctcagcctcctgagtagctgggattacaggcaggcgccaccacacctggctaatttttgtatttttagtagagatggggtttcatcatgttggtcaggctggtctcgaactcctgacctcaaataatccgcccaccttggcctcccaaagtgctgggattacaggcgtgagccaccgtgccaggcccactgttcttttcttttcttttttttttttgacgggagtctcgctatgtcgcccaggctggagtggagtgacgcaatctcggctcactgcaagctctgcctcccgggttcacgccattctcctgcctcagcctcccgagtagctgggactacaggctcccgccaccacacccggctaatttttttgtatttttagtagagacggggtttcaccgtgttagctaggatgatctcgatctcctgacctcgtggtccgcctgctgcggcctcccaaaatgctgggattacaggcgtgagccaccgcgctcggcacactgttctgttcttaagaatttcaacatagaaatgaaatccagccttgccttaaaccctccagccctcaagttctctgggctctaggatgtgtgtcttcagaaaaggg

SEQ ID NO: 253 - DNA, 4001 bp, Homo sapiens
cccagtgtatgccaggctctctgcttgggactccagacatgagaacacctaccccagtgagtcctcggaagcgaacctccccagagctgagcagcccccgggtgctacatggtttctcccgcagctgttctaagaagtctttgaggttgtaggagccggggcccagcttttgctcctgtgccaagagaagagagaaaatgaaagccttaaacttgggaaaatccacgcaggaagaagcccaaggcacgatggtgttccttaaaggataatctccatctggccttgggaggacactgaaggccacacagagcagctgcaatggacaggaagacctggcaccagagagggagaggcatggccccagaggcctcaccttcagccgcttctctttcatgatggcctggtactggaagtggggtagctgggtcagccgcgtggcttcctgggccttggcccagcctgtgtccacctccttcatcagcttcttcttgctgaagcaggtctctttggagctgtaagtcccagggcctatgtgggactgagtcagagtgtggtcagagctgtgacagccacgcccgcccagtctacccacagagcaggccctcaccaagccaccaccctgacccggaggaagggagtaggcaatccccctgtggctcccaccctcagcactaaggctggcaccaacaggcttggcactcaaggtgcaatcgtgacatcctctatcactgccccctcacactgcaggaaggtataacaactccttcaagagcccagaggtagtcagtgcacaagctgggagtgctgcagtccctcgtttatcaaacacactggaagcccccactgtgggtccagctctgtgctggaagaaggtagaaagtacgccccttctacagctcagctcatccaccacagcaggcagctcgaaggggcagtggccagaccctgtgggaggagtcagggaagctgtgcaaactcaccacttgggtagaataacgcgtggagtatggggcctcagtgaaggtgctgaacttcttccagttgggataaacagcagagatgtcaaacctagggagggacggtggcccagtgagagccctgtgcctggcacctggccctggcgtgggcagttctggagcatgggggagttggctgcccgggaaggtgactttggagcaagctcatgaaagaaaagtagtggagttgcagtggctttgaatgttccaggctgctcccaccccaccccaccccacccaccagctcctcctcccagcttcatttttctccacagtccttaccaatacccaaggttttacagatgtacatacttttgtttattacccacccccaccccccacagaagagagcaaactccatgagtacaggggtttgctgttgtgttcactgctgtagccccagatcctagaactgtgcctggaacacagtaggtgagagagagaaagagacagagtggaatatgagtgaatggaagacagacacctgggctgaaatcccacccaccacttttgagctgagtggcctactatggaccaggccatgtgacctctctaaacctggcacatagtaagtgctcttgaaatggttttaaagaactcacttagatggtaaaagaaccctgggcagggaagagcactaagcaagagggggagagaaagcccagcccctcctcactgccggcccccactcctctggttcccctccccgccaggctcagccctgtgtgtaggtggacaccctctctcccgaggccaagcgtggcttcggggtgggcagcagctgctttggaccgtgggcgtgagcccaggacgcaaacgggccccacctgtggctctgcaccccgaagggcgccccggtgaaccacttggtggccgtggagccgacgcggttccagccatgagctccggcggcatcctggctttccctcatggcaggcctgcgcgctgcccgcctccgctgctgccacggcaacccgggccttgtgatgcgccccggagctgtgggcctcgccctcgcccacgtggcgcccccaccggcgtgcgcacgtagcccgctgatttttaacttgtccgtgcacattttcagggtccttccctggcccctgcagatgtaatggcccttcttgtatttaatatggatgccattgggtggggtcttacagtcatttgttgaggaagtgtttctgatttctggctttatcccagagccctgcatggagcctgcctaggctcagaaagaaccttttaaagttcaccttgtgctgatgggaaactgaggcccacagagagggccgccttgggcaaatgacatcccagctccttctccactttgggagtcaggggagcagaagtaagggggaaagggcaaggagagccagagggtggagggctgggcaaagctgcaggggtagtcaggactcaaccggcccctagacgtccctggcacccactctgggcagacacagtgcagaatgactgggacccagatgtggtccctgccctgaaaataatgggggaagcaatgaccacatactatggtcaggtctatgagagagggaggcctctgacccagcctgtgggtaggtaggtcagggaagacttcttggaggagaattccaaactcaacattgaagcatatggatgactttccaagtaaagaaaggaattgagggtatgtaccccacacagggcatagtcagctctctcttccctccttctttaccccccaaccagtgctccacagccatgctctgagattgtctaatttctctcacgatggcttgtgatcttcccaaggatcttaggcaaaggtggggcagagatccataccccattccatggtgacaggattgaagccagagaggcgtaggttgtaccagaggccctgcttccagcccatggtgaacctggaccagaggcacagtgggtcttctgccaggccccacccagtgcccttctgacatcccaagctggtagttagataagaagtgtggctccccagcacagctgagagctggacccttaggctccaggcctggcgggccactgctggcagagcgtctgcgctgcaccactgagctgatggtcagaggtggcaggcctcaggaacatgcacagaacggaaagcctgggtcatctaagcagactctgcccttcccagccgtgggatcttgagcaagtcacttctttctctgagtcacagcattatcagtttcattctataaaatgaaagtaatcgtctctatctcccaggctgctgtgaggatgaaatgacctgatttaggtaatactcttggcacacagcaggagctcaattggaggtcattcccagcccttggttagagacctttacagaggcctgaggacagacacttgtctcatttcctcctggtgcagcatctagcacatagtaaatgttcaggaaatatttgttgaatgacaagggaatgaatacatgcatctggtcaaactacccaataacacataaatcctcaaagacacatttaaatctggctctgccacttcctgggtgctgaccttgggcaagttacccttgccaactttgatttcctcttctgtgacatggacctatgactgtggcttcctggaaaggctgttttgaggtgtcaacaaggtgtggatgtgcacactctccagtcctgtgcacttcagccagccctgggtctgcttgggtattctcagggtggcccagacatgcctgcagctatattgctgcttctcttctggcctgagccccatggctctaggactcatggaggagtgaccaaaggctataagccaaggtccactgggctgggagtcgtggctgccaggaaagccagaacaggccaaatgagtcagctctgcagcaaggccgcctgccctggtcagcccaaagtttcccatcacagcagcttccttgtctagcatctcacccattttcttttataggcaccattgcaccctcattgtacacaagaggaa

SEQ ID NO: 254 - DNA, 4001 bp, Homo sapiens
cagatttcattcttaggtttatgctgtatataagtggtttagtccaatcaacaaatatctgttgaacagcaaatacgtgtgaaacattgcatgggggacttaagggggataaaaatctgtttaaaataagaataatccttactctgaggtttaaaaatctataatgaaatatatgcagggctgatatgcagccagtatgtaaagtggaccatattgattatttatagttggtgtctgctttgatctgatataagcctaactggatctgtgaactttgaaaagctacttattatattggatggatcttaatgttctcacttgaaaaatgagaatcatactatctcacagaattacagcaagcaataaataagataatattataagaaattaataacataatggctgggtgcagtggctcatgcctgtaatcccagcagtttgggaggccaaggcaggcagatcacctgaggtcaggaattcaagaccagcatggccaacatgttgaaaccctgtctctactaaaaacacacaagattaaccagtcgtgatggtgggcacctgtggtcccagttagcggggcagctgaggcaggagaattgcttgaacccagaaggcagaggttgcagtgagccgagattgcgccactgcactccagcctgggtgactgagtgaaactcagtctcaaaaaaaaaaaaaaaaggaaagacatctgaaatttaacatgcatataataatatcaggccataaagcaagactcaacaagtttttatttgtttcgtggtttttgtgtgtgtgtgtgtgtgtgtgtgtgtgtgtgtgtgtgtttttcgagacaagatctcactctgttgcccaggctggagtgcagtggcatgatcatagctcattgtagtctcaaagtcctgggcccagctgatcctcccacctcagcctcctaagtatctaggactacacatgtgtgccaccatccctgtctaatttttaaattttttgtagagatggaatctctctatgttgcccaggttcgtcttgagctcctggcctcaagggatcctcccacctcggcctctcaaagtgctgagatttcaagtgagagccactgtacctggccaagactcaacaagttttataaaatcattattatatataccatgttctctgacaataatgcaattaatctctacattaataacttaaaatataccctaagaaaagctcctgtgcttggggaaatttaaaatcacattgtaaataactcattaattaaagaagaaatcagtgaaacctagaaaatacacaggactagataataatgaaaatactatgcataaatactcataggaacacagctggagccaaatttaaggaaaatatatggccctaaatgcatatattagaaaagaagtttgaaaactaatgagcttagcatacaaattacaagttgaaaaagaccagcaaaataaacccaaagaaagtagaggaagaaaataataaagaacagaaattaatgaaataaaatttatgattcttggtaaagactaataaaatggacaaatctctagtaagattaaccaaatgaaaaaaatagaaggcataaataaataatattaaaaatgaagaaagaacataatcacagatagagcagaggttaaaataaatactttcaatgaatttatgctaatatatttgaaaacttatacaaaataatatatacctaaaaagtaacttacaaaaagtgactcaagaagtaatagaaaacatatatgaacagtatccgttaaattgaatcagtagttacaaaatttcccccaaagaaaatagccccaataactttacaatttctactgtatacccatgattcaagtatttcttatcttatacaagctcttccagagaatagaaatagatttctggttgttcgtctaaatatattttcctcttcttcccaggcaaaaagctagactacatgacccagcttctcatacctttaggtgaagccatatgactgagttctaaccaatagaatttgagtggaagtgatgtcataaaaacattccaggcaattttcttcatgatctttctccctttgggctgacgggggtggagatgatccctagggaaaccttggaagccacgtattgatgttactaccatcaatcaactggatctaattgacatttatagaacattcaacccaacgagagcaaaatgcatatcctttccaagtacacatgatacattatctaatacagagaaatcattgaaaactaccataacttctaaataacacatttctaaataatcattaaagaggaagtctcaaaggaaaataaaaagatattttcaacaaataaaatgaaagcacagtatatcaggatttacagcatgccactaaagcactacttatagggtataatctaccatttttttcataaaagggcaaccttttagcgttctgaaattatagatccattactatactatatatttcatcacaaatttgactttttattctcgatgaactgtaaatgtacattctgtaatctaatcgcttatgtgagtagtcaggtaggctatggaacatttttttgttaattctgctttgcctttttttttttttttttgagtgaagtcttgctcttgtcgcccaggctggagtgcagtggcatgatcttggctcactgcaacctctgcctcccgggttccactgattctcctgcctcagcctcccaagtagctgggattacaggcacccaccaccatacccagctaatttttgtatttttagtagagatgggatttcaccatgttggccagactggtctcgaactccttaccttgggtgatctgcccaccttggcctcccaaacgctgggattacagatgtgaaccaccatgcccagcttgcttatttttaaagtaaattaaatccaatgaattatatatatctttgttatcaagcaaaagaggctcactgcccaatgtgattgcagcaaatactatgacattgggtttttgagaaaagaaaaaagaaacgctttttttttttttttttttttctagataaggtcttgctctgttgcccagcccggagtgcagcggcttgatcatggatcacttccacctcaatctcccaggctcaaacgatcctcccgcctcactcttccaagtagctgggacttcaggcatttgccatcatacccagctaatttaaattaaatttttttttcgtagagatgggatttcactacactgtccagcttggtctcaaactcctgagcacaagtgatcctcccacctcagactccaaaactgctaggattagaagcatgagccaccacacccagccaagaagctttttattgcaagtcaaccaacaaagagacaggagtccaactcaaatctgccaccctatgctggcttcaaggcagtatttttattagaaaagttcagggggtgcattctgaaattagtaggtgattggtggaaggaaagggaggtctggaaagtcctcaggcatgtgtacttatctcttcatgctttctcatgggtcccatgtgcaaattcagggggagttaataaaaaacatatggtggaaattcaggctgtaatgtcagcaaattcattctgcacaaactctaattggccatattggtttcaactgattttagtcagttttgttttcttactattaatagcaaaggaagtttcagcttttcagcaagttgtttcttatgtgtcatcctgcaaactcaagaatatctgttgttagtttctttaactctttggagtagggtttcatcttcagtcagcttatttgacattttattctcgatgatctataaatgtactgcggttattctaaacctctgctttttgctcaagctttcaattccatctaccactatccttaatttcagatgacctctcacaccttatgctatcaaagcgtttcttcccacatttaaaagtgctataaaccttatagttacagtgattgc

SEQ ID NO: 255 - DNA, 4001 bp, Homo sapiens
gacatatttatccaatttttcatgtttgaccataaggtaagattttatagactctttttaaccttttataatttttgttaaagagcaggttgatgctttaagaaaaacctgtggcattttttactttaatgtccagttcacagaaaaactggatgatacctttttaactttagctaatatgtttacacacagaattttctttataattaacgttttaaaacttgcttaaacttttaaaacaataattgtttttaaccttttaatgtaggtaaaaatccacattcttatgcccctttataatctttttaccaaaggtatgttttacttttcttatacaccttgcacataaactgtttttttaatagtactcaggaggccttattacttttaaattatacaacattttttgcataaatttttttataacattttttctttcacgacttttgccgacaattcttcaatgtgtctcaactttctgacttattacaaacattttttttctttaaacaccagttagtttatttcaggacaagaatttaccatataacactctttttacataaattctgtctccccccacttttttttttttttgaagataaccattccttttttttttttttaaagcaaactttctttatgcctttggactagactgtctaaggccacaagattagaagttaccataatacatgttacactgttaactttaagcaaacttcacttttgttgaaaaccttgtaagtttgggatttcaattatcctttgctattaagaccttgtttagtctaaattaacttagaattggtatagatggcctttttttctctctactggtctttccttgcctctgccagccgcttatgctgctgttctcttaactacgttggcggggcaagggggtataaaagcagctgtaactttctatgtatggaaactggtctgggtgccttggcttacgggttaccttgtgtcatacctttgaaacaagggacctgtccaggcttccttctgatggccaacccacctctaatgctggccagtctatttcacacaaagttctaagttttcctggtgtcacagtaacactgtaatctcccttaaattctttcttgaatttttttttaacatagttcctagtggggtgggcttatttgtacctgacccatgcttcttcgagacaaaacaccacacccacaccacacacatgccacaaacaaaaaaacaggtaaaaagggcatacacactcttgcagtttacaccaaaccaaaatcaaaaccaaaatcagagtatccagaaatccaagccaggtcaaaaccaaaaccaaaaccaaagtatcacacaatctaagtcaagtcaaaaccagaacagaagtgccaatgcaggcatgtcgtgggtgatcaggccacacttccacctagatggagtggggcaagttccaaagactagtcttaccaagtttcagatgtccggactccaagtgccagttccttcccggtgttcagccactgtgttaatcctccacagggaactgctacacgctgctctggtgaggcattccaccggggcaatttcctacccgggagtgctctttggatcgcgtcactcgggctggccggagtccgcctcagggatgctccacaggggaggcctaagccgcctaaggggctgcctcggctgtccatcagttacctcgtttcctggtcagggaaccaagaaatgtagcaggacgagccgcagacaaaacccctcagacaccaaattgtagaaggaagggctttattcagctgggagcatcagcaggctactgccttaaaatccgagctccccgaatgcacaatttccgtcccttttaagggctcacaatactaaagatttcacatgaaagggtcatgattgatttgagcaagcaggcggtatgtgacaggggctgcatgcaccggtggtcagagagaaacagaacagggcagggagtttcacaatgttcttctatacaatgtctggaatctatgaataacatcagtttctaagttatgagttgatttttaactactgggtttaggccaggcaggcccaggcctggtttcgggcctggcgccggactgcctgtctttggttttacttccttgttgtttttccttaaaacaggtactgagtataaaacaatataaaacaatatgagagggtctctctcttccctcacagtgacctgggtctcagacacttcctaactgtgatcttaggacaaacacttagcttttctgagcctcatctgtgaaacagacagaatatgaatgcctacctcatggagttgtttaagaactcagtgatcagactattattcaacagtaataacgagccaggcccagtggctcacgcctataatctcagcactttgggaagtcaaggcaggaggaccgcctgagctcaagagtttgagaccagcctgggcaatatagctagaccttgtctctactttaaaaaaaaaaaatccgaaaattagctgggtgtgctactgcatgcctgtagtcccagctccttgagaggctgagataggagaatcacttaagctagggaagtcgaggctgcagtgagccatgatcacaccattgtactctagcctgggtgacagagcaagaccctgtcacaaaaacaaacaaagaaacagaagacaggaataaccaccatttgtattgttctagttttcagttggtcttacctgagcagagtaattgggtgagattgttcatggaggcattgctggctctctagtcctggaacctacagttggtccaattcattatgccaaagggtccgtctaggaggttcttgttccaagtattgagattcccgagagaagtaggtccccttagatagaagcagagtttctcagaggtatttagcagcagctggtggacacaggactcagggagctggcccccctcttcccttccatgtctttcattcctgcatgggaacctgtcagatggggagattgttaaaatctcaccactggaggggagggcctcaaaggccatggagacagcacctctctcttagtgaaggcatcttcagatagaattcagcacaaattcaaaggtggctccccagaccctatctgtcacatcgccctctcatctattagtatctgaagtcaccttgatcatttatttgtttacttgattattgtcagcctctcatcacatgaatgtgagcttcataagaacagagaccttatctgttttggccaacatttcacccccagtgtctagaaagtgcctcatgcaatgaataggtccaatacatatttcttcaataaatgaatgaatgaatgaatgccaaagactccttcataaaagccagggtcaactgacctctgccagaattttggagagcctacaccacagacttttgaacctcttagctgatgacaaatctttagccttcgaagcggaaattgatttgaaagagcccaaagtactccggtaaagtaggtgatgttgaactgggtaatgtcaatttcagaaaaagaggacacgtgcctgtgaaacaccaagagcagtgtcctggggttggggaggacacctgcctgggtgtgggtggccaaggggaagaaggaagagaaagagcaggggaagatgctgtcccacagccaccaccacaggtgttcaccggcctcaggcgccagccctgctcagggtgagaggcgaagagggaggtgtgcttaaggccaaatgaaagaggatctgccaccctctcctcccccaactcttaccacattctagcaaagagagctgcaggagcagtcaggaaatcccctaacaaggcaagcattggaaccaagagcccaggtggcacggatgagtcacttcacttacttggactcagttcccctatttgtgaaatgaagcaaggatgagaagaggaacaagacgtgatcaagaaaaaggcaaatgttttcacaagtgcctgtcattgcccccttctgttgtcccctt

SEQ ID NO: 256 - DNA, 4001 bp, Homo sapiens
ttctcctatcccatttcagaccacttttatcagaatctcctagggttaagaactaggcatcagtgcttatttatttatttaaattaagttttttggtagagatgggggtcttgccatgttgcccaggctggtctcgaactcctgagctcaagcaatccacctgccttgccctcccaaagtgctgggattacagacatgagccaatgtgcccagctcattttgttttgttttgagacagggttttcctctctcacccaggctagaatgcagtggtggcatcacttgacctgagctcaactgatcctcctgcttcagtctcctgagtggctgagactacaggcatgcaccaccacacctagctaattttaatttttttggtagagacagggttttcctatgttgcccaggctggtctcgagctcctgggctcaagcaatccccctgcctcggcctcccaaggtgctgggattataggtgtgaaccaccatgccaggcttgcatcagtgtttttttttttttttttgtagagacggagtcttgctctgtcacccaggctggagtgctggagtgcagtggtgcgatcttggctcactgcaccctccgcatcctaagttcaagcaattctcctgcctcagcctcccgagtagctgggactacaggcgcacactaccatgcctggctaacttcttttgtattttagtagagacagggtttcaccatgttgcctaggctggtcttgaactcctgagctcaggcaatcctcctgcctcagcctcccaaagtgctaggattacaggcgtgagccaccgcgcccggctgcatcagttttttcaaaagttcatcagggtgaaaaggatacgtagcccagtcttgtgaatcttctcattcactggttcaacaaatactgcactaccaaccacataattagtacaaagccaggcaacaaatacttgaattcttgataaaaaaagaaaataaaaacatgcttcaatttttctccagagaatgaggcaggggacaataaaaaccaatctatatcacctaacctagtaggcactaagaggctgatctcatttgctttgaggacaaggctgcttctcaccccttccgcatctgttttcctcttgatgagcccctaaagagatgcagcagagttgggaggtggctcagggaagacagcagagtggaaaggtcaagctcaaaggtaaagggaggggatagaagcagattacctgtcgaccgtcttcttaagtcccatggccttttgaaaactctgcaagaaaaggtagttctgttgatctgcctcagtctccagaacctctattctaatgagagacatagaccttttttttttttgagacagagttttgctcttgttgcccaggccagagtgcagtggcgtgatctcggctcaccgcaatctccgcctcccgggttcaagcgattctcctgcctcagcctccgagtagctgagattataggaatgcaccaccatgccgggctaattttgtatttttagtagagatggggtttctccatgttggtcaggctagtctcgaactcctgacctcaggtgatccgcccacctcagcctcccaaagtgataggattacaggcgtgagtcaccgcacccagccacatagacctttttgagaaagcaatttcctggggggaaatagggagaggaaagctctactttcagaatggatcaaagaaaacacgcaggggttggatagaacacatatttgaatacctactgtgtactagacacagcctcccactcctgttactaactacattatacccttgttacatcaaaagcctttcccagtaaaagatgcacttatagtaaattgatctggaaacttcatcaaacttcaacccagcccctccttccaactctgcatacctcttctacttttgtcatcttttccacagacatgtctatagatttgcttgatacagtctgaggagactgacaggctcctctgtttagttcagtaaccaaggtttcagtagtcatagtaacatttacacctccaacaataaccctgggcctaggagttgattggccacctggcctgttgccccagaaaccttgagagaatccttgttctgcagccttctgttggtgacacaggcatctatgagcaagggccacagtcctgattttaggatttcttgtgctagggtcccaaggagtatgtgtatggtcgtaggtccagggtatgcacacagtcccaccaattctctggaggcaaatcctcatgccctataccctgttagaaatgtgcagataacattatcaaatgcctgttttattaaaagacaactataaaggactgattcatacgttttatttgataatagttcattttattaaataatttataaagtcagaccagtgcattgggcttgttaggggaaaccattccttcctactgtcacatagcctggcagattatatcaggtgccaaaacattcccttttattcaatttattaatgagagtgtggaattaaagtagatccttgcatgtcaggaaagctgcaacacatctggtttaagtggagcacaaaggtaagttattccacattcaccaacttccccacttgacctcccaccagttcctgtctgctttttccatcaatcaactctaagatgccctaaacccaaacagttcccattcaactgtgcacaaaggtatagatatggaagacatctcactccaactctcacctttggaattaaataaacctggaacagggaaggtgaactatggctgaaaccaagtgaagatttttaagaagctttgacagaaacattaagaataacacctgaatgcaaatccagaaaaaagcgctactgggggaaaatagtcttagccaatgttctaaaaatgctcataaggaagggttggggaattaccctttagacacaagctctaagaactctggatacaacgggaacttggatggatacagtctgggcctgctgggccagatgttccgagggcggcccggcaagcagcctgtcttgcacattgcaactgactggcttaatctacggcaagagtccttcagctccgtcacagagtactctccaatgtgttatagttatccttaaagctcttcaattcaaggaagtgcttggcacgtttactcttctgactggaggggaggtatgtcacctggatggttgttggggagacctcaggggactgagttaggtctttggctgctgactggtgatgtcgctgagagctcccaattcgtgctttaaccctgaagaacagagaggggaggtcattgacagaatgaggactaatcaaagaaatcagggcttatcccaggccataaatgcagcaatagtcacaaatagttatttgtgtcctatctgtcctattttgtaaactagttactaaaaccccatctagtagcttagaaatacaagaggctgagcgcggtggctcacgcctgtaatcccagcactttgggaggcccaggcaggtggattgtttgaggtcaggagttcgagaccagcctggccaacatggtgaaaccctgtctctactaaaaatacaaaaattagctgggagtggtggcgggtgcctgtaatcccagctactcgggaggctgaggcaagagaatcacttgaacccaggaggcagaggttgcaagccaagattgcgccactgcacttcagcctgggtgacagagcaagactccatctcaaaaaaaaaaaaagtagcagagaggctgggcatggtcacttatacctgtaatcccagcacttcaggaggcagaggccagagatcgcttgagcccaggggagtttgagaccagtctgggaaacaaagtgagaccctatctctgcaaaaaattagccaggtatggtggcaagcacctgtagtcctggttcctcaggaggctgaggcaggaggatcgcttgaacccagaattcgaggctgcagtgagccatgaatgtgccactgcactccag

SEQ ID NO: 257 - DNA, 4001 bp, Homo sapiens
gtcacaacatgtgctattgtgcaagcatttttgctattgtcggtctctctttactactagagttccttgacagcagaagctacatctaatttatttatatatccttggcgtttagcagagtgtctggcttatagtaaataagtattgaataaataaaaaggggctctcaatattgttattagaccacaatcaccacttaattcatcttattgtgcaccacttcatatatcccaatcacttctaccagaaaaaagatcatctaagttccgaaatcagtgtccaccatcatgctaaacacacacataacaaacatattgtggtgttaaccagaagacagagacagtgtgaacacagatgtgtaaagcatgacctctggtggctttcagaggattctctcccactccatatctcatttctcttcagagaacagtcttccaaatagggaaatgggtagcttgaaggaacctgggcactgccataacttatactcacaattgatttgagctgccagagccccttgttcctctagactagaactctactttcctctgctcaaaaacgcctctgaaacgttagccgacttgaatatggagatagggaggcaggcagaaaacagacttccctggtacccgactgagtgtcttcaccagagtcctttatgttaccatctctgctcatcacacagacagaaagaagactaccggcgaccctactgggaatctgcgcaagaaaccacagtaccttggaagcccgcagttctcctaagtaggaatcatcgttatctaatgtaggctgctggaaagggtcccgggtgggaggcatggctaaatgcctaactcttttaagagggatgggaggcccgctcagccgcagcacagcctcactggcataagatcccgggtcccaattgtttggagcgctggtttcggttgccaggcaactgcccagccatctatgacagaggaattccctcagaggagggcgccacctggcggctgaccacgggaggcccctggggaggaagctccggggactgcagagggaacgttccgctgagcgggcccgagacttggaattgcactcctgagcctcggcggaaaagtgctggctgctcaccatcaggacttctgcaaaagacttcagttgaggaaagaagtcctgaaagatgacccagaaatttccttctccctcgcacctaacaaaaggctttcaaagccatgagagaatgaggatgtcaagagaccaaagagggccgggcgcggtggttcacgcctgtaatctcagcactttgggaagcggaggcgggcggatcgcttaagcccaagagttcgagaccagtctgggcaacatggcgaaaccccgtctctacaaaaagtaggaaaaaaattagctgggcttggtggcacgcgcccgtagtcccagctactcgggaggctaatccaggagaatctcttgaacccggaaggcggaggttgcagttagccgagatcgcgccactgcactccagtgtgggcgagagagtgagaccctgtctcagagagagagagagagagagagaaagagagagagagagagagagagagagagagagagagagagagagagagagaggcccacgtgcggcgcttgggaaattgcggctaaggcaaactcctcgcttaaactcggatcaactacagtgtcagggcttctcttctagccggttgtaaaagcacggatggatttggcgggatgtaagatctccaggagtggccttcgtaggagggaacacgtactggggcctcttccaggcgacgacgtctggagggtgatctctccatcttctttctctcggttcacacgccacgtgtgcaacatcggagatgctcataaaataacccctggcccgaaagggcagtagaaaacggaaatttgttggctggcttggaggatgcttccactgtgttcttcacacgagccccgggcctgcctgttgggccggttgcgcaccccgggcgcgcgctctcccgcgcccacgccgcgcgcaccagcggcggcggctgccatggcgacccgcaggtgagctgcagaggcgcgcgtggtccctgccccacccgcgcggagccagagaggaggcggttgtcaaggcgacgtgggtaggaggagaggacagagggaggaggaaggatgggcggtgttggcgtagccgcagggaggtgactgaagcgagcctggcctcttgcatcctccgcctgtgtacctccctcccctttttttccgccttctgccagcagaagcagcagccgcagcacctgagccgctactgccgctcactcaggacaacgctatggctgagcctgggcacagccaccatctctccgccagagtcaggggaagaactgagaggcgcataccccggctgtggcggctgctgctctgggctgggaccgccttccaggtgacccagggaacgggaccggagcttcatgcctgcaaagaggtactgccgcccccctacccgatcccgctttggtcacaaaagtcttggatccaggcggagaccttggggacccaggcgcagagagtttcagacgccacggagtttagatttctttggggatgaggcgtggggggagggaagaggagccagtctggcgtcatgaggaggccagcacattggaggactcacggatagatcatcctcacagattgggatgctgagctcagcgagaaaggtcccagccccaagaaggggagctacctgggtacctgaactcagaatgagggaggcagacgagttattttccagttaggatgaactcaccttaaaagtggttgacaagaaaagattatgcacagagaagcaaaataggaagaggaaagaagagtagtgggagaggaaaggagttaggaaggccagaaaaaagtatcagagcgaagtggttttatcatggctacacaaaacggagtgtgaaggtgggagatgtgcgagagggatgataggattccagctctctagttccttgtttattaaacatcggttagtgcagactgtaaaatgtgtctcctccttatagcttggcctccccgcagcgtactatgtttagtgtacctgacagtacacgactcacctttttgcagattttgagttcttcaatatcttgtgttctgccaacctctagtctccttctctgacttaacatatgtcaaagtctttttcaaggtatttccaatatgttggaagcagaattcagacaataggtagtcaatctcttataaccaaaaatagcttttgaaaagtcatcttggaggaacataaaagggcactagcagcaacaaaactaagtcatttctatgttattgaaataacaatatttggttgtgctctgagcaacttttttagaaaccatatggcagaggcaacaataagatatttacaagaactacgttggggaaggcaaaataaaagttctgttatttctgtgaaatgtgaaggacttcataaaaagtcaagcatctagctctgtaaatttaatcccaaatatcaagcttgactaaggttttgagaggttagaatatatatatagatgtattttctttactttaaaaaatatatgttttaaaatagaaatgaggtttcgatatactgccccggccagtctctaactcctgggctcaagcgacttcccacctcggcctcccaaagtgctgggattataagaatgagccactgcgcccagcccagaatattttttataaattgttagtgtgaactgattggcaacaactccatcccatatggagataaattcttataaagatgttctgtgtctacagcacagcaggtcataaagaagtcaggtgtgggggggaggatttttgtgtgaataaagatacttgattttgaagattcatgaatatgacataagtgaccccagtgagtgggacttttgataacctttattagctccaatgacaacctgccctgggccatctacatttccacctagccgcattatgac

SEQ ID NO: 258 - DNA, 4001 bp, Homo sapiens
ccagttgaaatgtcttcttgtagaaacaacccaaatgtcccataaaagcctatggtttctacaaggttatacaaggggaacaccacatggccattcaacatggcaatgacacagaaggctctgaaagacatagaaagatgagtctagtgtgccaatgtaaaaaggcagattacgaagctgtccattttttatttcaaaattccctaatacgcaaagaataaaaatttgactatttactataatgtttctaatgtttattcctaacagattacaagtaatttttattccctttctccctgtcttctcttttctaacctgtactttctgagtttcccacagagaaacatgtatgactttgtattaaagtaacagctttaagttcaaatggtcctaatgatctgggtgaccttgagccatggctcactttctcgaaatggggagaatagttttaggatgttgtgaagattcaactataaatgtacttaaaacagtacatgctcaatacatttttaggtgttactgtcataattatttttgaaaatctttccattctagtaagtccattccaaatccaagccaaacacacctgagagtcgtggggctttatctcagaatgcctgggagtacagacccatgagcaagccaacttcctcctttccctcctctcccccggccctctgctgcagggcaaggtaaagctaggtgcctgggatactgctgggtttttttttatctttttttttttttgagatggagtcactgcaacctccgccttccagtttcaagcgattctcctgcctcagcctcctgagtagctgggattacaggtgcgcaccaccacgcccggctaatttttgtattttttggtagaaacggggttttgccatgttgcccagactggtatcaaactcccaggctcaagtgatctgcccacctcaggctcccaaagtgctgggattataggcgtgagtcaccaccacacctggcctattttaaccatttttaagtgtacaattctgggacattaagcacatttacagtgctgtgtgaccatcgccactgtcttttttccagaactactacatcatcccaaacagaaatggaggcaggttttctttttttgagacggagtctccctctgtcgcccaggctggagtgcagtgttgcgatctcagctcactgcaagctccgcctcccgggttcatgccattctcctgcctcagcctcccaagcagctgggactacaggcgccctccaccacgcctggctaattttttgtatttttagtagagacggggtttaaccgtgttaatcaggatggtctcgatctcctgacctcatgatccgcccgcctcggcctccctagaggcaggttttctaaatgcttgcatgagtggttctccatcttcagcttgtgttagaatcctctggggtggggggcttgttaaaacatagattgctgggtcctccctcctcctccaccccccgccacatcccccacccccagttgctgattcagtaggtctgagtggggccccaggatttgcatttctaaccagctcctgggtgacgctgatgctgttgatttggggccacgcctggaagatcgctgtttgagatcaaaaggtttgcaggtcagagtggatgacggcatccttccaggtcaatgagagaagccaaacttctatgacctatgagataaggggtttgttataggaattagttcttatgcattcatagggggggcggcagaaaggaaggtggaagagttgccggggaccaggggcatcgccacctggccctgggtacacgggcaaactggtggagaagtctacagccagccgttgtctggtccatccccagccaagtgtccgcgggggggcctgggctgctgttggttaacaggaccagcagtcaggagaaagagctggatgcagaatggaggacaggctcgaatgtgctggaacccacggggctgtctctcacctcatccaatcatgatgacctctaaagtgtaatggtcgctgcttcacttccatctcccagctttccacagattcctcttttgaccaattataacccagaaccagtcagagaaggggattctgggaaaagtagttccagcttaaccaagcccgcacagcaggaactaccacagctgatcaatcagtccttgccgcggaacctcctccttgaacccacaggtggtttctggggctctgctgggcgttccctgactctcttgacaggaccttctagcagaaacagatgtggtccatcccaacaaccccttgctcagatcatcagctgagaacttaataaaagcagatttccaggccccagcccaggcctgccgagtcagacttcagcagtgggactcaggaatcagattttcaaacaagctctctagctgattaacatacccagccacgtttgaaacttctgaagtatggaaaagaaagtggactctgtccaggcacagtggctcacacctgtaatcccagcactttgggaggctgaggcaggtggatcgcttgagcccaggagtgcaagaccagcctgggcaacatggcaaaactccatttctgcaaaaaagaaaaaataccaaaattagtggagcatggtgacacgtgcctgtagtcccagctacttggaaggctgaggtggtagggtcacctgaccctgggaggtcaaggctgcagtgagccaagattgtgccactgcaccccagcctgggcaacagagtgagtgagaccctgtctcaaaaaaaaaaaaaaaaaaaaaggaaggaaggaggagggagggaggaaagaaaagaatggaaaggaaggaaggagagagagaaagaagaaaaaagaaagagaagaaggagagagagagagacagagacagaagaaaaaggaaaagagaaagtaagtgaactctggggctagacagccacgggttagaattctggttccaccacgtgccagctttgtgatcctgagcaagtgacttaaccctttatgatcctatattgtctacaagagttcctccttttctatcatttcactctccactgtttcagttacccatagccaactacaatctgaaaatattaaatggaaaattccggaaagatatgattcataagttttaaattgcatcccattctgagtagtgtgatgaaatctcacactgtcccactctgtcctgctccagacgtgaatcgtctctttgtccagcagatgggtgctgtcgacactacctgctcattggtcacttaggagcggtctgggttatcagatcagaaaacgtcgtcgttatgtgtaaggtcgggtgctgtctgttgtttcaggcatccactgggggtcttggaacgtatcccccgaggatatgtactcagctgttaaatgggctcaatgcctacctttttcatggagggttgtgggaaccgaatgaggccatgtgtaataaacttctggcaggtgaaatattattgtgcttaatccagttaatagttgtgcctggacatgcctagggagtaggtcagatgggcccagcatctcctctttctgcttaggaatctggggtttaacctgatcatattctttttttttttttttttttttttgaaacggagtttcgctcttttgcctaggctagagtgcagtggcgcaatctcggctcactacaacctctgcctcccaggttcaagcgattctcccgcctcagccttccgagtagctgggattacaagcgcacactaccacgcccagctaattttttgtatttttagtagagacggggtttcaccatgttggccaggctggtctcgaactcctgacctcaagtgatccacccacctcagcctcccaaagtgctgggattacaggcgtgagctactgcgcctggccaacctgatagtattcttaacacagattgttttcctgccatcatgaaaactagacttgctttaaagtctttagagtctcagttcatattccaggcattgttttaca

SEQ ID NO: 259 - DNA, 4001 bp, Homo sapiens
atggatgggtttccctccttatcttggaagacaccttttcttccttgttacctggcttggcaattttactttccccatacatctcatcacaagtattcatgttagtatatatcatttgctcagtcccttcacgggcaggcacggggtggcgttattacccccgttttacacagtggaaactgaggctctaagaagttaattgacccaccgccatacaggtagtaagtagcagagctggattaaaacccaggcttgtctggtttaaaattgcttgttgtttccactttggtcagcctcgcttacgacagctccgggagaagtctctggagtccgtgcgagccggcggatcaggtctagatggaggttctttaacgacccacctctcggcgatctcttaaccaactcccccagcggagcccccaccccccgaacttcggctctggggctcccctcccacccactgccattcctgccttttcttttccagcccctaccagctggggcggcctcacgccggcaggtgcccaccgggccggggcgcctcggggcgccgggaggggaagagggtccgcggccaggcccgcacctacctcgtccccgaagcgcaccaccttctggcccgtgggcccgcgcaagccggggaagcgcgtgagctcctccgagtccccggggtctcggggcgccggggcgcgcggccccaccaggcaccggtcgatgatctcgtcctgctgcgcgggcggcagccgcgcccactcgggcccgtacttctcgcggatcttctccttgtcctgcatgatcttcctggccatggggctcagcgacgagaagtaagtgaagcgctttcgctcccggtcgtccagaggccggttcccgctcatgaccgccgagcgcgaagccgcgatcgccgccgccatggacgccatgcccggcctgcccgccgctcccggcccgcgccccgcccctcgctgtgcccgccctcgccccgccccgcgccacccggagccccgccccctccgggaaccccgccctgcaccgccgcgtacccgggtctccaagccaacccagctccccaagccccgggaccccggccctccgtggccccctccccgggagctcctccctccgggcccccccccgccaccccctcgcggaccccacgagtccccctttacgcctccatagtggattaccgcggtgcccgcaggtttcgggctccccttacccggctcaggtggtagccggcgtgtccctgagtccgcgcccggcgctctgagagggtggccgtggttaattcccggtagtgaccgccatagcgccacgtggccactgcttgacaaaggaaacttttttcaacctccagtgagcctaagaaagccccagcatttcaggccaagccgctggctgcctggcttctgtttttactcctttccttctgtccctttctgggacgagccacaccttctctgctttctctgggcccgtccaggacgctgggcccggggcctggcgcggtgagctgcagatagccgggggcgcagggcagcccggaggctggagggcgacctggaaggctggaccggttcggggcatctggtgctcaaggaaagtcagctcccgccgcccctcggggccaggtgggtgcatgaagtacccggtggcccaggtgcctttccccaacccaaggagctcagaactcttggcagttcgacgtttgcaaacaaaccaaagaggagcagaaagttttcagactcagaggcgacatcccaacaggtagggggccagggtttgtaattttgaggtgtgtcccagacagaccacaaaattaaaattatagcgagcccccacttcccccaagcccctctctccatctgactgattttaacaagactaacaggactcaggtgagaattgtgtccactcgtaaaataaaaaaacaaaaacaaaaaccagcatttcagctgttatccagggtctttgcctggatagttctgaacacaaaagtagaaataacttgcaaagtcctattttaaatgtgagatggcctcatcttccggcccagaaatcctcagaatatttttggaatgtcatgaatgtggcaggctctacagttaaagacattattatcaacaatgttcacaacataatatattgaagcagggaaaggcaagcaccaccaaatatagtctccacagtaagtggcggattatttatgagaccggaagtttaaggacagttttttggagtatgatcttctgtttgagttgatgctagagaagctcaatacattgacctgaatcccactgatttctctcctctaatccttgtttaataatataggtaatgtttaaagatatattcttgaaattaattaacatccccaggcttgctttgatattcacataagaagctgtccgtacccttagaaacttggtctcatgctgttttcaaagcagttgtggaaataattgttgctttcaaaaaaaaaaaaaccacaaccccatgaggtgttttgggtctggcaataattgattgtcaaagaagttttcaagataataaaagcgtgagataattcagggacattggccaaagtatgtaaagtccatgatctggatgataaggggctaactgaaagaaaaattcttccagattataagaagaaactcaggggaattaaagtatggctctaacagatgacttggctgaaattagaaacttttttttttacatatatctttatctactcctggagggaataaaaatagccaaactccggccgggcacggtggctcacgcctataatcccaacagtttgggaggccgaggcgggtggatcatgaggtcaggagatcgagaccaccctgcctaacatggtgaaaccccgtctctactaaaaatacaaaaattagctgggcgtggtggcacgtgcctgtaatcccagctactcgggaggctgaggcaggagaatcacttgaaccagggactcggaggttgcagtgagccaagatcgcgccacaacactctagcctgggcgacagagggagactctgtctaaaaaaaaaaaaaaagaaagaaagaaaaaaagaaaaaaagccaaactccaaatatgtaattaggttacatggtctgaatgtttatatccccccaaaattcatatgttgaaatgctaactggtaagatgatgtggggcctttggggagatggttaggtcaggagggcaaagccctcatgagtgggactggtgcccctgtaagagactcaagggagctcacttgccccatccaccgtgtgaccttacagcaagaaggtgccatcaaaaggcacaacctatgagccaggaagcagaaccagacaccaagtctgtgggtgccctgatctcagacttcccagcttccaggtctgtgagaaataaatttctattgatgataagccactcagttcatagtattttgttatagtggcccgaatggaccaagacttcaagtaaaatagtgcgggatggctgtcatgctaagcacctgtcgcagtccctttgggacgtggtaccatagactgggtgacttcagcaaaaaacatgtatttcttacagttctggaggctggaagtctgacattaggatgccagtgtgatcagattctggtaagagccctctttggggttgcagactgccagcttcttgttatatcctcacatggtggaaagagggatacagcaagctctctcatgactcccgtagggcacaaatccctttcctaaagactccattctcatgacctcatctagtcagtcctaagtactttcttcaggcctcacctcctaataccatcacattggtattaggtagggtttcaacataagaattttgaggggacacaagtgtttagtctgtaacatcttcttaggtaagaatttggatggaggcagcctaaattatctttctttgtgaatgtggtttagccagtagactctctctgttcacaaaatgaagaggctaacacgtggtg

SEQ ID NO: 260 - DNA, 4001 bp, Homo sapiens
tactgggctcttctatgacatgggctttttcatcatgagtaggcgtgtagatattcttagctggacaccaagctaagggaaaatgacagtcactctccaacatttgtaagtacttagaagtttacttcctgtcatatttattcgtgactcttccaaaggagtgctgcctgctttttcatcccccaaatctgggcgcaaacactgcacacaagtctttataaatacgcctattttcccactgaaaatgtttcagctctaggaatacattttaaaacctatattttcccctccccagtttaccacacccttgtttttcctggcaaagccatcagaatttgaagtccagtagagaatttccttttgattccatcagaataaagaaacactggcagcatccttcagtcatttcacttttccctcacattaaagtgggtttatgaccatgaacacttcgtattaataaatgtctcagcacacccaagcctgaaaatctgatctaaacctccttaacttgaattccatccacaatccacaacttcctcggaaaaaatctctcccagcttctccttcctctagcccaagaaacagccttaacagcgagcgatttcattcctacactctttgctcagcttgactttgctcctcacggcaaaagttgagtttgaaacgccaaagagtcacagtgcaaattctaatggcaccaaacaggcttcggttaaacacatttctaagaaaaagaagaccaagtttctgaaccctacagaagattcaggcgtttgtgactaagtgtgggtcatccctgagctttttctggaacagattcagcgtttctaccttcacaaatgactgtccctctagcagtctggacagtgtctagatctgagacctaaacatgccctgttatgtggccaagacttactggagctcatttaaacttatcgtcccttagttttttggtggaaaacagggccaccatgctcacccttaaaacatacgctgggcattgtgctcacttggaaaacatcttagggtgatggatgggtttccctccttatcttggaagacaccttttcttccttgttacctggcttggcaattttactttccccatacatctcatcacaagtattcatgttagtatatatcatttgctcagtcccttcacgggcaggcacggggtggcgttattacccccgttttacacagtggaaactgaggctctaagaagttaattgacccaccgccatacaggtagtaagtagcagagctggattaaaacccaggcttgtctggtttaaaattgcttgttgtttccactttggtcagcctcgcttacgacagctccgggagaagtctctggagtccgtgcgagccggcggatcaggtctagatggaggttctttaacgacccacctctcggcgatctcttaaccaactcccccagcggagcccccaccccccgaacttcggctctggggctcccctcccacccactgccattcctgccttttcttttccagcccctaccagctggggcggcctcacgccggcaggtgcccaccgggccggggcgcctcggggcgccgggaggggaagagggtccgcggccaggcccgcacctacctcgtccccgaagcgcaccaccttctggcccgtgggcccgcgcaagccggggaagcgcgtgagctcctccgagtccccggggtctcggggcgccggggcgcgcggccccaccaggcaccggtcgatgatctcgtcctgctgcgcgggcggcagccgcgcccactcgggcccgtacttctcgcggatcttctccttgtcctgcatgatcttcctggccatggggctcagcgacgagaagtaagtgaagcgctttcgctcccggtcgtccagaggccggttcccgctcatgaccgccgagcgcgaagccgcgatcgccgccgccatggacgccatgcccggcctgcccgccgctcccggcccgcgccccgcccctcgctgtgcccgccctcgccccgccccgcgccacccggagccccgccccctccgggaaccccgccctgcaccgccgcgtacccgggtctccaagccaacccagctccccaagccccgggaccccggccctccgtggccccctccccgggagctcctccctccgggcccccccccgccaccccctcgcggaccccacgagtccccctttacgcctccatagtggattaccgcggtgcccgcaggtttcgggctccccttacccggctcaggtggtagccggcgtgtccctgagtccgcgcccggcgctctgagagggtggccgtggttaattcccggtagtgaccgccatagcgccacgtggccactgcttgacaaaggaaacttttttcaacctccagtgagcctaagaaagccccagcatttcaggccaagccgctggctgcctggcttctgtttttactcctttccttctgtccctttctgggacgagccacaccttctctgctttctctgggcccgtccaggacgctgggcccggggcctggcgcggtgagctgcagatagccgggggcgcagggcagcccggaggctggagggcgacctggaaggctggaccggttcggggcatctggtgctcaaggaaagtcagctcccgccgcccctcggggccaggtgggtgcatgaagtacccggtggcccaggtgcctttccccaacccaaggagctcagaactcttggcagttcgacgtttgcaaacaaaccaaagaggagcagaaagttttcagactcagaggcgacatcccaacaggtagggggccagggtttgtaattttgaggtgtgtcccagacagaccacaaaattaaaattatagcgagcccccacttcccccaagcccctctctccatctgactgattttaacaagactaacaggactcaggtgagaattgtgtccactcgtaaaataaaaaaacaaaaacaaaaaccagcatttcagctgttatccagggtctttgcctggatagttctgaacacaaaagtagaaataacttgcaaagtcctattttaaatgtgagatggcctcatcttccggcccagaaatcctcagaatatttttggaatgtcatgaatgtggcaggctctacagttaaagacattattatcaacaatgttcacaacataatatattgaagcagggaaaggcaagcaccaccaaatatagtctccacagtaagtggcggattatttatgagaccggaagtttaaggacagttttttggagtatgatcttctgtttgagttgatgctagagaagctcaatacattgacctgaatcccactgatttctctcctctaatccttgtttaataatataggtaatgtttaaagatatattcttgaaattaattaacatccccaggcttgctttgatattcacataagaagctgtccgtacccttagaaacttggtctcatgctgttttcaaagcagttgtggaaataattgttgctttcaaaaaaaaaaaaaccacaaccccatgaggtgttttgggtctggcaataattgattgtcaaagaagttttcaagataataaaagcgtgagataattcagggacattggccaaagtatgtaaagtccatgatctggatgataaggggctaactgaaagaaaaattcttccagattataagaagaaactcaggggaattaaagtatggctctaacagatgacttggctgaaattagaaacttttttttttacatatatctttatctactcctggagggaataaaaatagccaaactccggccgggcacggtggctcacgcctataatcccaacagtttgggaggccgaggcgggtggatcatgaggtcaggagatcgagaccaccctgcctaacatggtgaaaccccgtctctactaaaaatacaaaaattagctgggcgtggtggcacgtgcctgtaatcccagctactcgggaggctgaggcaggagaatcac

SEQ ID NO: 261 - DNA, 4001 bp, Homo sapiens
tagctgattcaggaacatttaacaagctaaattcttaagagaacagatgttctcgtggggaacatgatgagcttaggtcttaggacactttaactattttttactttcctttgcctttatcactatgatatcttcaaatatagacccagtccaggaaaatctgcactgctttctgggtcaccatacccaaggctgctcatttccaacacacagagaatctatctggctattaccactagatatcatctataggattagtacttctcacaattacccattttgggagcccatagaagaggaatattgagggccctggctaagaatcaatgtaatgatgcactttttacccacttatgacttcctttgcaatgtcagtagacacaggatccagtgttggatttagaagctattccaattgcaggcggctccttaacatcttgtgctctctcccaagacagtgctggtcacccctgcaacccgtacccgatccctagggagactacattaatgccatgccttccccaaaaccacctcttaactctaacactcatctcaattgtcccacgctcccacgccctgaggccagctcacttcacccagggcaatcggcaatagcttactaaatactgtctgtgtgccaagaacagtgtcagctgtccttgtgtccatctgaacccttgggcaatatttcattttaagacacagtcgccaacatgagggcctctcagggtccttcatgaaccactctggcccaccctcctcataggtctcctgctgggatgagggctctgatcagcaatgatgtggacaagtgaaaaaccaaaaaacaagtgccttgaggtatcagtatttaaaaaccctgatctgcccagcagtccgagccctattccaggctcaccaccgtctctgtctgtaacacactctcatgacgtaaagaaccctccaacacacatcaccaaatgttccagaattcagaaaatcttggtcttttatttctgtcccttgggttaaagacacctgtcttttagtcattttgcttatgaatgtacttctactggggcaacttaggagatggggaaaatgaattaaaatcagtgaagcttgatgctcttaagcaactctggtgatgatgatgataatgatgagaagaagaatgactgggagacagaattagtgatccacgttgggatgaattagctaaatggatgtctatgtctatcaatcagctcgtcacctcccatttgctcaaagctttgtcttatggggcatctcccatcaaggtgctaagtgctgggaaccagaggtatgagcagagacagggcccccaagagggctggcccccttaaccaagctggccgggagtcctagacaatgggcatcatggggcgtcattggaccctggcagaaagcactactactttgaactcactatcaccaaaccacacacaatagtttcctaattcctcaccatgctcctcccatcccctccttttctaccaacaatggacacatcccctgcagcctggcagtcagggggctgtcttctgagtccatcaaatgctgaaagaaaaatatacaactactcagttctttttaaaagaacaaatagatctaaatttaatccaacttacctttgtttcccaggagaaaggggcagagtgctcatcttgccaagttagatcctgaaataaaaaatcgagaataagtctgaaattcaaacccagacataccccatgcaaatatccacccaggaccgtgggggaaccaaaacttaggaataatcccaactcctggctctaaacaagcctgatgctttgacactctcaatataatgcgctgaccgtcttgatcagattgctccctcatctttcccgctgaggctgccagacactcccctccccagccaaacagacaacagggaatgccggtgaggccccccaatggactcagacagatgagatgagtaggagtggatgagggcttgatggtctcagcagaatcaggcacagactcagccctgaacaatgattagctgtgtggccatgggaagatgactcagcctttttgagcctcagttttctcatttgtaaaagcaaaatgatacttcccttgcagggctgttgtaaggattaaatgaggtaatctgggaaaagaacgccaagccataatctgccagtcaatgccaatacaggagctcccctcctccccaacaggcctaccagagagctcgagggcatggatcagcagaatcaatgaagaaaaacgccaatgtaatccatgtgactaattataacaagaactctgaaatcactccccacccccaccaaacagaacaggacagaaagagccctatagaacaatcactacgaatttgaccttggatccagtatgttttgttcactggcctgcacaaatgacttggggaagccacctttccttatatcccaccctctacccgcagttattcctgtgctagcaaatgtctcatctgtgtccagcttcgattgggtaacttttgtttgtttgttggtttgttttaagagatggggtcccagtatgttggccaggctggacgcaaactcctgggctcaagggatgctcctgccttgggtgtccagagcagctgggactacaggtgtgcaccatgtctgactgcttctactgggagcatattttcagaacaaaaaatcaggacacattgggtgatacaggctaaaatgggataaaatattttaaacggagatcatatccatatctccccaaaactccaggtgatttatgtccttccgtaagtatccctggataactgtcttcttcccacccataggtacaccgactctgcgcccctaagtcaagggtctggcttccctctcctctacagggcaaaccagttctgcccacagaccctcttctttcagcttttgacagagcctccgccaccctagcttagcctcagacactgggggcaaatgccagggcccacgcagggggagtgcctcaccaacacataagtgtacacattcagccttccagaccccgagtgtgcgttctctgtgcagacgcctcctaacatgaacagccagtgggaggtcagtctttgaactcaaataacgaaggcatgccagggtctgggcagctgaaggcctattcccaagaagcggggacagggaaggaagtgtgtgatgactccccagcacagcccaagcacggccaaccctagatgacaggggcaacacagcagggcctttgtccgcttctctatcccaagtgcccggaagactcagcgactgcccgtagcggacgcttactcactctttgagaatatgtgaataaacaaactctgcacaagcccggatcctttcacaggttgattttcccccacaatcacccgctcccaacactcacactcccccaagacttcccaatgtgggggcacaggctcttcacagctcttggccccaggaggaagagccagccatcaacagggtagagatctggttctgtgtcctgatggctgtgctgtgtgccttggctctgtgcagtagaggctggtacatttgtggcacaaatacttcacatatgctggggataaagagcaaggaaaacccagagaggagactgtcaaaaggccagaatccaggtctttattttcccaggacagcatataaaaggactaaatatatttatatcaggaaaaaaaacaccactaacaaagatactaggtataaatattaagaattacaaaagtgagggaaaagccctacaaactgggttaagctgcattaaagtgtatcaaacagtcagttctgagaaccacatagtgtgtgcaactaatgaccatgtgcacagtaagatgacccccatcctcagagtgttacagtcactgtcctgtaatggtatttgcttatgatcctgacttctgaactgattggtatgcagtgcctcatggctgtcaagcaaaacctttaaaaatgagaggaaccactgcctttttgtttgga

SEQ ID NO: 262 - DNA, 4001 bp, Homo sapiens
tttgaaccaaaaatgactaaaacatcccccaaaatacattgtaaatatcatgacaaggtgtttaacaaaacaagtgctggtaaatactaaatagctcaattaatccctatctaggagtggctgactacttcagggtgtaagaacgtggagctggatctcagaaaggcctagattctcaccacagaatattccatcataaggcagtaactgtaaaatatctaaaaactttttttttctagcataaagtaatgctgccacactcattcacttggtatttctcaaacatctcctgcagaatgggctctgcacaagttgaccaactgcagacaaatgaaaaaaaaaaaagaaccacaaaaataattgttctaaaacaccagcagcatctaggtgaagggatttaccatactctccgagttccataatatatgctatataaatattattccccctccttcctgcacttcacccagcaccctagaactgtggcacttagttttttaatataagaggttgtagtcttattttcacatgtccttgtttctgtctcaccggatgcctgtgccttctgtgctccaaggactggtttccttttagctttcagcaacatacaaagactccctagaccttcagagcacattattctcaatagaaaatcttgacatgtgaaaactttgaatatttagaaatggcaagtgtattgcactttgtcggttcctcagtttattttacggtcgtagatattctgagctaattctttttgtctttgttttccttttatctgcactttgtatgttgttcagaggagttgccctggatggccccttccagctctgactgccagggatctaagcaggagggaggagagggggcgtggtcgaggcgagcgacagaagcaaccctccccggccctgggcagggttcgccaccccgtgcccaacctccgtggaacgcggacagccacttcggactcacgtctcaatgtttctttattgtgctaacactgctgcctcagagctcagacctcacacacagaacaattcgtccagacagacccccacccacccggcccccggggccctctgcttaggctggggacaccaggcctccggcctcagccgctctaggacactcagcctcctcctccctccctctcccccaagccttcggtcccgggggtgcggagaaggctcaggatcgccttcctccgccctcgcccgccccttcccacttttggggaggaggctctgcctccctacgcatttccttagggaaatgccttcacccccagccgcctggcagcctggggcgagcgaggtcgtccccagccccgacgtgtccccagctgcagacagagagccccgcgccctcctcctggctggggcgcagcccggcccggcgcgcgcgctcacaccaagaggccgttcttgcactgcaccggcccctcggcgcagtcagccggctccgcgctcttgaccttgacgtagaccggggaggggcccgcttcgcaggcggcggcggcggtgcagggcgccagggccacgtcctcggggccgccgcaggggggaggcgcgtacttgcggcgcagggagcggctgacgttctgcgtcgggtaccccaggaggtgggtgacgcggctgccgcgcccgctggccttgcacccgggcgccacggcgtcctctctgtggaaaacaacaggcgggcgggtgagcgggctgctccgcagcggggcgtgggcacggcctgggcagagccgggggctcttggcaacctcttgtctcccgcgcctccctccacctgccctcgtctctctccctcggcctcgacctactgtcctttgtgacccttcctgggtcggcgaccctgcagcggtcccggagccagcatccccatcctccagacagggcttgtccacgcgtatctggagagccctgcaggcagccccctccaggcccctgcaatccctttctgatgtttcgcaggcccagaagaaggtgcttttcctcttcttctttccttagctaatcctgaccttgctcgagcaatctctctctttctcacctcctgcccctcagtcttctccatctttccctccatccccgaggcattgcaatcattagcactactagacttgttctatttttatttctagtttgcttctaatataagttattagcactattcttattattagctcttcttaaataataatgtcagagttcttaccggcgcagtacaggggaaacgtgaaaaaacataggccctgccctccaggagcttacagtctagacaagacagacaggtgcgtaggcaggagggaaatggaaggcagggagcagaggtgaagactggggtggcagggggaggggaaagccatgagttgggtggcaggtcgacatgccgcagtcccagcactccgtggcgatggcgggcagggttggggtggggggcccagccggccggtggcaggcaggagtgaggtgggcagggcgccggttccctgccgcacagcagcatgcagcatgcatcaggttttacctgatctcactagccaagtcgccgcaggcccctccgccgaccccgccgccgttgccgtagccgaaggcaccgcgggcgccgccagccccggagcccccgcagcagcagcagacgagcccccagatgcctacggccaggcagcccagcgcgagcagagagcccaggacgatgccgatgatcacgcctatacgccgggagtctgtggagagaagtggaggcaggtcaggctttctcacagcctggcaggtgcctgagggaacagcaccaggaggtgccaggtcaggggttaatgggaaagagggagagggacccagggggtctcttagccctggaacacccagtggggaagatatggggagatgcaagttaacccctcgtgtcagcatgcttctcccagggcttccagctgctctgggctctagagctcagagtggaagctgtgctgggcgagcttgacccagctcaatagggtcaagatcgtacccactgatcttggcccacttgtaggaaaggggctgggagcccccactggcaaatggatggcagtggaaaggcagaagcagctgaggctccaaaccagagcccagcctcctccagttcaaccctcccaaccacccagccctcaagactgctgcacctacctgagaccttcacctccaccacacaaacactgtagcccacgttgttggccactgtgcactgatacagcccatcatctgctctggagatatccttcaacaccaggtccccattgttcaggcctgaaagtgaagtggagagaggcctggtctctgagagctcccaccccaacctcagtccctgtggggtgggggatgggacacccactctagaagaagggaaggcttatgcatgtgtgtacacccacacccacacacacacacacacactccactctccaggtgagtcaccttccccctgctgtgaaagagatgcaagaaaggacctctctcccagcagcaagacagggacaccattaattcactctgaccttagggaaatatgtacgctctctgagccttggtctcctcctttgtacagtgaggacaggagaagccaggggaagaggaactctaaggtccctcctagctctattattctttgtttgactgaatattttcagcttctctatgtactaggagctttacacacctcccccatttaatccttgcatgcccatgaaaggtatatgttagtattccctttccatatatgaagaaattaaggcacagggagggtaagccacttgccttaaacttggagccagtcagtgtcccagccaggattcaagcccagctctgtctgagaccaggctccctccaaattcgccatagtacttttgactgactctccacatttgccttatcatctgctctcaatagcagctgctgggccaggcacggtggctcacgcctgtaatcctagcgctttgggaggccaaggcgggc

SEQ ID NO: 263 - DNA, 4001 bp, Homo sapiens
aaaataggtgatccaatccaaattaatttccatgtctgacaattacatttccaaacagccaacatggaacatgttctattgatcctacaatccagctctagacaatatgaaaaaggggggaaaactccaaattcagcatcttgaacttaaaagacccttcagaaacatcaccttctccccacaacagtgctgaagtagctcaggcccactccacctatgtttgtttctatcctggtacattccaattctatcaaatcaaaaggttattcctattaggcagaagctgaacccatccccttgaatagggaggtgttcattacatctgtctgtgtaatgaacttgtcatttccccaaacggtctggacagtctcctacaaaaaaaaaaaagaaaagaaagaaaaaaatactccatggaatctatggtgtgtcagtccccttcctaacatctgagtcagactacgtgtgtctttactgaggttctgggtgcccagggtgtatcactttcagaattgcttcagtaactgaactatggctgtcttccagccacggacaacacaagcactatctattttaaaacaattttcctaacccaccggcaatggaagagatcccataggtcaccgacttcctattgaaaacaaattatttctctctcaaactgcttgccgtctctcagaattaatgcgtgtttatgtgtgcatatttttatctttggccatgcaactcttggagcaaagaggaccaccccaaattttaccgacatgcctgagccattcagagctttagaagagaaatgaacgagtgctgagagcccttaagcccaggacttctctcacacaaacagtaagtggaaaggaaaaaacaaaaacaaaaacaaaaactaaccctccgtagagggagggagcagggtggatgatagggaaaggacattaaccagcagaccaaaggcagccgcggcggcggcacttcgcgaactgcctgcagaggagagtgaaatctgtttcgtgtacaataaccaagcaccctctggctgcctcgcatgggcacgaataataaatacaccgaggtgggcaaacagatgcaacgaaacgagccaccccaaaaaggtcaaaacttcagaaatcccgggggtcaaaccacccacacaaacacatcaatcagtcggagcgagagaagggacttggatacttagcaaaggatcctaaattgtgtttttcctttcaagctctggcttgcaaagtacggtggctacatgcaaagctagaggagagcaggaaggctgagggcggcagggtgcgggtgggaagggaggggtgtctaacaccagccacccaggcctcgatgtgacgaaagtcgtcagcagccccgaccacatcccagcccctccgcccaggccggcagacgcccctcgcggctcccccaccccagcttccgtccctggcagcaaccccgccagccccgcaccagcagcagccccggcccgggccccgcgcaggcagcgccacgaccgcggctcccatcccttccgtgcggcagacaccccgcaggcctccctccctgcccacccggggatgcccgggtagccgagccggggcgggctgcaccgccagctccccccgccccagagcaggcaatggctcacacttaccttgggcgttcgcgggggggctgaaggtggcaagcctcccgccccccgcccctgtcctcctcgtcttttttcttcctccctcctcctcttcttcctcctcctccccacagtgtgtccggggctccccctcctccccgccgcttggagtaagaacccaaaaccccgaagccgggcccgcgtgcaagcgtgcgggaggcggcggcgcgcggccagctctccagtaactgagcgcggcgcgcagctcccaactaaagtgtgaaagaagcagcggccgcggcggccgcggcacggaacgtccccccgggagtgggcagggagcgagcgggagcttgcgaggagcgagcgagggaggggagctcctcgctcagtcactcactcgaggggcgggggcagcagacactcccccaccgccggcccctccccgagcctagctcccgcgcgcgcctggctctcctccccggggcggggcctgcggaggccgccggggcgcagcgcgctggggagcgggttgggggctgctagggctgcggggcgggaaggaggcggcagtgtgtgtgtgtgtgtgtgtgtgtgtgtgtgggcaggtgtgtgtgtgtgtgtacgtgtgtgcgcgcgcgccctgcagcggccggccagccggagggaagaccccggcgggaagactgcgtcccgtccggccttcccgggcctgtcacttgggcggtggcgtgggagcggcgaggctgctcggggggcagccgggtgggcccagctctaggggagattcgggtcagcccctgagcccagcctcccggctgtgcctgctggaagcagacggagggaaggccgggcgtctttggcccaccgcgcggccgctcccctcccgggccaggctgaacgggcgggcgcagcccagaggcccgggctctgccaccgatccgcctccatactgacccgagctgcggcgcctgcaagattaatgaagcatccgcgattcggtagaggcggcacggggaggaaagacacaagatcgtgctgcccccctctccccacccttctcagcctcctaggacctaaaggcgtaggctgcgtctgctgggcgcgtccggagtggtccagagagatcgccatccaccactgcatccgtccagttctttgtggaccctcacagaagctcaatcaatttcccaccctctggaaaagggtatttttctcttccctggcatattgggtgtttcttgtgtgcacctaattgatctttttccattgatagcctttggatgtcttttgtgcggcttccccgcgcttcactgctccctcattgccttagacacgcgaggaatgtcaggcccccagagtgagaacacccaagaaaacaataggggcaaaagatcctccctgggcctcgcggattatgcacaaaccagatcatttcccacattcggccagggtgaagatggaaaatggaaaagaacgccatcagagtggtgacactgacgagaaaagccaattcataatttagtttaatgaaatgagttagtaatcaaccactaatgtctaggaaattggccttttttgaaaactggttttccctttctccacccctttttttttcaaattaaaagactagtatcccactgttgttgttttaatttttattgttttcagggatggggtctgctgccaaggctggattcgaactcctgaacccaagagatcctcctcaagggatcttccccatctcagcctcccaagtagctgggactacaggccaattccaccgcaccctgcctaacatcacattgttcaggaacctcaacttacattccatttttacaaaatatccatattctggttcatacttcttggagcccaaattttttgtagtctagcctcttggaaaggagcggttaagaagggagggtagataaattgagatttcaatcaggggcagccagccccatccctttcaccactggtgacttgtttcatttcttctttctttcctcatctgtaaaggcattgataatgatcgttcctacctcataagcttgtgaaagtaaaaagaaaataaaacgaggtggcaatgcatgtaaaacactttgcatagtgcctgacacatgggtgagaactcaataaatagaagctattgtttcagacttgattattttaaactcaaatttggtagaattttattctctttccattccttctgaaaagttagggaggagaatggacacagctgatggatttattcaaatgtagtccactcttcccttgggtttttacgccctgcctgaaacttttgcctgtggtaaaatgaaataaatacataactgaggggtgtgtgtgtgtgtgtgtgtgtgtgtgtgtg

SEQ ID NO: 264 - DNA, 4001 bp, Homo sapiens
aagcaccaggcatcatgctcacaaaacccagtaaggtaagtataaacattatccccactttatagatgagggctctgaggctgaaaaaggtgaactgactcaactaaagtcttcagattcgaacccagagcccagtctgttgcactgcttggtaagctgaggatgggagacaggggcagaggtgggtcctggctcccgaaggtcagaaaacagcaattgcttggagctacccagccaaagcggagaccacatatggggagggtgatgcaagttgctactgaggacaggggccctggacacagccagagcagccctggcccttctaagttgaaagccgctgctgcccacctctaccctcagcccttcaagcaaacccctgtcctttcacctctactcaaaggaggcccacactctgcccccacagggaggctcaagccagggagtatccaaatgaggatcacctgaatcaggaaattatcacccagggctggggacacctagaggaggaacacttcaattaggggagtagctggaggaagatcatccaggcatggaaacacctgtaggaggagcacctggatcaaaggagtgtctggaggaggcgcacctgaatctggggagtatctagaggaggagcatgaaagttagaagtacctggcagacgaacagctagggcaggagcatatctgccagtggagcacctgaaccaggggagtccttgggggcagagtagccgggctagggaagtacttaggagagaagttgaggggagtaccccagtatattctttgatacaagtgccttcaaaccccccccaacctcctcacatccaacctggtatcaatccccatcatgtcttccactaaacatctctggaatgacaataccctcttctccaccccactgccacagctgagtccaagccaccttcctcttgtactctagccataatctcctaactgggctccccacctctggtctcttccacagagtgatgggcctacaacccaaatctgaccccatcactagcctggttaaaatcccttcaaaagctccccatgccccacagtgccttgcaatccagcacacggccctcaagccaaactcttcttcctcttctccacagttccctccccagcacttcagacagacacacatgccctcctcccactcacccaccctcctgctccctggccacgccctcctcagtttttggggcgccagtctgtcaaggccaaatcagaccatacctgcctgtgaggttgtccctggacctaccctggatgacctgtcaccatcctgcccagtcaaccaccagtcagaaccagtcattgctaggcgggcagctccccgtgggcaacggctggctgaaggatctgtaccctggcgctgcagggagctgggcgttcagcccctcagtgtggtgcttgtgaaattaacgaggggagcgtgagagtgaatatacaggtgggagcgggagagacgtcctgggaaggagaggtcagctgctcattcattcctcagcctgctgtgggcctcatcctagtactaggtccgcaaaacatgagaatgtgttacactggaatgaactgaattcaatttgacgtttctaaggttgtattcctattcctttcctccctgccctgtgaattcttcccaagaagacacacacacactaaccttccaagggtgcatatacactccccaacaggcctctgaactcacagcccacactgatctgcccatcccccatacgcacagcccctccccccaggtcacactttcctccaccaacaaacacccctctgacatgcacagacacctaccccaactctgatgtgtagcttccttcctgctgccagaagccccttgggtactgtgcagagcctgggtaccccctccccggcccccccgggccttctcttctgttcccaccttcaagaactgtgcacaatccgcggagtaagcttccggctggggccggcagaacctggacaggtgggcgggtcaaggcagagcttgactcacctgcggaggcagtgggcggggctgaagctgcaggtctggcagagggcgggctgcggcagcgcctccagtggggagggataattctacctctcccccaagcttttgccaagaactttatgggtgtagacctcaccctcaccccccaatgcttgcggtttgtacagctgggatccagagaagcgtccagcgggccctagaggggcagacacctcagcaggcaggtgctcaggttgataaacaactgaacgtccggtgactggtacaaagtccagagttgaagagggagctttgcaggcctgtaagggtggtgggctggaaccagagcgggtggggagggcattctttccaggcaaagccaggaggaccaagaacactcccaaattgcctacaaatgtgtgtgtaactgtgtagggggtgaggggtggatctggatgggggctcagccttcatctggatctcaggatcccgtgaccccacaagccaggctctgaacctctcccgggtgctctctgattccctttagctttactcctcgtctctgggcctggtgccccctgttcttcaagctccagttcaggaatcaccttccctgagtcctccctctaccctgcaagtccccactcttccatgcccagagcacccactgtcgcagcattcctcattatcttgtgattattcgctctcctggggtggggccaggctttgacagcctgtggctcccagcacagtactgacccagggcaggctccccgtaactacctaagggaggaaggaccgcacgcgccaaggcctggaggccccgaattcgcaaggataggccgggcacagtgggagcaagggctgcagagaggccaagtatggtggctcacgcctgtaatcccagcactttgggaggccaaagcgggttgattgcttgagcccatgagcggagatcagcctgggcaacatagggagaccccatctctactagaaacacaaaaattagctgggcgtggtaatgctcacctgtagtcctagctactggggaagctgaggggggaggactgcctgagcccagaagttttaggctacagtgagccatgattgcgccatcacactccagcctgggcgacagagcaagaccctgtctcaaaaaaataaaaggggggtacagagaggggatgcaaacaaggcatggtagaactgtggctggaaggtgggggccagttcacacttggccctgaagatcttaggatgaaatctgaaccctcagggccatcccttcccacctttcctgcctcctctgctgcagctacaccaaactattttctattttctttcttttttttttttttttttttgagacagagtcactgtgtcacccaggctggagtacagtggtgcgatctcagctcactccaacctccagcccctgggttcaagcgattctcctccctcagcctcctgagtagctagattacaggcatgtgccaccacacccagctaatttttgtattcttagtagagacgggttttcgccatgttggccaggctggtctcgaactcctgacctcaagcaatctgcccgccttggcctcccaaagtgctgggattacaggcatgagccactgcgcccagccaccaaactcttttctattcccagaactcaccatgccctctcctctccctggctctgcaggctctgctcccttctcctgggactcctgccttccccactctccactgcacccctgcagatggtggcccttctcccctatatccctgaacatgtggggtgtgattttctctttagtttccctgccaacctgtaaactctgggaatggactctgcatctgtcttgtttccatcatatcccccatatctaaaatggcaaaagtatacccttctgaaacaaatttgaggaaagaaaggattatcctggatggggcaatgaggtgccaaggagggcttagggttttactttatttttgaa

SEQ ID NO: 265 - DNA, 4001 bp, Homo sapiens
aataaattgtagaacttactgagcattccttataattcaagcaccaggcatcatgctcacaaaacccagtaaggtaagtataaacattatccccactttatagatgagggctctgaggctgaaaaaggtgaactgactcaactaaagtcttcagattcgaacccagagcccagtctgttgcactgcttggtaagctgaggatgggagacaggggcagaggtgggtcctggctcccgaaggtcagaaaacagcaattgcttggagctacccagccaaagcggagaccacatatggggagggtgatgcaagttgctactgaggacaggggccctggacacagccagagcagccctggcccttctaagttgaaagccgctgctgcccacctctaccctcagcccttcaagcaaacccctgtcctttcacctctactcaaaggaggcccacactctgcccccacagggaggctcaagccagggagtatccaaatgaggatcacctgaatcaggaaattatcacccagggctggggacacctagaggaggaacacttcaattaggggagtagctggaggaagatcatccaggcatggaaacacctgtaggaggagcacctggatcaaaggagtgtctggaggaggcgcacctgaatctggggagtatctagaggaggagcatgaaagttagaagtacctggcagacgaacagctagggcaggagcatatctgccagtggagcacctgaaccaggggagtccttgggggcagagtagccgggctagggaagtacttaggagagaagttgaggggagtaccccagtatattctttgatacaagtgccttcaaaccccccccaacctcctcacatccaacctggtatcaatccccatcatgtcttccactaaacatctctggaatgacaataccctcttctccaccccactgccacagctgagtccaagccaccttcctcttgtactctagccataatctcctaactgggctccccacctctggtctcttccacagagtgatgggcctacaacccaaatctgaccccatcactagcctggttaaaatcccttcaaaagctccccatgccccacagtgccttgcaatccagcacacggccctcaagccaaactcttcttcctcttctccacagttccctccccagcacttcagacagacacacatgccctcctcccactcacccaccctcctgctccctggccacgccctcctcagtttttggggcgccagtctgtcaaggccaaatcagaccatacctgcctgtgaggttgtccctggacctaccctggatgacctgtcaccatcctgcccagtcaaccaccagtcagaaccagtcattgctaggcgggcagctccccgtgggcaacggctggctgaaggatctgtaccctggcgctgcagggagctgggcgttcagcccctcagtgtggtgcttgtgaaattaacgaggggagcgtgagagtgaatatacaggtgggagcgggagagacgtcctgggaaggagaggtcagctgctcattcattcctcagcctgctgtgggcctcatcctagtactaggtccgcaaaacatgagaatgtgttacactggaatgaactgaattcaatttgacgtttctaaggttgtattcctattcctttcctccctgccctgtgaattcttcccaagaagacacacacacactaaccttccaagggtgcatatacactccccaacaggcctctgaactcacagcccacactgatctgcccatcccccatacgcacagcccctccccccaggtcacactttcctccaccaacaaacacccctctgacatgcacagacacctaccccaactctgatgtgtagcttccttcctgctgccagaagccccttgggtactgtgcagagcctgggtaccccctccccggcccccccgggccttctcttctgttcccaccttcaagaactgtgcacaatccgcggagtaagcttccggctggggccggcagaacctggacaggtgggcgggtcaaggcagagcttgactcacctgcggaggcagtgggcggggctgaagctgcaggtctggcagagggcgggctgcggcagcgcctccagtggggagggataattctacctctcccccaagcttttgccaagaactttatgggtgtagacctcaccctcaccccccaatgcttgcggtttgtacagctgggatccagagaagcgtccagcgggccctagaggggcagacacctcagcaggcaggtgctcaggttgataaacaactgaacgtccggtgactggtacaaagtccagagttgaagagggagctttgcaggcctgtaagggtggtgggctggaaccagagcgggtggggagggcattctttccaggcaaagccaggaggaccaagaacactcccaaattgcctacaaatgtgtgtgtaactgtgtagggggtgaggggtggatctggatgggggctcagccttcatctggatctcaggatcccgtgaccccacaagccaggctctgaacctctcccgggtgctctctgattccctttagctttactcctcgtctctgggcctggtgccccctgttcttcaagctccagttcaggaatcaccttccctgagtcctccctctaccctgcaagtccccactcttccatgcccagagcacccactgtcgcagcattcctcattatcttgtgattattcgctctcctggggtggggccaggctttgacagcctgtggctcccagcacagtactgacccagggcaggctccccgtaactacctaagggaggaaggaccgcacgcgccaaggcctggaggccccgaattcgcaaggataggccgggcacagtgggagcaagggctgcagagaggccaagtatggtggctcacgcctgtaatcccagcactttgggaggccaaagcgggttgattgcttgagcccatgagcggagatcagcctgggcaacatagggagaccccatctctactagaaacacaaaaattagctgggcgtggtaatgctcacctgtagtcctagctactggggaagctgaggggggaggactgcctgagcccagaagttttaggctacagtgagccatgattgcgccatcacactccagcctgggcgacagagcaagaccctgtctcaaaaaaataaaaggggggtacagagaggggatgcaaacaaggcatggtagaactgtggctggaaggtgggggccagttcacacttggccctgaagatcttaggatgaaatctgaaccctcagggccatcccttcccacctttcctgcctcctctgctgcagctacaccaaactattttctattttctttcttttttttttttttttttttgagacagagtcactgtgtcacccaggctggagtacagtggtgcgatctcagctcactccaacctccagcccctgggttcaagcgattctcctccctcagcctcctgagtagctagattacaggcatgtgccaccacacccagctaatttttgtattcttagtagagacgggttttcgccatgttggccaggctggtctcgaactcctgacctcaagcaatctgcccgccttggcctcccaaagtgctgggattacaggcatgagccactgcgcccagccaccaaactcttttctattcccagaactcaccatgccctctcctctccctggctctgcaggctctgctcccttctcctgggactcctgccttccccactctccactgcacccctgcagatggtggcccttctcccctatatccctgaacatgtggggtgtgattttctctttagtttccctgccaacctgtaaactctgggaatggactctgcatctgtcttgtttccatcatatcccccatatctaaaatggcaaaagtatacccttctgaaacaaatttgaggaaagaaaggattatcctggatggggcaatgag

SEQ ID NO: 266 - DNA, 4001 bp, Homo sapiens
ttgcctcggccttttcactgatctctctgcctccagttaaaaatgtaaatttcacttgtcaccactcctaatgccctccctgaattcctgctaaacctctacctggcctacaacaccctgtttgatctggcccctgctcacccctccatacctgcctcttgccactctgcccctcccatcatagcaaactgcccagagatctcaaaacacaccattgtttttcttacagtattcctttggcctacaatatccttcctctcccctcccctcaaagctcctcccttctccacccagcaaattcctttttgtacttcaaaattagctgtaatatccccatgtttccatgtccccatgtctctgaagccgtcttgatactgccccaatcaatattacataaacaagcacggttagttatgccttcctctgggtccccactgcgctgggtatacactgtcttatccaactttgcatccgtccctggcatacatggtcgacgatcagtgaatgtctattcaactggcatttttggtttgtggtaatgatcttgtaatagcagtttgtaatctggcttggacctcctgtatatatcctccatcatattccccagagtcagccagcatagagccctgaaccaggctgtctgtgcatacaggtacttgctaagtgagtgaatgggagaagagactgcagtgaatttccatgctcaggaatccactcttgactccccagggctggaagagctgggttctggaagagctgggtttggttccctttcctaccccagccagggagccccgccttccccagtgacaagcttttcttctgagcctgcccccttccctcccaatgcctctggaacacagccactatcttgcggtccccgtccctagcttgctccattctgaggccctggagggagggcataccacaccactcttctctcctccataacctgcttctaaccaaaattaggatttgaactgacaaagggattctactgaccaaacagcactgggattagaacaattgaagagcatgaagaggaagggtattgtaagtggagccggcactggaaggcgctccataggtggcatggaccctccccacccccagcaatgggcagagaagtcctggggagaagggtgtaggaacagttcgtttctaatcgccctctaagcaaggcttgtgggaaggtgcctagagatctcccctcgccccaattttttatttttcctatacttggatggggccgtgaaggaagctgggatggggtgggggtggcgctagggatcacagggttctcagagatagtaaaatgagaaccccgacacgccaggactaggtctccgcccaaacaggaggcagcctccttttctggccttgcgggagtgggagaccaccccaggagacagagaccatccttccctagtctcctcgaaggaggccactgtgactccccgcttcccgcggctgagccccaagccccaccccgcctcgggccccagactcggactcacggcgtagaggcgcccgctccggcgcgtctggctctggctccgcccggccctggtggtgtctagtccctgggctgggggttcctcggcctgggcgtctccgcggtccaggcgtgggtgcggggctcccgggcagcgcgcccagccccagtcccggactgcggagtcaggcggcgtctgcgcagcagggcggagcgaccggtcccacgtgggccggttcggttttccgcggagccccgcgccaggcccctgcgccggaaccgcttcgcccccgcgcggggccgcgttgacccaggccttccaggtccggtgctctctcctattggcattcgctgggcccttcccatcagttagcctcgctgcagacaccgtgccattttcaagtgaaatctgattagtcaccaccttccggcgttaaactcctcaatggcttccccaccgccgggacaacccctaaggcggtagccgcggggctctgtgcgtcctgcccttcgtctgcctctccggcttcgtcctctaccctccctctccgcagttaccctcccacacgcccctttccgccacgcggctttggcacgcactgttccctcggtctagcattctcttccccctctcgacttactcctatttcagatctcttctcggagagatctctgactccctagatcacgttcgttcccccctttatgtcagagcacattccttttcttcatagcatttatcacaatttggaattatatattcctttttgtgcttacttgactaaagtcactgaggccgggtgcggtggctcacgcctgtaaccccagcactttgggaggccgaggcgggcagataacctgaggtcaggagtttgagaccagcctggccaacatggtgaaaccccatctctactaaaaatacaaaaattagccgggcttggtggcgggcgcctgtaatcccagctacttgggaggctgaggcaggagaatcgcttgaacctgggaggtggaggttgcagtgagccaagactgcaccactgcactccagtctgggcaacagagtgggactccgtctcaaaaaaaaaaaaaaaaaaaaaaaaaaaaagagagagagagaaagaagatccaagcctgggacagggctcagggctgatgtcctgtacccgggacgggggctctccgcaggacacagagcccacccatgatgcctgtgaagtgggtaccagtgcttttgcccaggtgaggaggaacagcgtgataaaaaagggtcttgggttccaaactccagtggattcttctcagagctccactctactgaagcttgacccccctcactcttttgcaccctggggaaatgtgaagttgggggccctgtttggaataaaagagaacagagttcagtaattgctgaccctaatatatgaggtgccctcttccagtttcaatttgattccaagtcaccattctgcaacctagagactaattggcaaattaaatcacaccaagaaatcctatatgcaaaaacagggaaaatggaaaagaaatttttatgattatgatgactattttaaaagggaaaaggaaataagaaggagaaggcagaagtaattcaaactttgcacactcctccagctaagaaaatacaggtggagacgtcagccccatttctacatcagatcctgtggcctaagtcttctcccttcccttatccacttcaggttcccctggccttcagcctggggtgacccaaatcctcactttttttttttttttttttttttttgagatggagtctcgctctgtcgcctaggctggagtgcagtggcgcaatctcggctcaccgcaacctccacctcccgggttcaagcgattctcctgcctcagcctcctgagtagctgggattacaggtgcatgcatcacgtcagctaatttttgtatttttagtagagatggggtttcaccatgttggtcaggttggtcttgatctcctgaccttgtgatccacccacctcggcctcccaaagtgctgggattacaggcgtgagccaccatgcctggcccaaatcctcactcctaaaggctctcagctttggtgatctagggttatgcagttctgcccagaccacagagccataaagtcatcaattgtttgttctgcccagaatagcccttctccgcctctctttggactctgtctctcccagcttaaccatgtgggtcaaatgaaagcctgaagaatccagggataggagctccactccaggtgagccagtcagagtccttctctgggatcttctgaaacgaaattaaaggaagacgaggcagggaagaaacagagatgagagatagttctgataatgttgcagaccctgtttcctgcatctaaacttatagttttgtatgccttattttgccaagcctaacttgagtggaatttctttcaccgacaattgaaagaatgctgattactacaatagcacaaggtggtgaccccagggtctctgg

SEQ ID NO: 267 - DNA, 4001 bp, Homo sapiens
agcagcaggaagacaagggcagagctcagcaggaaagagcagaggctctattcaaaggacagcaggtctgggtgagggccctcattgtcgaggctggaggtccgtgcctgaggaggggggctgccatcctcccaggactcagccaggctgatggggctcaagctgagtttgaagccattcctctcgataaggctgggggaggaggcccttctgcactcagtcatctttagcttggattcgtcctggctatccttgtggattaggtcaggtactgacagggaaacctctccattgggcagaactttgcctctctcttctctttccatggtggcctctggctgtgaagcgtctgctgggacgtcaggctgggcagtgggagcggagtcctgggcctgcccaggtgatggctctgtcccatactccagactgctgaggacaggctgtgatgaaatcagcatgtcctgggtggtcttcagggcccgaggggttcgctttctggttatgggaggtggaggatccagccgaggaaatgtttcttgcaggactgacctgtaaggttaatgacaataaacacacatgccttaaggacagcaagacaccaatccacctgccatcttgcttctccaactccaactgcactttcaacccaccccacccaataactgctctactccttgggctctggttcttggtttggcacataggccttagcaatttcagcataacagtagcttttggcctggtccatgcttactcagtgttcagagcagcacaaagtgctggcctctagaagacaggatagagaccgctggtgaagcttgtcaaatcagaacccaggcagtaagtcctgtgtttaaaacagggaatgtgagggcattcccacctcagatgcacaggtgtttaaaacaaggcctggaaagagcctgttggtaggagggggaagaacaggagggctgctacagggggcttctcccactgtgccctagtgggctgtgacaggtgcaggcttctccacaagcaacagtctacggcagcgcttctcagctatggccgggcatcagaatctacctggggaccttctgggcaatagctgggttcaaatccagctctgccaagtactatctttgtgacctcaagctatttactttgtctgtctgaacgtgagttatctgcaggatggaaatatcatctacctcccagggctgctgggagggttagacaaaatgatgcaactatagcctgcagcacagagctgaggacatggtgtgcactcagcaaccttcagcagcacagagccgaggacatggtgggcactcagcaaccttcagctgtggctgcagaaggtgaagccagctcccgagaacgtggcctgatcctgcagcttttcagtacaggacaatctcacacccctcccttggggctgttctcctgtgcagacactgcagtttgtccctgtaccttttcaagtgggtccacagaggggcatggatgttgggcgggtgaggggctcacctttcatcctctagccaagcctctggagccgcgtcagtcccactggccagctgtgctcctgcagtcttgttgatctctgtcacacccacactgcccaggctggagggctcctttctcctcaggaagtcattcactttggcccccatggctttgcccaggttcttgaggtgctggctgctgcccacccagagtcctggccccccaggctcaccagagcccagaggggcagagccgggggccacgggcttggacaagtgggggaaggagcggctggcctggagctttggagtgagggctgtgttcaaattctcaaacatgccgtggtcaactatgaacaaagaggcgacagagaggcatgatgaggaaaggggagcggtacctgtgctctatcattcagtttttccttatcccacacccaaaacctgtaacttccaaggctttggaaatattcaagaaagagccagcaaagacactcttgaactttccagtgtagttttcttgatgggacaggaactagaaattctagctctgccccacccaagttaatcagtgactaatgctagccataaaaaaataaagttgttcctgtaaacctgcctccttgactcatgggcttggcccctttaccttggagtcaccacgccctttggagtaaagaaaaaatgaggatgaagcaatgaaacatgacatttttacatcaccgtaagcacgtgctgagctctcagtgggttggaagctggtggagggatggcatggatgaggcttggtgttagaagctccccactgaaggccatgagtatagcacatattctccacaaaaaatggggcagcagctcctcaggtctacagaggtgggccttgagcgagtgggccagctcttgcagaggtgctaagtggtggttcagaatcagttcgtaccaaatggataggaactcggtgccagtgaagcacgaggatcccaatgaacatcagcttacttaatccttacaaccacctagggaggtggtacatggaaggatatctacctacagatgaagcctgcaggactccgcgtaatgcagtgccgtgcctgaggtcacacagctaaatactagcagggctggagctagaactcaggccttctaacccacagctcagggctctgtccacaactttgccctgctatagatcatggaacagctgcctatatatgcctggtacatggtccttcttgtagggatcctctttggcttgaaaaattaactcaaagagctgggtataaacccattaggttgtaaagatttgcaaggcagagagcatgcctcattcatctttgtattttcaacacctagcctgggtttggtacctagctgtgctcaatacagatcttgaatcgccaaaacccattttgtagatagaaaattgtggtggccaaggtggtagcttaaaggtttgttattgaaatgactggagctccaggctctaagccatgctgtccacacactcacacttggccatcctctccctatctggaaatccagctcagtcatcaggcagccagacccactctgaggccttggaatctgggtcaaggtttctgtctacaccaactaccccagatatgttgtcagtctgaggaaaggagatcgctcgatcatttgatgactaggctcctttccttgtgaacacctctgctaagtgtctattttcactgagcctcttctaagagtaactggggttagggtgtactttttcttctgctgaatttttgtgtaaagcagttctttctgccctgcactgctgtatcccgggccagtgaaaacctttcttgtggtttcagtggtgctatcctttctaggccaactacctaggtatgccatattctaagggcctttgggtggcagggaggaaaacctgtgggaagtgaagtggagactactctctgcggatgagccctgtggcctgcaccactgcagggtgaggacctgccagggaacagcatgacagcatccctgggacacagggcccaagctggctgggctccagatagacccaccacaccagcagaagcttccagcccgctccacagcaagcagggtcatcaactcctgatgattctcctaagtgtgtatcttgccacatcatccactttggcacaatttgcctgtcaggtcccacatccttcttattttctttaatcacgtcatccgcaaactagcaaagaagatttggaaaccaaaccatttaactatttccccccaaaccagaaagtacatagacaacaatgaaactgtacgaaatgcccggggaaggcaaattgccaccacttcccaaatcagacatttccctggtggtctccttattggtttaaagtgacttttcagagcagacatactcgtttttaaaaaggcaagcaccaaaaacacctgtcaaggtgattagtaaattataagctattattatttttaaaacactctttgtaataaacagaactctggattatgcaccat

SEQ ID NO: 268 - DNA, 4001 bp, Homo sapiens
ttgtattttcaacacctagcctgggtttggtacctagctgtgctcaatacagatcttgaatcgccaaaacccattttgtagatagaaaattgtggtggccaaggtggtagcttaaaggtttgttattgaaatgactggagctccaggctctaagccatgctgtccacacactcacacttggccatcctctccctatctggaaatccagctcagtcatcaggcagccagacccactctgaggccttggaatctgggtcaaggtttctgtctacaccaactaccccagatatgttgtcagtctgaggaaaggagatcgctcgatcatttgatgactaggctcctttccttgtgaacacctctgctaagtgtctattttcactgagcctcttctaagagtaactggggttagggtgtactttttcttctgctgaatttttgtgtaaagcagttctttctgccctgcactgctgtatcccgggccagtgaaaacctttcttgtggtttcagtggtgctatcctttctaggccaactacctaggtatgccatattctaagggcctttgggtggcagggaggaaaacctgtgggaagtgaagtggagactactctctgcggatgagccctgtggcctgcaccactgcagggtgaggacctgccagggaacagcatgacagcatccctgggacacagggcccaagctggctgggctccagatagacccaccacaccagcagaagcttccagcccgctccacagcaagcagggtcatcaactcctgatgattctcctaagtgtgtatcttgccacatcatccactttggcacaatttgcctgtcaggtcccacatccttcttattttctttaatcacgtcatccgcaaactagcaaagaagatttggaaaccaaaccatttaactatttccccccaaaccagaaagtacatagacaacaatgaaactgtacgaaatgcccggggaaggcaaattgccaccacttcccaaatcagacatttccctggtggtctccttattggtttaaagtgacttttcagagcagacatactcgtttttaaaaaggcaagcaccaaaaacacctgtcaaggtgattagtaaattataagctattattatttttaaaacactctttgtaataaacagaactctggattatgcaccattttggatttcctgtattttttgctctctacccttcataacatagtctataacgcactgaattcttaagtaatgtaaagatagcctaccatgcactccctttacccttgtctaagtctttccagtaaatacaccttgtcttaaaatggtaaggtccttgagggccatagctcctgaagtgtttctttatcttctacaatgcccagcttagggtcttgcacgatagtaggcatttaataagtttgtttaattgaatttgacttttatatgaattcttaaaaattgcatgatggactgacattgtagggaaactgctcacaagtctttttccatttataaaaaccactcaaaactccctctatgggagtggtcttcaggggctcttgaggtcagacccggataactgcccttctattcaaagtgaaagtggggctctggctggggggtccctttatccctatgtctgaggatgtgcaatgggtccctttcttgatgatgacgctaatgacccccacacattatctctcttgcttcaggactagaggcttgatggttcagaaaataatggcaatggaggacagagagatgactggaccccagccaggtggccctcccaacagtaccccccaacatgcacacacccaagcagaggagggcatctggggatgtaagtcatccacaaaaaaacaggatatcttacctgtccgagaaaggggctcggaaagcaggtgggaaacaaacaaaagaaagacacattttacgtagtgaccagtcactttgagagtgtcacctcctgcctgggccaccagcaccagcatacctcggggggacacagcacacaagacaggggacctgctacgaggagtggtgtgcaccctggaaccgccaggctcccacaaacttttcagtgactaaaccaaaaccgggtcgcattttaaaaactctacacaggcactgagagattctgcctcccatatttccccccagtattttaagctccctttactttaagtctgaggttgcagtgggagagtctgaagttggcagtcggagaaatgtgatgggtcaagacagaatgcaattccaagtcctcggggtcctgtgtgcatcactcacaagtatgctactgtccacatgtcagtcactgggttttagccaggaagatgttcatccattccagtttagagtctaaactaataacatgggtaaaccaagtagcagagagatttgcccaatatcacacaggtagctcatggcggagcagggttagaagtcacataagctgatgcccagactcatgagctttctctacaccataatggaccaaatgaaattgctgataccccccaaactgccaaagtatgtggcttcaacttactttccaatacatgctaatgttccaaaccaggctatctgggaggaacacgaggggaatcatgttctcccattgtccttcgaatgtttcagtaccgtgaataaatacacacaggaagacaactctgggctctcacgtgcagaagctaactcacacctcactcacacatgctcgacagcactgcaaaacaagcccatcactatttccagagcggccatagctccccatgcagcataaacatacctgccatctagatctgcagccctgctctgtatctagttgacatgttgtgataatctagaaaggggtgtcttcagcttatcttccaagtgtcacaatcatctttcaccttattccacacctcgttagtgcacaaggttgttataggacaagcgaaacgaagaggcaaccttgcctctctggagtcccagagtctccccatcaaactgacttaagcaatgagcaaaatagtattgagtaagccacccatttgtgctttagtcacttgctaaaaagagcaccaaccactgaaaacaatatttggcccctattcttaggaaatacacattgaagtacttaggtataaaaggacatagtgtttataacttaccttcaaatagttcacagaaaaaattaagtatatacacatacacatggggcagggggcaggaggaaggggacggatacagcaaatggggtaaaatgttaataggaaaatctggatacagggcataagggtgttctttgtattgattttattttttgcagcttttaagatggagtctcgctctgtcacccaggctgcagtgcagtggcgctatctcagctcactgcagcctctgtctcccaggttcaagcgactctcctgcttcagcctcccaagtagctgggattacaggcacccaccaccacgcatggctaaattttatattttgaatagagatggggtttcaccatgtttgtctagctggtcttgaactcctgacctcaaatgatccacccgccttggcctcccaaagtgctgggattataggcctgagccactgcacccagcctaatttctgcaacttttacaaatttgaatttccaaagaaaatgtgaaaaatatatacacctcaaaaaacaaactaaaacaaaacaataaaaatatttgctgacagagattaggctgataaaggagaagaaaaggaaggagattattcagacaggacagaggtttccagggctggagggctgggggtagacagtgtcaacacagaaaactgatgataacaaagataaaaggggacaaatagacagcatcactacagtatctctactacattcttctctctgggtattgtcaatcagggcctgccactgggcaatggcaagtcaaatacaatctttacacattttaatcttgctttcagtagactccattcatcttccaaagggtaacctagttggta

SEQ ID NO: 269 - DNA, 4001 bp, Homo sapiens
gtaatttgacctctgctcccatcactccactgaaactgcacttgtaaaggtcaccaacaacttccttgtttctaaatccagtggattctttcaggccttattttacttgattagtcataagccttcaacactttccttccttggcttctgaaacaccacatactactactgatcttcttaccattttggacacttcatcttgattacctttgcaggttcgtcctcctttgccagaccctcaaacttgggtgtttctcagggctctgtcctaggtctcttctgactctacacttactccctgggcaagctcaacaaatctattggtgtggctggcatctataaggccccatagactcccacactgcaacttccagttagacttatctggcgaactccagttaggcatatccaatggccttctggatacctccacttggatgttccattggcaccccaagctcaccgtgcccagaactgaccctctcctaaaaacccctgcttcctctccttcctgtttgcccaaaccaggaatctagaagtcatccttcatttcccttacttcccccacacccaattagtaaccaagtccatttttttctagctataagtgtctaaggaattcatcctgccctttccatttcagctgccactccatgctttgtgccaccataatccttccccactactgaaacaacctcctaactggtctccctccttctcccaatcctcaatccagttcctgcactaatgtttctttttttttgagacagagtcgcgctctgtcacccaggctggagtgcagtggagcaatctcggctcactgccacctctacctcccaggttcaagccattctcctgcctcagcctcccaagtagctgggattacaggtgtgcaccaccatgcccggctaatttttgtatttttagtagagatggggtttcgccatgttggccaggctggtctcgaactcctgacctgaagtgatacgcccgcctcagcctcccaaagtgctgggattacaggggtgagacaccacactgggctctttgttttgttttttgagacagggtctcactctgtcacccaggctggagtgcagtggcacaatcatggcttactgcagctttgacctcctgactcaagtgatcctcccacctcagctttccaagtagctgggacttcaggcatgcgctaccatgcctggctaatttttaaaattttaattttgtagagatgaaggtctcactatgttgcccaggctggtcttgaactccttcaagccattctcccgtcttggccttccaaagtgctgggattacgagtttgagccaccgcgcctggcatgcaaagagtctttccccctccctatctctaaaagtctttcaaggcccagctcaagagccaaccccactgccataaatgccccttctctgattctgagctcctcaaatccttactcttctgtagtatttatctcacacgcagaatcagagttgcttcatgcatggtttctctccctctcccgttaagacatgggagagggagggccaaaagcttgattctcactagggcctaaggaaccttatttagcccacccagtctctggcacatagtatgtaaatatgctggcacatagtatgtaaatatagataaatgcaagaaagttgcactcccagctcctcggtgggccctatcaacagggcattctctaaagtcatcaactgaagactgcttcccatccacccatccatccatccatccatccatccatccagaatatgcctcaaccccactgggtggaggttgggtcggcacgcgccccctaggccgttttgtacggttttatacctccagccctcgcagttgcggctggtagaggatggcagaggtaggtagacgatgcaagtcaaagggcacactcttccgccgcgtaggataggactctgttcggacgagtgaccctgcccattcccagaatacagcaactcttcagccgcctctcacctacatgagagggtggggactcttcctgaccggcgccccggctgaccaatacctgatccagatcaagcgaattagccaatggctgcgggtcagtaataggggcggggcatggttgctagggccgagctagtggggtgaggcgagaggctctggaagagactcggtggttgctaaggcgggaggtcacagagcgcggcgcagggattgggccgtgttgggggaggtgtgtggtgattgggcggcgcccaggaggcgcccgggtgaggcacgggtgcgcaagcgggagttccggctggagacccgtgctctgggccggcgccttcaccatggcctcggcagagctggactacaccatcgagatcccggatcagccctgctggagccagagtatggaatgagggttgggtccaggcgcggggaggtgacctcatgaacctgtgggttgcgagcgcagctgtagccccgcccctcatgcggccccgccctccctcgggccgccccctcatagggtctggcaggtcctagacttagagaggctcagagagccccgcccctcgtaagtcccgccccagagtgttcctccctggcgagccccgcctctgcccgagtcagctgctcgcttgggacctctttttctgtctttcctgtccggggtgctcaggtccatgccctttaatcacttctcatagctgaaggctgccgaaagctggatccctcctgattcctttgtttgggattgggcttcccacatctagcctatcacttattattttcccgaaggcgtggagggggaggctcgcggggtcaccgatcctcgcagaagcccgggactcagaacccttagccgtccctctccactcttctcggcagtggttaacagtgcagtctctgccgtcgggtagaactcgactgaaatcctgactccttcctttaggagctggattacctttggtaagctaccttctctgaacttcagtttcctcctctgcaaaaccgggataaggatagtaaccttcctcatagggctgttggggccatctggagattgtgtaaagggcctggcatggagtgagttcagtaattggcatttacgatcagcattgtttctctccttacattaaagaaagacatgtaggattctccacaaaattaggattgacagcaggcccgcatccatgacagtgtgagtagatcggggtccagagagtggaaagtttggtctctctgggaattctggcagaagggccttgaagtatgatcagcctgaggccagcgtgtccctcacttgcattagtccagcatcgccttcacgcctcctgtctcactgcctgcagcccagcctcttaaactgctaccacagtgatctttctaatgcaaaggtttgatcttatactctgctctccataaaacttacctccttaaggagagccttcccagatccctcccgtagcatctcatgttctttggttggagtctaggagagggcagcccttagactcccgcagaacagatggccccagaccagctgtttttccctagaactggatctgctggcttagcgcttttgggtttatagatgtaaaaatactttggacacgttttggcgtcagcaagccatgaagtcagttaatattatttcctttggagagtcttcggctgcaaagggttggagctgccttctgcacggccaggagggcagcctcgtggtcctggttcacatttcagctccatgtcttacaagttatatgtctttggcaagctattgaacctccctgagcctgagattcctccactgtgaaatgggaagagtactagtgcctacctcctcgtgggattgcgagggttacgaggtagcgtttggatgtgtgtccctggcacagtgcaggtgctgccattgcattgctcccctgtggttccccctcagcccccctttctttttttttttttaagagatggagtctcccctgtcgcccaggccggagtgcagtggcggatc

SEQ ID NO: 270 - DNA, 4001 bp, Homo sapiens
actaaaattacaaaaaattagccgggcgcggtggcgggtgcctgtagtcccagctactcgggaggctgaggcaggagaatggcgtgaacccgggaggcggagcttgcagtgagccgagatcgcgccaccgcactccagcctgggcgacagagcgagactccatctcaaaaaaaaaaaattaatagagacaaaaaaagggggacatatgtgggaaagagagtttctggaatgccagatgagttggtcccccctgcgtgagacatccatgggaagccatgggcggcctctgaggagaaaagtctcctttttgccttcatgtctttacgcatgccacaggtgctggcggagataacactcccttgaagcagtggagtacaatcaaacatcttggctgctcctgaaacccgctcccacgcatttcagtccggataaggtaaagatcttaaatagtttagacacacgcctttgctagaggaaattcacagaaaccgccacggctacacatcttattaaatgagtcacgagttctccttcattgattaatccttttcctcatcccttctcacccctcccatttgccctaagaacgaagagctggtaaaccaataaattgggtggaggccgagagctcggggccgcgagcaagcctccgacgccctggtcccctggacccgccggttaaactgtgattctctttctaaatcctttgtctgcgccggactcggggtacccgccgggtggtgtggggctggtttccccaccagctctcgaactcctgcactgaagcgctcctcccgcttcagtctccccagtggttgggattacaggcgtgagcccccgcgcccggccaaagggccccctaggaccggctgtctcccccgactacgcaccctcggcccccagcctcgcgccagacacggcgccgcagccccagcgcgcgggggtggagagagccgcggggcaggggcgccctgtgggtcccgcggtcacgccggatcgctcggccgcagtagtggggcccgggcgggcgcagggccgggctacggggaccggcaggcgcgcgaagggcccggggcgccgggaggactcgggttcacagtcgctcccgctccggaaagtttgcggcggctgccccgggagggacttcggcggggaggaggcggcggcgccaggtggccgaagtcggaggggtccgtccgctcccgcagcctaggagcgcgccctccccgccggtgccggggcccgtggtgggggtcgcacccaccgccgcttggccgggaccgtcttggctggcgccgccttggagctcgtaggcaccgcgcgcggtgcggggagcggccggggcggagggacccagcgagcccggggagggccggggtcctgcaggcggaggcgccggggagggtgtggggtcagggcccgcgcggcgctgcttctgctcccgaagactgcggtcggagctggcgcagcggagggtgcggctcccggagcgcgaggccgcagcggggagtgaccggaagtggcctctgcagccgcgtccctgggcccatgtcagggacggctctggctgaagcaggaggacggcgtttggagggtggggtgggcgcgtcctctcggcggcccgcgtggactgacagccaccactgcccccacgctgccctcgtgcccgcggttctaagaagtcgaatgccaggcggaggcgacggggcaaatggcccaggcttgggaggccgctggcggtccaggtcccgcaggatgtggaggattttcgaggagggcccaggggctggagggtgcacaggcccatcttgcacaggagccacggccccggccttagctgggcggagcaattccggtgccgccgccccttccccgcccggccatgctcgggctccaggcgggctgctgcagggggcctgatccggtggacgatcggctcctcaccccggcaagggcccccacctcggccgctgacagcctcgcagggaggccccagcgatgagcaagggggctggcgggaggacgggaggccccgccggcctgagtcctggacaggtgattggcaggtgaatgagctggagtgtgcagcgtgcctggctgggggccagggaagatctgccgggacctcaggggctgcaggctgccaactgcccgccccagctctggatgccctactcgaacctcagtttcctcacctgccaggaaggacccgtatgtcaggggtgttttgacgattaaactggacaatccaaataaactcgcattagccctccttggccgcacatctttctgactttgtacgaaactctggaatgcctgtaggtggggaggcaggcaggccagaccttggcccctggctgcattgtcccttctgggcgcccccactcctcctgggcccttttaaagcacatacctagcgaaacatctggacctcagagagcctcagagaactttgtgcatttccaaaaccaaaatgctttcttccctgaccccatgttctcatcttactccaaaacgcaaattccttgggcagccagcttcagaaaagggcctcaatttgatgtttgttctctgggacccaccccagggcccttttgatggagcatcattccacctccatccccaccccctccccccggggcttcccccagtacactgggggctcttaactgtaacaacctggatctggccactagactcccaaggcaggggacagggaacacagttcccccagcagactggcctagccatggcctgatgaacagtgatctctgggcaggagacccaggacaggaaatatctccgccctctactgtcagaccctcctgccttcggggtgagatcaccttttgccacagtgggaaaaacaggcacagggccagtgaccagcaaagtcagggagactgtgaccgggaaacatgcccaggcgctgaacagcacttccaggttgccacagcctttgggcggttcttggcatgtggcaccctggttgggtcagcaccttgtggggtgggggtgctggcaggagcaggtgctgtgggacccacagcaggaggggaacattttcaccctatcctggcacagcagttttgttctctgatgtgtgtgatgggaaaaaaaaaaatcaaaagaagaagaacactttatgacactttccaattagaagtttccatgtccatagtaaagttttctgggagtgtagccttgcctgttcattcacatgttgtctgtggaaggctgcggtcacgctgcaactgcagggccccgtccttgagacggatgcattgacaaagttgaaaatattgaccctcggctctttagggagtttccagcccatgcctggttttgagcactgtctgctgagaccccaggctctgggctggctccttcctcactcagggctccagtggcctctgctggtgtgcctgtaaagtgggggtgccatggggcctccctatgggggtgttgagtcctggagtgccaggttttggggtccctgcatcacagttgaccatctccctggcagagatcccagtgcctgattctggccagtaggaatatttactcttaaccaatggggacaccttggagctgagctgccacccacccagcagtggtcccatgacaccccctgtctgggtcaaggttggggcagggctggtgtcctgaactgcatcctgatgttcagcagcggtggctgctggtgctcaatgccttcgagagaacgctgaggccaatagctgctggcagcggctcacccaggttgtgtgtactgtgcccttctgtgtgcgagtgacaggtgagtgcctgcaggggtcataccaggctgtgtggagggggccagaggttaaagttccctgagcagctgtgtggtccaggagcagccaaggggtctctggaggtgtggctgccacaactctaccctgaaggtcttgcttgtcattggtggagaggagaggactcccaggaggtgctgcctgagggaccccatttccatctgt

SEQ ID NO: 271 - DNA, 4001 bp, Homo sapiens
cacaggtgggctacaggtgtcacacggcaccagccagggcccggggtggctggggtgaggatgggtgtttggccagtgaccaggagtcaggtcaagtccaggtggtcagtgccaggggctccaggaggggagggcagtgccataaccctcctggtgtccagcgtcaccaggcggtcgtcacagaaagcaacctcggcccggggcccgggtctgcagcaggtgggcagggtcagcttttcttccatggcgggtggcattgtctgggccggatactggctctcgacccctgggcatgcaaaggctaggggtggtgctgtcagtcacaccgttgccaccaaggtcccctgggtcggctgaggcttgggatccaggcagcggtggaaggtcgggctgctcaaggccggtatctaagcttctgccctgggacccagtggtgatggccgccatctgccccattcccacagggacctagtcagaggtcgcacacacaaaaggggtacctggccctggagaaccaccagctgcccggggtctgagaacactcaccctggccgctgggccaggcctgccaggctcccggctggtccaacaccctaaacggtacagagcgctgcaggccctcacctcatgcttctgcagcgcttgagggtgaaggtgtctccaaggggacgctggccagatgcatggagaggccggccaatcttagggccacagaccccccctggacagcagagggtgttggctcctgcagtgggcccgagatactaaggcacgaagctaacctaagcccagtggggtggggcggggcaggacaggcttggagagctgcgccccaggcctgcaaagcacagtgaccgagcaatggcgacggtctgtctgggacaattcggcacaggatggaggtgcggggtgagccggagtgcccatggctcttgctggaaggggctccatgccctggccgcctctataaaggcctgcggagagcggggagagccctggatgcggctggcacagcagcgcaagcccaggggccaatccggggccagagtctgggagtctgacgcccggctggaaagggcgtgtgatgatgccaaagtgccggagccgtcgccggcaggtcctcctccgcggggatcttaaggaggcagcaggaatgaggagaggagagcgggcggaggacctgggagctcaggcgccctcaggcaggtggcgcaaagatgggcgggcggcctcgcgcttcaggggtgtctgcgcaggccggggcgcgcgagggccgggcgcatgaggttctcggtgatgtaggccaccagcaggcagatgaccaccagcatgacgcagatggagccgcccaccgccgtcatggccaccacgatgtcctgcatgccggccggctcggcggtgaactccacgcactcggccggctcgggggtctctggcgcggcggcggcgggcccagcgcgcagcggcagcggctgcaggcacaggcggtagaggacgctgtcgtgcacgtcgggcagcaggtagtcgcggcaggaggccccgaggagcacgcgctcgcacgggaagcgcgtgtaggcgccgcgccacgagcagttgagcgcgaaggcgcgcacgcggcgcgcggcggccggggccaggcgccactgcaggaggacgctgcggttgcgcaggacgctggcgcgcagggagcggccggccggggcgtgcagcacgcagcccggagcctggcagcggaagccgcgcgcggggctgcggaagcacaggcgcccgccgcccgcctcggggccctcgggcagcaccttgtaggggcaccagggcgcgtcgggggtcggctcccagcccggcggcgtcggggcggccgcggcgcagggcggcggcgcgcaggcggccagcagcagcagcagcggcggggcgcgcatcctgcggcggggccacggggcgcggcgctgggtcacgcgggccgcgccgccgccgtccccgctgcccgctccccgcgatccccggcgcgccgcgccctccgccgccgcccgctccgacccgcccccgcgccccgtgcgcgctcggacccggcgcggcggcggaggcggggccgcccctcgccccgccccccttaaccctcgccgggccgcggcctacgggtgcgggggatcgggggtgggggggaggagggggacgcagcgaggcggccggagtgccggtggggctggggtgcgggcaggggcgcggggtgcgggcagggccgccgctctcccggcttcccgcctagtgagcgcaccttggacccctgcggcttttccgagccgaaactcacgggctgtggccggcttcgtttcgcgtcgtgcagctccgcgaccgcccgtggccacaccagtcggggacttcgtgctttacgatgggggcgcagcggtctggcacgcgcaggaccccgggccttgcaccccaacgctggccgccctggacccgcggcggggacccgcgcagtcagggtacctgcccataccgatggggtggggaccagcacggagactttccttcaccccgcggcttctgttcctttcaggacggacagcgcccacccggaggaaagcctgacagatgagacttcgcaaggtgagaactcccttcgctccacacgcagcggaggcagctgcagggcgccgaccttccctgcctcattgcgccccctcctcctccagatgcgctctggggggccctcccgatggctgtggggaggtcagggctggacaaagggaatccaaaaagcccacccggtgcactgagtaggtggcaccgacgggggaggggaaggcgggacacaccccaagacccctgcccctcattcccgtccctgcatagatcacccagcaaccaggacacccctccagggccaggactacagccagggactgtgtatgcagacgtggccgggcctggccggcctgccctaactggaaaggaggccaagcctcgcacctaaggctgggctggcacctccgctgagccagctctgggtctgcaggggttgtggggggctctctggcaactggaccatgagttcctgcaaccccttcctgtgctctccttgcctgggggcagagtgaggagagactggctattctgctcacggtgtccttggtccccgacctctggatggccatgtctccgcccccccacggagtcaccacccagcctcacgaattcctggtcatcttgaaaaacccagtgcagtggtcaggaccccacaggatctcaggggctctgccagagccccggcccagcggtcaggcccccaccaactgtggtcacggtgcacctccgtccccggcatggagggccctgaccccctacaccagcctgttgggcccctggcagggtctgctgaggcctctgcacctggcgcagagaggttgggggcagagaccttgggagaggcgctccctgccccctgcccccagctcccacctctgcttaggaagggcaaaccctgggctctgactcttgccccagcgttgtgaggcgactcaggggctgccccagggaagcagagagtgatggtgactcaggggacccccatgtccttgcccagaactccccaggggttcagccgacctactgccaccagttcccagtggaagcccctcagcccccaggtgtgagggcatgggcagtggggcagggcaggagcctggatgatggtatatggggtggggcggcccccaactatcttggcatgttggcctgaggacagctggggccttcaccctgtgccatgaccattccagcttcttgtagcagcacctgcatttccctctgggcagccccctttatccatcctcaggtcatggggagcttgggtggggctgacactcccctgcctaggagttggcagatgacctgggcgcggccagccagactggaccccttagcctcgaggcctttgctgaagctcatgtgagggggcgactgcccctgacaggtgttggattccagctgctgtggcc

SEQ ID NO: 272 - DNA, 4001 bp, Homo sapiens
tgagctgaagccaagccccatcttgtgctcacctgctggggctctgggagggtgagcttgtgttcatacttgaccaaccagttgctaagcaacagcagaaggaataggaacccaaacaaggctggcttatagctcatcagccaagctgccactgctcctatggtgcctgcggaggcaagtatcccatggagactcctaaagagaaatatcagttctgccagcattatggcgtggaggcacacaggccccaggaccctgcctcaggcccctccatgacaagagtcacggccacccactcctctgagtcatagccagctccctccccccacccagctgccgcataacaataataataactcctcctttgtctgaagcacccactatgtgccagactctttgacaggcagtttgaaagcattatctcatgatgtcctcacaatagccaggtgatgtaggcctcctcattcattcaccagtacttctgggcctcgctactagcaaaaaaaatggccaatacagagcccctaccatcataggggcaaagaaaagttatccaaacttagacataactgctttcacagttatactagcccatctattggtcacctgatactttaggggaaggtaactttgtttaatataatatgtaatattgattaggttttggactctgtatagttagacattaattttttatttattattattttattttatttttgagacaaggtctcactgtgttgcccaggttggagtgcagtggtgtgattgtggctcactgaagcctccaactcctgggctcaagtgatcctcctgcctcagcctcctgagtagctaagactacaggcatgtgccactatgcccagctaattaaaaaaaaaaattatttttttagagacaaggtcttgctatattgcccaggctggtctcaaactcctagcctcaagcaattctccctcctggagacattaacttttattattttattttatttatttattttcttttttgagacagactctcactctgctgcccaggctggagtgcactggtaccatcttggctccctgcaacctctgcctcccaggttcaagcgattttcctgccttagcctcccaagtagttgggattacaggcacgcaccaccacacccacctaatttttgtatttttagtggagacagggtttcaccatgttggtcaggctggtctcgaactcctgacctcaaatgatctgcccacctcggcctcccaaagtgctgggattacaggtgtgagtccccgtgcccagtgaagacatcagcttttaaaaaatgctagccaggcacggtggctcacgcctgtaatcccagcactttgggaggctgaggcgggtggaccaccccagaccagactggccaacatggtgaaaccccgtctctaccaaaaatacaaaaattagccaggcgtggttgcgggcgcctgtcatctcagctactcgggaggctgaggcaggagaattgctggaacccaggaggcagaggttgcagtgagccgagatcgcgccactgcactccagcctgggcgacaacagtaagactccttctcaaaaaaaaaaaaaaaaaaaaaaaaaaaaaaaagcatacattgctatagtaattccacttttgggtattcccaaagaattgaaagcagagtcttgaagagatatttgtagaccaatgttcacagcagcattattcacaatagccaaaatgtggaagtaacccaagtgtccatccacagatgaatggataataaaatgttatatacacgcaatattaccagccttaaaaaggaaggaaattctaacatgttacaacatagatgaaccttgaggacattaagctaagtgaaataagtcagtcacaaaaaaaaaacaaataccgtatgattccacttacatgagctatctacaatagtcaaattcatagaggcaaagagtagaatggtggctgccagggtctggaaggaggggcaaatgtagtcattgtttaatgtatacagaattttgcaagatgaaaataattctggagattgtttatgcaacaatgtgaatgcatctaacactactaaacagtatactcaaaatggttaggatcataaattttatgttatgtgtattttatcacaataaaaacatctgatatgaattagttatttctggggaaaaaacgggtaagtgccaccacatctggctaatttttgtatttttagtagagacggggtttcaccattgttggccaggctggtctcctattcctgaactcaggtgatccacccgcctcggccacccaaagtgctgggattacaggcatgagccaccacacccggccaggaattctttatgtaaaaatatcagttttagtggctgtgatattccaatatagaatcatgccttgctaggaccatgcctcactgaacgatgggatacattctgagaaaagcgccattaggcaatttcattgttgtgtgaacatcatagagcatacttaacacaaacctaaatggtatagcctactacacacctaggctatatggtatagtgtattgttaataggctacaaacctgtatggcatgttactgtactgaatactgtagcaattctgtctaaacatagaaaaggtagaaaaggtatggtaaaaatgtgttatataattttatgggaacactatctcatatgcagtctgttgttgatggaaacattgttatgcggtgtatgattgtatcaaattggttaccacttgttggggctttttaaaatttttattgttttagagacagggtcttgctctgttgcccaggctggagtgcagtggcgtgaccatagctcactgtagccttaaactcctgggctcaagcaatccttccacctcggcttcccaaaatgctggcattacagatgcaagtcactgtgcctggcctttgttgggtttttaggttagttctcctttatcgtcattacgtataacctgagatacacagtgttgaagttaaatctgtacacatactgaatctttccctagaatgctttcctgaaagtagaattacttggtcaaagggtatgtatgtttttaacatctaatttcaagttttatcaaactattaaatgtgcaaacaagtcagatagaactacaggatttaaaacaagctccaatccactgcctcacctctttccaccgtcaagttccaagccttagagacaaccaattccaacttttttagctgtttcttctgtatttaccttgatatttctaaatagtatgcttatattattttttgatttctcaattttgacattatgtattttatatatatatatatatatatatatatatatatatatatatatatatatatatatatatatactttttttgagacggagtctcgctctgtcgcccaggctggagtgcagcggcgcgatctcggctcactgctacctccgcctcctgggttcacgccattctcctgcctcggcctccgagtagctgggactacaggcgcccgccaccatgcccggccagtttttttgtatttttagtagagacggggtttcaccgtgttagccacgacggtcttgatctcctgacctcgtgatctgcccgcctcggcctcccaaagtgctgggattacaggcatgagccaccgcgcctggccaacattatgtattatatttttatggtgaaaaataatttagctcccaagcagcacctcccccaacaacctccctacttccctaaatccttaaaaccttctcatctttctccccacaaactttcttttttctccattctcttaatgtaattctatcactttggttaaaacaatattcactgctcggcggggcgcggtggctcacacctgtaatccctgcactttgggaggccgaggtgggaggatcacttgaggtcaggagttggagacaagcctagccaacatggcgaaaccctgtttctactaaaaatacaaaaattagccag

SEQ ID NO: 273 - DNA, 4001 bp, Homo sapiens
agctcttttttgacaacaatagacgtgaatcagatttgcatatcattttttagagactaagtctaggaatgcttgtctaaatatcactgttgcctctgtgaagttaagggcttttaccttttagtaatgccttaaggtatgcaattctatgtatctactttcctctatatcatattatactccttttccttctggtctaataattcttaattcttgcaacaaatacaagtaattctaaagttatatttaaccttttaaccttatttcttctagggtgtcacctagtagccatattaatgtgtaagaaactgaatgtaatagggagatgaaaatctattcaattatgaaatctgattgaatgtcagataaatttttctttagtgctctttcaaaatttttaaatgtagtcaaccatactttataaaaggcagtactaaaaatgtatatagtcagctttccacatctgtggtttccacttccatgtattcaaccaaccacagattgaaaaattatttttttaaagcatgattacatctgtatcattaaagatgttttttcttgtcactattccctaaacaatataatataacaactatagcatttacattgtattaggtattataagtaacttagagatgatttaagatatgcaaatgctacaccatttaatataaggaactggagcatccatggatttcatatccatggggtgggcaggtgagagggtcctggaaccaatgccccacggataccaagggacaactgtattttgccttatagggtcataattttccagaaatgttgtatatcagccaaagcctttgtggtccaagcactgtgactgacacaactcaacctttctgggctctggtttcctaatctataaaataaagcatttgaatcctagcagatctgaaaacctatctaattttaggattctgtgaatctaagtacagaaaaatctacatttcccaaatgacagatcaacagtatgataatactgtgggcttaggacatagcataatacttcatataccagcaactttaattacaatgcttatctaaaaaatatttttggggaaaaatcaaccttaagctccgctgttgatttatttttccttagttattacaaaatatcataaaatgcttccatttatatttcttagacggcttcacaacatgattcaaaagtaagaactagagaaaaagaataaatttcatataagaactaaatcaccaattcacagaaggcccacgactgtgggaactgcagagagacgacactgggaatgcattatttacaatgaataatttaacaaattctttcataagagtaaacacgaaacaatctacggattgagctttaaaactacagaattatgatctggaaccatacaagttctgttactgtagaaattaacaatgtgtttaaaaacttcagttacaacagttttcaattttaaaaacaatataatgttaggtaaccgtttctgcaacgaaaaatttaaaacataggctacactcaaagtgctaccggtttcttttaattctcctcctgaagaattaacccgggtccttaaattcccgggtactgaatcactcagtgccacctccccaccaccaaaaaccatttaggtacgccgtttcacacaaggtaagttcgtcagaagtgtgtgccggagtgactgtccatatggttccaacactgtcccttcctttttctcttgaaaagagagcacacacacacacacacacacacacacactacacttaggctgacttacctgttttcagaatgtgcactcgtggcagacaattacctcggacggtctctccgccggagatgggggtttcgggcccaagtaccagcctctaggggccagattccctccggtctcaattcactgccactgaattcatcagaaagcgacctacttcccacacctcacttcccactccaaagccagggacttgggagtcaggtggcgcagattgatgacgtaaaagccccccctcccttccccgcagagcctcagccaaagcgactgcggtcgccaccccgcccccttctgggcgccatagagagcgtggcggtatcccggagcctgccgtccggccctaccgggaccgatgccctctagtggctcagtgtccagaagccgccaacgaggacgatccatggcatcccggggctttgacggtaaggtcaccagctcttcagggagggccaaggggtgacgagtacgtatgtggcgccaccgtgcggacagcggttacggggccgagataggagagccaggggagcggggagaaaaacggaagctgagagggcggtgcagcattgggctcccggaaaagaatgagaaaaacactacatttcccagagccctacaaggcctgaagtgggtggagctggaagccggaaaattgggtgcgcaagaggatcagggatagcctctgagctcgggttcccagggttcgtagcttccaacggctgcgcgcgcacttcggtcgcgggcggtgaggtgctgttgctgaaacgctgccgctgagggtggactcgatttcccagggtcccgccgcgggagtctccggcgggcgggcgcgcgcgagccaccgagcgaggtgatagaggcggcggcccaggcgtctgggtcctgctggtcttcgcctttcttctccgcttctaccccgtcggccgctgccactggggtccctggccccaccgacatggcggcggtgttgcagcaagtcctggagcgcacggagctgaacaagctgcccaagtctgtccagaacaaacttgaaaagttccttgctgatcagcaatccgagatcgatggcctgaaggggcggcatgagaaatttaaggtggagagcggtaagtgagatgctctttccgtccttggttttgggctcgactcccgccctttgggtctggtcttcccccatcaagttggcactgggtaccgctctgttaacctcacttcctgggctctgtggatatcctgagccttcgctttcctgctccttacagtttgataagaagcctttgaaaaaaaaatctgaatctaagttcagtagcattttctttgtagttagggtaggctcatacagggacgcttattttccttcgtccggcagacgggaaacagacttgatagagtctgcgaacccatctctctaagcctagagtaccttatatgttttgttgcacttcaactgatagtggctccgccctattttctaggcacctgcattctaggcctttgccaaattgaccactctgtgcacttgttcttagtgtgtgcgtcgtcccgtggctccagaacgaatcagatgtttacaaaaatgaatattaggtgcataagagcgctggaaacacagtgaatgtgcagtacataaatttaatatatcttgatttctcttaaaaagttggagtttgatagaaaacattaaaattttcttgtaattacctaaagtaggcctttaagtaagaaagttactgacaataatggcttgaacatccttgaaaaaaatatgaagaatatagtcattaccattagtaaaatacaaacttcccgttaatgtgttttggtttaccatttgtttggggaggttcatactgttcttgctaagttgactggaaattctgaacaagtttttacttcaaaaaaagtgtaactgtcaagcagaattgaccttgaaaattagttctctgatcccagagctgagtatagtacattgcattctatttattaatttgcaccataaatattgaatgtcttacatgttcctgatactatgctgaacatgatattcaatcccttcccttggaaagtttacacatttacttttacatatatttagtagttttatgctttcaggtaatatcttgactactataaaagaagtcttttaaaacaaaggagtttttttttgtctaaacaattttttctcgtgtaataaatactttatttattaagcagtttactgatgtc

SEQ ID NO: 274 - DNA, 4001 bp, Homo sapiens
tatggaccagggcatacctctcaggagatgtgggagaggaggtggcctcagctggccgcctgtgctctttgtctttcttcttcttctctttcttgtgtttcctctttttctttttcttcttctccttcttgcttttcctgtggctctcacaactacaaggaggatacaaggtgtgcctcagaccctagtcttgcaagccaagagagtgaacacaagcaggccccatccagatgaagccaccacccacaagtgcgtctttaaatcagttaaatcaaactacaaattccactcctcagttacgtagtcacgtggccagtggctacgtgggttagaaacagatgcaatatccccatctccacagcacgcccctgccccaccccagccgtgcccttggcaggttgacaccttcctacctgcacccaccaggccactcttagggtcaggcccaggctcaccatccaggagaagccctggaggtgccacccacggcaggaaaaggccccgccccaggtcctgagtgccctcccacggcacagcgcccgaccactgccagtacttaggacctctcttcaagggtgacccgagaaactcccctagagaaaaacctaggagtaactgggacaggaagtaaagtagggcaggccacccgccgggccggtgcgccaagagaagctgccacctgcccgagtgggagccgctccggtcctcccgagaccccccaccccggggcacagctagcccaggtggcacagcctcacctgctttccgtctgatcctccgcccgcggcttcctcctggccgaggctgccgaggtcccgggcccgccgctctctacgcggtgatgctgcgggagaagcgagctctgcggaggagtctgcgggccggccccacaccacgccccgcagcgccccggggagctccgttcagtgcccccgccccgccccacccctgttagcccctgctgcggtcaggcggggcgggggattaccgtgaacacagacagccccagtttggcggcctccttgtcctctcgggacatcgccacgcggcccacggagccactgcagggacatggcgatgaagacagtacggcaggggtccgcctcacccgagcaatcgagcccagtgctgccctcccctggaaacccgcccgcaccttgcgctccccagccccagcagccggtccacgcccttctcctcggggtcgcctccttcccgcttgcagacctccgcgaagtcctgcaggtgcgagagcacagggagcgctcgagtcggccccacacccacggccctccacgcgccccccaccccggggagttacctccttgctcaggcccgtgggctgcttcttcacgttcttgtagccactgcgagagggccggggcaggcgtcaggacggacggacctcctcccaccacaggtcctcaccactccagccttcgtcctcagggtcccgcccgcgcgagtccccgcagccccgctcccgcccagcccgacccccagtccccggccccggccccaccctgccccggcagcgccgtcccaggcaccgaccgctgccgtccgcggacactcacagggcggccagcagcgcctcgcgctccgcctcccgcacggctgccagttcctcctcgcggctcgggcccgcgcatggcgcccggcccttggcgtaccaggtgaggtcgcggcccttctgccagcggcctaccggcgccatcagcgagttgcctgcggacgtagacgctgtgagtccagcgcccgcccgggatcccggagcccggagcccggagcccgcccaccgcgcgcacccacccaggtagttctcccgctgcttgtcagtcttcacgtcctcccagttgaactggtcctgcccgccgcgcacgcctccacgactggagccgaacatggcgccgggaaggcagttgcctggggcctgcggcttgcaacctgcaacccgcaacccgagacccgctacccactaccgtcggacccaggcccgaccccgcctccgcgtcgcgcgccgtgacgtcactcccgcgcccactcggcttcgccgcgcgcctctgcgcagcgcactgccccggatctgtgctcccgcgcatcacctccacgtcggctttgggcgcctgcgcactgcgcctaccctgccgggcgcgggaacgcctctgaactggaagtttaaaaatggttaaaacggggccgggcggagtggctctcgcctgtaatcccagcaagttgggaggccgaggcgggcggatcgcttgaggtcgggagttcgagactagcctgtccaacatggtgaaacccggtctctactcaaatacaaaaattagccgggtgtggtggtgcacacctgtaattccagctactcaggaggctgaagcaggagaatcacttgagccgggaggcagaggttgcagtgagccgagatcgcgccactgcactcccgcctgggcgacagagcgagactgtctcaaaaataagaagttaaaatgggccaggcgcgcgcgcgcccctgtagccccaacgctttgaggctgaggcgggaggatctcgaacccaggacttcgcgccactgcactccaacctgaacgagtgagcggaccctgtctcataaaaaaagaaaaaagaaaacacacaagatgcgcctagttaacaccgccaattggtcactgctagtcgcgattccatatcgggagcttaacaaggtaatgaccttaatgatttgtggaatttctgagtattacccagtaaacttctggatgaaccagcagctacccagacaccctcagagcactggtcctatccctgccgtgttaaactgaatgtgcaccctaactcccatgtgaaatcctcaccccaaggcgttggtgcttcggaggtgactaggtcatgaggacagagccttcataaaagggaccccaagagctttgtgcagctttctactgtgtgaaggcagcgggaaggaagtctgcagtctggaagaaaccccttaccagaacctcagcgtgctgggcaccctgattttggaggttgtgacgtacccctgcttcccctttccactttcattcccagtgctgactgagaaacagagtcccttggccactctgtgacttcgccaactgtataatttcctctgcagacttgaacccgagccatagccatgaacgttcccaggcacagatgacagtaactaggttgttgctcaaaacacagaaagaaactggactcagcctgagccagattcctcaaaccctcatataaattccattcaccaaccccctcccccacggacatacctagagagaacttcatttctctcactgcctattgcaagaactgctgcagcccactctgtacaaaagccccacgaataaatgctctgggcgaatcaccctggcatgctcaatctgtagaatcctaaccagccccatctcaggatggtgtggggcactcccttgtgggaactctactgccaccacttttggggcaattccagccacaggttgaactggatgaaatacaggtctactgtcctgtgggaaatttctgtttcttagtgacccagtccatgggtcaggctgttagagcaggctggcagacagccacacgtctggctcatctatctacttagcaagtactggctgccatctccctcatgaggcactgcatgagctttcatcatggagcaggtgcatggcgagggcagagcagcaggccacagccaggcacacagaaggtgactggccgactcccaggaaggctccctggggtgtagggcatcatctcctgggtgccattgcagcttgccaggccagggtggacttgggccatgtgggcagggcccagctgtggagtctgaccactgactggatgtcaggtgtggtggagaggggatagcagggccaggtggacattgggcaggagtccaggacggctctgaggctctggtctgggcaactgtgaggatgaagcagccacctgtcaacatgaggaccagg

SEQ ID NO: 275 - DNA, 4001 bp, Homo sapiens
agaggcatgttttaaacaaatggacaaacataaaaattatggtaaatgctatgaaggaaaaatcagggtaccatgtgaaaataaagagagggggaacctactttaaaataggtaataagcattccttttttggaagtaacatttaagctaagatcaaaagaatgaatgagctagccaattgaagaccattccagatcacaggagcaaaaagggtggaaaattcagccagtggagctgggtcccagtgatctggggagagccacacaaaagggggttggtaagggaagcaggtgtcttttacttagaagcgaaagactaaagaagcagaatgagagtggcagtgggatagcaataattctgattcacaaatgttgggtttgagatgtctactacaaatctaagtggaaatgtcaggtaatcagttggcaatatatgtaaggaactcaggaaagagttctaggatagagataaaatttcatctgtagctaaagccaaggaaaggaagacagtcacctaaggagaaagtacagacaaagataaaagaccactgggttattcacttcctatacgtcttctggtaaactgcctccttttcttgggcttcttggtaacatgaatggtggaattagatgatttatggagctcctcttaagtctaaaattatgtaaaggtaacccttctcattgctcttgggttaaccttaatgatctcaaccccatcctaatcaaacaaaaaacactgggtagtttaagatgagctgggaaatattttactacaaacagttgggaacttcgacccaagcccttcattctgcagatacaaaaacagaagttccaggatgagccacatgcttgccacagcactgagcaggtaagccaagttccaaagcgcacagtgcctgctcaacttagtaagtacaaggacaagtgcacgcaaagaaacatgagaattaaagtcatcactaaaggcagaggaaatctcattcttgaccctaaaagatctggagaagtatgtttaacttgtgccctaaggacctaccttgggggcattgtgtcccacagggacatgaggtccccttcgagatttcattgcaaagcgcatgatttgcctcttcacaaaaataaatagcagtacaaacacctgtccaaaaagatgtaaaaatcctttaataaaaagtcagttttgttttgttttttttttaaaaaagcatgccttcattccaaatccccagattccggctctcaggaatgtttcagggtaaaacttggggcaaagcaaggccgttatgatgggggtggatctaagaagccagcagcagggaggcgtggggtctgtgctctagcgttaaagggagggttctagactaacgagggcgggtcggcccgactaagtgacttaaactcccacctactcctggaataaggagtcaaagcccggataggcgcaggtgagtgggtggagaatgcagacggggtacagctcaaaaggagggtctctactgggtaagatgcgacagcaggaatggggtggggtaatctcctcaccaggctcccgtaggccatcaccagcacgacattcaccccggagagccagttactgccggacgccatggcctccctacctcgcgcagaattgttcgggtttaccccgctgtcctggctggtcagcccaggctccgccgaagcgacggcgcctgggtcccctggagctccccggccatttccttacgggggaagaccaagccagacccggcctgaaaacatggcggacaggcaggagagctgggaaaggagaacgacgccttccagcttccccctgacacgtgactcaggcaggcaatggcacccaggagcgtcgagcgctcagacgcggaactacgacagtaagaggaagcggcggccatccgtgcgtcacgtggtggaggcagggccgccgtgaaggaggcggggtggactcgcggagccggaaagaggtgtctcgtggcgaggcggcacgcgcacgcttgcgtgcgcgccccttttagcgtcacgcgctgagggacgcaggaaggcaagtgggcgggggaaggcgcgagagcgagcgcgagagggaaaaggagggagggggtggggaagagggaatcttatatcacgtgacaggggcggcgcggcccggggtgtcagtgtggaggagactgaggtaaagttgggagcgcagcggcgttggcggcggcggcggcggcagcggcagcgcggcggggccgggtattgtccgcggcccctttaaatccgcgatcccccttttaccctccctcttttctcccctgcccccgccgtatcccctccctcggtaggcccccccacaccgtgtgttcccccactgtacacccccccccgagtcatgcgagccctggcgccccccacctcgagtcggcccccggaggttttgtttatggttgggttcgcggcctagtgggccgcgccagagccggggcctcgatttgggagcgtggccggggcggggcttggagcagccgtaggaagggggggccatgcggctagagcctgagaggggagagcgagaaagagcgcgagcgagcgaggcctgggccttgcctgaggtagggctctctcttcaccccggccggtgcctgcggaggagagggcctcctccctttccacccactgcgggcctcctctgatccggatccggcctggtttgggggtggcgtgggggagggagggcgatggggtggagctcccccaaactcccccatgtggccctcagtttggtgtgcgaaggattaatttgttccggctgggaggtagggaggagattggccccgtgggctctcgatgtggcgctgaggggggtgagcctcccatcctccacccgtgggcttgcgtcccctctccgtttccaggctctttgtcagctcctcttattaccctcccttctttctcaccaacccagttcttggaatatgtttttgctgctgtctttagcttcctgtttatactgtagtttgggtaccccaaacaattgtgttatttgggaagctggacatggaggcccccatagggtgtatttacgcttaagggacgtcactagagcactggggtatttgttcactcttctcataatggtacaggaatgcccagtttcttcaaacccttaaccttgtggacagcccttaaattgctttgcaaactgatgtcacaaactggagactgctccttttccaccattcttgaaatgtagccacctctggtgtaggatgttgtggaaagaaaaacaccacagtaacaggcgtttttgttattattgttaacgtttttgcctttgactctccctgattattaaatggagaaatcctttttttttgtcttctctcccatcctaccttcctccgccgcatatcctgttttggggatacctgatgtgacttgctgggaggtgatggacattactagtaaccagcgtttctagagaattaaaacattttggctgtgtatcagttgataaaactgctttgagatctgtctccattgtacttaaagattagactatcccaatgattacagagaattaaaacattttggctgtgtatcagttgataaaactgctttgagatctgacaccattgtccttaaagattagactatctcaatgattgtttcctttgtgaatgggaaatattgctggcacataaactagtgatgaaaggcctaaaaatgtcctgttttgtttttcatctttaaagctcctccttgctatgtcctaactgggaagtactcttactaactagatatcaaggtggtggggaaggggatgcaggggccatttcaacaaagcatctacagaaattagttgttctgttagaggtagcaaattttacccaactcagtctagcttcagtttctgaattgtttcttaaattagattgtaagctccctgagggcagctactaagtcatactgcttttgtattttcctgaagtattggacacatagtagattctc

SEQ ID NO: 276 - DNA, 4001 bp, Homo sapiens
ttaagagtctcactctgtcaccaattctggagtacagtggtgcgatctcggctcactgcaacctctgtctcctgggctcaagcgattctcatgcctcagcctcccgagtagctgagactacaggcatgagtcaccacaccttttagtagagacggggtttcaccatgttggccagactggtctcgaactcctgacttcaaatgatccacccaccttggcctcccaaagtgctgggattacaagtgtgagccacggcacctggccaaaaagtacattttagatagttaatatgtttgattcaatttgtttgtctctaaagttttttttttcttcagcttctcaaatacagattgtattggggaaacagaggcagcataataatgcatcctctgtatttcataagattataggatgaaagacaaaaactgtgttctttcttccatctgttcaggccatcgtaataaacacgatagtcattcaatagcacatgaatacgttgtgtgcacaagattctgtccctgccaacctccctcccaataagagtaatctgattaactagatgcatattctcttaataaataaaagttgcactttgctccccagctcttcaaaaagaagaaagccaagttttgaattaaaggagctttctgcgtatctgaatttttcttaattttaaaaaaaaaaggattcgaaggatttctaggatcattgaaaaaaaaagagatgtgagggaatttgagcacattaaataattttgggcaaagcaaagaccctggaacataatcaaggccaaatctgatagtgtatacagggataaggggccatgataatctttaaaacagcaggaccctccatctgtggacactgaagagggtgtacaactggaagtcttgataagagataagaaggaatctggtttttcattgaataatgacaaaactttagatcttggagctctactacttcaaacctttcacttcacagataaaatagttgaggtccagagagaagtaatctgccttaagtcgcactgcaagttagtatcaaaagtgggattaatactcatgtgtccaaacttccagtgttttttccattatttcacatttcctccttatttgacttattttggccatccatatataaacactgggcttgggaatactgtgtttaatgaggactaaacttggagtccttgccctgctagaagatgtttaaactctcaggtaacaaagatcttatgggaagcagcttaaaataagcggaccttgaaacttcccgaagaacttttctttgtgtcaaatgggaagaataactctgtactgcctacctcacaaggctgtcctaaggtgcaaatgaaataatgaacactaaagtgttgtgtaaaccttcccacgaaggaagattatgggcactcaagttgcagttagaggaacctttggtcccagaaggtcattcgaatcaggccaccgactcacaatgacagtcggctttactcgtctgtaaaatggagacaagagcaaatgccacccccaccataggtggtagtgaggtctgagccgaaagacgcagagtacaacgtgaacgaagatggttattcgctgccccggccgcgcctcctcaccttctgcacctgctctgcgagcgccacgaggtctaaggggtccccggcccggtgggtgtggtaggggctcaccagggccaggccgccgggggtcggggtgagctccaccagggctcctgcgacacacacccaggaacacaagccgtgagctcccgccgtcggcctcccgcggagccccgagaccggctgcctcgcgggagctgacttccccctgctgactcccgccccgcatacctccctggcctgcagctggcggcgctccttgcctttcaaggaccccctcggtccgccccggcgcggcggcgtcctccatgacagcgccttatcctccccactccctgggctgtgcgagtaggaagagcctgcgcataaaggcgcgtgggcggagcttccgtctttcttgtctactgggcgtcagttcgactgagcaaggcctgagctcggaggcggggctccggctgacgcgccgggattcgctgagggccggtggggggatccgggctgactgaaaggaaaagaggcggtgcaagcctcgtgggcatgcgccgcccggcttggaaggtggggcttcgcccgggggcgggccttcgccgggggtaggactccggccttggtggcgggtggctggcggttccgttaggtctgagggagcgatggcggtacgcgcgttgaagctgctgaccacactgctggctgtcgtggccgctgcctcccaagccgaggtcgagtccgaggcaggatggggcatggtgacgcctgatctgctcttcgccgaggggaccgcagcctacgcgcgcggggactggcccggggtggtcctgagcatggaacgggcgctgcgctcccgggcagccctccgcgcccttcgcctgcgctgccgcacccagtgtgccgccgacttcccgtgggagctggaccccgactggtcccccagcccggcccaggcctcgggcgccgccgccctgcgcgacctgagcttcttcgggggccttctgcgtcgcgctgcctgcctgcgccgctgcctcgggccgccggccgcccactcgctcagcgaagagatggagctggagttccgcaagcggagcccctacaactacctgcaggtcgcctacttcaaggtgcagacctgcctggaaccaggcggccggggtccttctggggagaggagtgttgcaggggacctgaggagcttgggggatcggggaagtgtccgcagggaggggaaagtggcctcctggctggggagctctcctcggagccggggagagctgctccctggcaggagaccttcctcgcccagttcgcatgggcagatgctaaccccaaaggtccagcctggggttagggcacaggccaagcaaaactcatggccattttgttccctgggaaatctcctggaaggaattaaagcggcagtttgggtctcccattctgatgtcattgtaagtgtccgagtgagaagctagtagcggtctacaatatctcccttccggttggttttccagtggtgcttttcctgctgtttgattcagcagctctctttcaggatgtgaggttgccacgtcgccagcaggggctgcctggccctttctgtgtgtgtgtgggggcgggggggggaccctctggctagtctgccaggtttacaaagaaaatgagtatttttcggaatgccagagtgccatgtgtccaagtgtacacttgggcttggagcgttccaggcttgtttggtggtggtgatggtgacgatgatgatgatgatgatagccagcacatacttccaggcactattttaagcagtttgcatttattaacgcatttgccctaatcttcataatatcttgtcaggtagatgctgttattagtcccactgtattgggggtggggggagaaagagttgtgcattatatctggtatatctgttgtttaaaagaccttcgattcgatctaaagagacacttagagactcttggggacctcagatttccacccctccacagcattctgcctacacagttcccctcatttttcctagttactcggaagagcgctggacttgaaatcaaaataattgcgttatgtctttggttatgtcgcttcatcatagcactttctaaaactatttgacaaacatgtattgcatacctactgcattccagttcttgtacaagtaattaaatgctcgactaacgtctttgctttgtcttgctttgctgttaagagttactgtagtaagggctactgcaagggcatatacttagggctgcgggagcacaaaggagggagactctagctttatctcagagaaattagacttcaaagaagaggtaatattgaagcctgccctaagtattgccagggggagaggaaagaaggctcctcc

SEQ ID NO: 277 - DNA, 4001 bp, Homo sapiens
gtaagagacgaaattatgctattatgaactaaagtaaaacaactcagtcattatcttcctattactatgtagtaatgctcagttaaattcattttgtcatactaattttagctctgaagcacaactgctttaatagaaaatgaagccttcggccgggagcggtggctcacgcctgtaaatcccaacactttgggaggccgaggcaggtggatcacctgaggtcaggagttcaagaccagcctgaccaacatggtgaaaccccacctctacaaaaacaaaaaaaacaaaaaaaacaaaactagcccggcgtggtggcaggcgcctgtaatcccagctacttggaggctgaggcaggataatcgcttgaacctgggaggtggaggttcgcagtgagctgagatggcgccattgcactccagcctgggcaacaagagcgaaatgctgtctcaaaaaaaaagaaaaaaaaaaagaaaaagaagaaaaaaaagaaaattaagccttcagtactttgtagctacagtcacaagaaaccatgaattgatttgtgttgttctaataatgcatcataaatctgaccactggatgagatatcagatattttactttaaagcctgaataatttatgatctttcactaaaatacagcaactactactagctgagctatcagagacttcatgttaaagccaaatatgtatgatctttctcaaaagcagagcagtaagtatccaaagaccatcaaattagtttgtcaattcgctagatttaattttcattcattaaatatctcattctttttaagcccatcacggggatcaaaatagaccaccatcggattctgactttccttacctgattccaacgtctcctccccttctggtagaagcctagctttcttagcattctgtggagcatcatcaccattgtcctcatatatgttagaccattttattgccatgtcaagctctggaggcggaggcttcttctcagtggtgtaggtctcaggaggtggtacataatttgacttccatattttgaattcctttggaggctgttaagcaagcacattaagaagcactgtgacgaaccgaggttcctacgatggacgtgggcacatgcaactccctgccgttcgcttatcgttcaggctgactttttttttctttaaggttgaaagacacatttttccatcaaaatcacaatactgttaagtgaaaagccaaagggttccctatatgaataaagctaataacttttagttaccaaagaagaatccagtctcagagatactacgccaaggctgaccccttcaggaggctgcagcagacactgtcttggaggcagcaccgcaggcacttcggcgtcaaagggaaggggtctcagggagaagctgcagcggggggggcgggggagtcaccactgttagtcctcgccgcgcggggtcggggcaccgagcgcggaggtttgggtctcctcacaaggggcggggctgcgggtccggtctaacacccaccaggcggggagagggggccaggtttcccagggcttgaggtgggagggggtggtgcggcatcccgcgggggtgactgcgtgtggggggatggacagcaggtccccagcagggggctcaggagaaagggggcgcaggccggggccgagaccgagaaacggggtcggggacctcacctcctcaggcgccttgacgacgtgcctctcccagtctatctgtttgttgagcggattgtagagaaaggccgggcgagtcacgctcctaaacagctcgtcaggtcccgggagccgcttctccgccttgttcctacagccgcccgccgacttcgccggatccggggttctgcgactcgtctcctccggctcgatgttatcctcctcgtccgaggagcctgagctgctgctcccgtatgccgcaaaatagctcagagggtccttctcctccgctgccatgacggctgcgagcgacaacccagcactccgccggaagccggaaaccggaaaccggaagccaccccagggcccgcccctcgcgtggccccgccccaactcttacaaataagcctgcagtctgcgccccctggcggttgcgccacgctcctgctccccctcggaggggctgaggctggaggcgggcccggcacgttcccaagcaggggcgggggctgcttttgctcatttctgaggagctctgagaagagacgaagttctgagccagggatcccagccaaacttcctgcattcgatagcatttaccaaaggcatagaagacctaagaattttgtcttttcgctgtcactccactttagcccttgcccagagagggtaggattttttcctgatccactgcatctcgtcttccaaataaaaattactctcagtgtgtttccctaggttgtcatggaagacctctaggggtggtggacttcccaagccaagaaccaaatcatttcctgcttgacctcattcaagtgcgctctgaatagctttgacaaaactcctcttggatcatagcctaccactcgggtcgtccaaactctctggcttctcattgtcagcctcttctccgcctgctttgctccatatggcccttaaatgttggtgtttcccaacatattgtactatctttcagtgatgcttctaacattttaaagggcattacaaagttgcaagtcagcccatccctttccaccgcattaactactttatgctatgattcccaaatctgggtgtctaatcccaatctttccacccaaactctagacccgaccaccacctggatcttacattttccatatggtatccttctggggcctcaaacacccacctattggaaccgtaatctgtcttttcatataatttttctctgcatttttgttccttcttttggtaaatggtgtaaccatatgcctagtattcagggaaactagaactctttgattccttctggtgaactaaatgggaatgacacccaaatgaagttgttatcagtgtatttagatttcacttaaggatgcctgctcgtttagatgatactcacactcacacataacttgccattcctccctggaagtaggctccagggcagagttatataactatcttgttcactccctctttgctgtggtacgatgtctatgagctccttgaggggaggagctggactgtgctttgctcatttttagattcctactacccagcgcagtgcttgtcacagagcagatggttaataaatatttttggattataataatttatgatggtatgggtctagataagtgtttctcgagttttcccatccaggttcctatgttggcagaggaaaatgatggtctcaaagtgcaaagtttgggagtccccaaaaccatcctcactcctgacaccaatttcaggttttgcaaagttcagactgccctcaggttggtttgataatttactagaaggactcacagaactcactgcaagtcattatactcatggttacagtttattacagcaaaataatacaggcggggggaaaaaaccaaacagccaagggaagaggcacatggtgcagagttccacattcaaagcttccagttgtcctctcctagtggaattgtgaacagtatgaacttctcgtggcagagacacgtgacagtatgcatggaatactgccatccagagaaactcacctgagctttgttgtccagagtttttattggggcttggccatataggcacagttaattgcccacgagtgacctcagtctccagttcctccagaagctgagctgatacattgtgacccaaagtcccatgggcatacatatttatttttcttaatataagatcttgaaaatgtatggaaattttgcatggttgtgtttaataaagctcttttaatagacaaaaatatttagacttacttattactgagtaaaactgacactctgagtgacttttaaaatgggctcactgttgaatgcctcggagattgaggtactcagtttg

SEQ ID NO: 278 - DNA, 4001 bp, Homo sapiens
ttatttatttacgaagctcgtgtttggagacttggaagaaaaacaaaaaaacactaggaactctgtagcaggcttctttttacttttcatagcttctgggagtcttctgagggcaattatctggcaacctggaagcctaacagattgctcctgcgcatgcccctgctctacagctttccatgttgattgagcacctctgagcttgctggctgcccacacaaacttaatttgtcctcagtaaatgagcctcacgtaatggtggccacagacaaagatgaagcaagggtgctgacagtttgactggagagcaagatgctcagtgatgcgcatcggtacccggagaaaggtaagagagctatctgctttgaggctggaagaaggaccatagtgagggggctcagatttgtcgaaaaagaaaaacaagcagcttgttatttactgggcttacttatggtcacctggatagtcatttaacctgtgatactgacactgatgaaacaaatgtgaatttcccgagtgagaaaaagttcctttccttccctagactgattgaaaatttcttcacatgatactggtgtttgctctaaggagaatgacacttttctttaatatccaccatatctatattgcgaagtatgagaacaaattatatacattatttttaaaaggagagcataaacaagaacaatcaaaagctgccagtcacttcctaatgagtctttattcagtttcagcacttgaatgggtcagaccgacagtggattctcagggcctactaactgtcattatttaaataagtcaattttaggcaacctccgggattttcttctctacccctttggctcaagtcataccatataatattagtcccatcaagtactggaggcacacacacatagcttattaaatgggttcatttcatactgcttttctatctttattatagtcagtttctctttttttctcactgtttcttttgtaaaggtaaccatgctgcctttaaactcacgcagactgtgttagaaggcgtaaagggagagaagtttagatactggtactaacagacaattgtcaaatccgcaaaacaggagaaaacagctgagtgtctacaaatgccagattgtagttccctctgctccgttaagagttaagagaaaggacaagaaggcaatggaaaaattaaaataaatgtgtcaatgtctttttttctcactctaagaatcactggattgctaagtgttcaactgacaatgcagaaaaacacacaacacatttttgttgtgacttctcagtccctccaccttctccatcaattccttaacacccccttccgcaacacacacacacatacaccacaaaagagtggtagtgggtcccacactgcgaccggagtttagctcggacgctgatcggaaaacaaatcacactcatactcaagacagacacaggtttcccgcgaaaatgtcggggctggaagttcgtgtgcgtgcgcgaatgtcgcccgaggcaggaccgcaccggtatccagcaacctttgcctctgccgggcggcctccgggtccggagaggcccgggatgcgcaggcgcgccgagcccggggcggccgcggcggggcggggcgggcaggagggagtctcaccgcgcaggcggcagcgtgcagctccgcgatctgtcgctccgccgcggttaactcttcgctcaccgaaggcctcgccgctctctccggcctaccgggcgtgctgggcgcggagccgccgcagtttccctcgttagcagggcagagggttaagctgagctgctgtcggaacccagctcttacccagagaggtgctggcggcggggcggcggaaggttgcctgcagagcgcggcacccgtccgtgcccagatctgcctggccgccatgccgccgccggccttgggaggcggagcacccggcgctggggcccggaggggcgaccaacgcgggcctgggcgcggcgagccggtcttgggcagctcgtggccatcgctgcgtggggtcggttcgcgctgccgtggcagcaggtggaggcggacggactgagccttctgccttcaccagcgggcccgctgcggaaataaaatgggcttttaaggcagctaacgaggctctgatgagctgcctggacggggaagagcctggtgtttccacatctttggacttaaattctaagctcttccttcttcccccgcgcccacccagctgaaaggtggacattttttgttatgtcagactggacttgggatcattcagtataatctccacaactgttaagatcccagaaagtgatcaaaagacccgaggtttgtgaataaccaccttgggcctatccagaaaaggctgagtgtttccaggtagtatgtgataggaataaaggtggaagcggagccttctttgcttggttctttggcccaccctagaataagggccaaaagtaaaatcgcacactgaataagaaaaggtgttgtgttcatgttgctgaatatttacaaaatccaacctaaaactattatctcctttctgatggatgaaagtgatcttgataccgtcacataattgtatttgagaaaattacggcaagcccgggaagtaatttcaggtgttaggattaaattaacaccaccccatcttcctaccccccgtctgggtttcaagaaaaggagggctgaagagtaccaattttgttagtgctcttcaatactgggagggcaggaattgatctttgaggacaaaagtagattattcagttgtacaggagaaaggcgactaagccactatagaccatcactacgtgttttttggtttctgtgtttaccatgcaaccctgtagtcatattttcattttcttaaatcttagtaggaggtgattgaaacaaccctattggttcattaaaaatctcagtgaattaataaattggtattatattttgcaaattgattttctttttgttggaataaaaaattaggatctggagactgttaagtaatctgaggagagtttaaaatctggaaagcgaaggagggaccctagagaaagctgtggaagagtgggaccaaacatgagatcaccaaaaatgaacaactgtgatgttattcacattcaccataagtcaggtccccgcaccaacaaaaacctgagattgatttactgcattgtctttaaaattaaggatcaggatccactaataggccatgacatcgattcaaagggtagagacagcattttacaggaatgaaatagactagaccagatttaaatagaaaataaatggaactatcttatatagatacatatcttatatagatacatatgtacaagagtacatattgttacatgaaacttcttttggtgaagatgagagggtggaagtggactgtacagggcttgaacaacagagatcttgtaggtaacagaataattctgtatcttgactatgatgattacaaaaatttacatgtgataagatgccatggagctatacatacattgttttaatgtcaaatccctggttttcatattgtaagcatgtaaggtgtaagcattgggggaacctgggtgaagtaaacacagtaccatatctgcaactgcatgtgaacctgtaattatttcaaaatttaaaaacagtatttttttttttgagacagagtctcactctgttgccaaggctagagtgcagtggtgcagtcatagctcactgcaatctctaactcctgatttcacgtcatcctcctagctcagcctcctgagtagctggaactacaggtgtgtgccaacatgcttggctaactttttatttgtagacatgcggtctcccaatgttgcacaggctgctcttgaattcgtaggttcaagggatcctcccgcctcggcgtcccaaagtgctgtgattacaggtgtgagccaccacacctggcttaaaaacagcaattttaaagagatgtagaaatggatttcagattatttggtaaggagattactga

SEQ ID NO: 279 - DNA, 4001 bp, Homo sapiens
agatttttctctgaccccattgctctgcttcaaagtgaagagcaaagtctcagaactaaatatcctgaagcctctctccagttggctaagggcaagagcctttcatgtactcaccataactgggggtgactgtataataatagaccacctgataatattcatcctctcccagtctttcttcatcctcatattcttgtcctatggggacaaggactagaggtcaagggacatctggaacaccttactaacaaaaggacacctggagatgacctcagcgctcccagctttcttgctctttctttcttttctctctctctctctctcctccaatagtcatactcctttcttgcctgtgcacctctacacccctctcagtcttctgggatccatatctgtaatgaggcctgttactccgtgccctttcaatccaggaactcctaaaacagaaaacagtccccttcacatactataaacccaaagggagaaccagacctaaaaaaggtaggaaaagtagagaccaggaattaaaaacgccaagtcttctatttagtatgctccagatcttactgtatttgtgagacatcttttcttatcagtatctcttacaaataactaacatacacccttaggctttggatttgagctttagttccaccttcactgctaacagaataaccctgaacaatccacttaacatccgctttcttaaaatgagtcagctggactaaaatgacccatctctgttagtttttcttccctttcagaactaaaaatatgtggctttgatatgactggatcaagaactccaggcctcctgctaaacacttccctgagctccttgaatgctttcccttcaactccaagctaatgacacaagaatctagaggaaaaggaaacaatgagacacacctggtagactggggaacaaaggagggaaggagccaagctactcttgggaccctgtccctgaagacagccagttttccactaccctaaaggtcaccccacttctgtgtctttactaatagcaggtttttttctccaattctctgggaaaggagataccctaactactagtttcagactgtgacaccttccaataatccctccttcacccttactttagcccctgtcatcttgttcaacttccgtggtgatggagaactgagctcagtgttgctagggcctccttgtgtctggagctccatcctccttgtttgacaggactctgcttttttccccctttcctggctctgccttccagatctccattctgccctcaacaccggaccccagcacgatgagaaaactctatcgctccccactgaaatgtacctctcacccactcctcattttttttctcccaccccatttatggtagaagacctggcacaaaagctcagagagaggagtggacttacccaggataagtggcacagcaaagatggctacaaagaggacatccattctggattctgcactattgctgtgaaagtaaaaaaggaaattacagagtttcccaccaaacttaccccgcctcccctcctcctccaaagcagggaaggagctgcagcaactcttctcctcccagggggcagaactccccgcctactggctgactgactagatctccggttactgccggtccccagccagagctgcccagattgagaggcaaaagggggttttgatgcaaacatgtttcttaagctccccctgccctagattagatccattcaagactcccactgtcactaccaaaataaaaataaaaaataagcctaccaagaagtttcccctctcccggctttccttccttcctccaaggcctcataaaaagttcaccctccctctcactgtctctgacttaccatcaccacccagagttgcctttctctctgaggcttcatcagtctcttttcgtcacagtggaaatgttctgaggaaggggtgagcatttttctagactgaaaagaatccctttcttctgtctgtctggagctatagagaataggaacaatatttacccatcattgtctgacttaaagcacctgctgcatggcttcagctaaaagtctctcagccatggtcagttatttcctttctggtaacactgacctcacctcacctctttgttttttttttgagacagaatcttgctttgtcacccaggttggagtgcagtggcgcgatctcggctcactgcaacctctgcctcccgggttccagtgattctcctgcctcagcctccctggtagctgggactacaggcgcgtgccaccatgcccagctaagttttgtatttttagtagagacggggtttcaccatgttggcccaggctggtctcgaactcctgacctcagatgatccacctgtcttggcctcccaaagtactgggattacaggcatgagccaccgtgcccggcctcacctcatctctttctcaacttccaggatgcaggttggaagaagggagaaagcagatagtctctttccctgctacaggtgccacaccttccctcccacattcagtcacttggtatgttcccttcattccgtcctacaggtgtagagtttttatcctttcctctgcttttatgtttcccatgttcattcaattcagaaacccttagcaacatacgtgctaggcacagtgtgctaggcctagtgtgataggcaattgagagcttataggcaagggaataagaaaagacagttttgctttgttcttaagggaagttaataagtatctgctcaacatctactatgagtcaggcactatgcaagtgtctgtggaaacacccatgaacaagataggtttacagcctcctgtcaatggtcagaagatgctgtggtaacagctcaatggagagatgaagctggccacagtggctcacgcctgtaatcccagtactttgggaggcttaggcggacagatcacctgaggtcaggagatcagcctggccaacatggtgaaaccttgtctctactaaaaatacaaaaattagctgggcttggtggcaggcgccagtaatcccagctactagggaggctgaagcaggagaatcacttgaacctgggaggcagaggttgcagtgagccgagatagcaccactgtactccagtctaggcaacagagtgagactccatctcaaaaaaaaaagacatgagaattgtctcattcctatccaccttactctgcctgctgggctcagaagcaggacatactggagtcttgaacacaggtcatgataacgctaccctcttaatttttttttttttttttttgagacggagtctcactctgttgcccaggctggagtgcagtggcacgatctcggctcactgcaagctccgcctcctgggttcacgccattctcctgcctcagcctcctgagtagctgggactacaggcgcccgccaccacgcctggctaattttttgtatttttagtagaaacggggtttcatcgtgttagccaggatggtctcgatctcctgacctcgtgatctgcctgcctcgacctcccaaagtgctgggattacaggcgtgagccactgcgcccagctaccctcttagtctcattagggaataatttgcctggtgactttccatgtaaatattttctttcttttttttcagagacagagtcttgctctgtcgcccaggttggagtgcagtggtgggatctcagctcactgtaacctccacctctcagattcaagctattctcgtggctcagcctcctgagtagctgggactacaggtgcgcaccaccatgcctggctaattttttgtatttttagtagagatggggttttaccacactggccaggctagtctcaaactcctgacctcaagtgatccagccgccttggcctccgaaagtgctgggattacaggcatgagccactgtgaccagcctccgtgtaaatctatacaatctattcctcagctcctttccagaatatcctggaagacatgtaaaacatgtatgtga

SEQ ID NO: 280 - DNA, 4001 bp, Homo sapiens
ccaccatgcccagctaatttttgtatttttagtagagacagggtttcaccatgttggccaggctggtctcaaactcctgaccgcaggtgatccacccacctcagcctcccaaagtgctgggattacaggcatgagtcactgcgcccagcccatcataaatcttttttcattttttttttttgagatggagtcttgctctgtcacccaggctggagtgcagtggcacgatctcagctcactgcaacctctgcctcccgggttcatgccattctcctgcctcagcctcccaagtagctgggactgcaggcacccgccaccacacccggctaattttttgtatttttagtagagacagggtttcactgtgttagccaggatggtctcgatctcctgacctcgtgatccgcccgcctcagcctcccaaagtgctgggattacaggtgtgagccaccacgcccggccccatcatgagtcttgataggttttgttcatagccagatttttctctgaccccattgctctgcttcaaagtgaagagcaaagtctcagaactaaatatcctgaagcctctctccagttggctaagggcaagagcctttcatgtactcaccataactgggggtgactgtataataatagaccacctgataatattcatcctctcccagtctttcttcatcctcatattcttgtcctatggggacaaggactagaggtcaagggacatctggaacaccttactaacaaaaggacacctggagatgacctcagcgctcccagctttcttgctctttctttcttttctctctctctctctctcctccaatagtcatactcctttcttgcctgtgcacctctacacccctctcagtcttctgggatccatatctgtaatgaggcctgttactccgtgccctttcaatccaggaactcctaaaacagaaaacagtccccttcacatactataaacccaaagggagaaccagacctaaaaaaggtaggaaaagtagagaccaggaattaaaaacgccaagtcttctatttagtatgctccagatcttactgtatttgtgagacatcttttcttatcagtatctcttacaaataactaacatacacccttaggctttggatttgagctttagttccaccttcactgctaacagaataaccctgaacaatccacttaacatccgctttcttaaaatgagtcagctggactaaaatgacccatctctgttagtttttcttccctttcagaactaaaaatatgtggctttgatatgactggatcaagaactccaggcctcctgctaaacacttccctgagctccttgaatgctttcccttcaactccaagctaatgacacaagaatctagaggaaaaggaaacaatgagacacacctggtagactggggaacaaaggagggaaggagccaagctactcttgggaccctgtccctgaagacagccagttttccactaccctaaaggtcaccccacttctgtgtctttactaatagcaggtttttttctccaattctctgggaaaggagataccctaactactagtttcagactgtgacaccttccaataatccctccttcacccttactttagcccctgtcatcttgttcaacttccgtggtgatggagaactgagctcagtgttgctagggcctccttgtgtctggagctccatcctccttgtttgacaggactctgcttttttccccctttcctggctctgccttccagatctccattctgccctcaacaccggaccccagcacgatgagaaaactctatcgctccccactgaaatgtacctctcacccactcctcattttttttctcccaccccatttatggtagaagacctggcacaaaagctcagagagaggagtggacttacccaggataagtggcacagcaaagatggctacaaagaggacatccattctggattctgcactattgctgtgaaagtaaaaaaggaaattacagagtttcccaccaaacttaccccgcctcccctcctcctccaaagcagggaaggagctgcagcaactcttctcctcccagggggcagaactccccgcctactggctgactgactagatctccggttactgccggtccccagccagagctgcccagattgagaggcaaaagggggttttgatgcaaacatgtttcttaagctccccctgccctagattagatccattcaagactcccactgtcactaccaaaataaaaataaaaaataagcctaccaagaagtttcccctctcccggctttccttccttcctccaaggcctcataaaaagttcaccctccctctcactgtctctgacttaccatcaccacccagagttgcctttctctctgaggcttcatcagtctcttttcgtcacagtggaaatgttctgaggaaggggtgagcatttttctagactgaaaagaatccctttcttctgtctgtctggagctatagagaataggaacaatatttacccatcattgtctgacttaaagcacctgctgcatggcttcagctaaaagtctctcagccatggtcagttatttcctttctggtaacactgacctcacctcacctctttgttttttttttgagacagaatcttgctttgtcacccaggttggagtgcagtggcgcgatctcggctcactgcaacctctgcctcccgggttccagtgattctcctgcctcagcctccctggtagctgggactacaggcgcgtgccaccatgcccagctaagttttgtatttttagtagagacggggtttcaccatgttggcccaggctggtctcgaactcctgacctcagatgatccacctgtcttggcctcccaaagtactgggattacaggcatgagccaccgtgcccggcctcacctcatctctttctcaacttccaggatgcaggttggaagaagggagaaagcagatagtctctttccctgctacaggtgccacaccttccctcccacattcagtcacttggtatgttcccttcattccgtcctacaggtgtagagtttttatcctttcctctgcttttatgtttcccatgttcattcaattcagaaacccttagcaacatacgtgctaggcacagtgtgctaggcctagtgtgataggcaattgagagcttataggcaagggaataagaaaagacagttttgctttgttcttaagggaagttaataagtatctgctcaacatctactatgagtcaggcactatgcaagtgtctgtggaaacacccatgaacaagataggtttacagcctcctgtcaatggtcagaagatgctgtggtaacagctcaatggagagatgaagctggccacagtggctcacgcctgtaatcccagtactttgggaggcttaggcggacagatcacctgaggtcaggagatcagcctggccaacatggtgaaaccttgtctctactaaaaatacaaaaattagctgggcttggtggcaggcgccagtaatcccagctactagggaggctgaagcaggagaatcacttgaacctgggaggcagaggttgcagtgagccgagatagcaccactgtactccagtctaggcaacagagtgagactccatctcaaaaaaaaaagacatgagaattgtctcattcctatccaccttactctgcctgctgggctcagaagcaggacatactggagtcttgaacacaggtcatgataacgctaccctcttaatttttttttttttttttttgagacggagtctcactctgttgcccaggctggagtgcagtggcacgatctcggctcactgcaagctccgcctcctgggttcacgccattctcctgcctcagcctcctgagtagctgggactacaggcgcccgccaccacgcctggctaattttttgtatttttagtagaaacggggtttcatcgtgttagccaggatggtctcgatctcctgacct

SEQ ID NO: 281 - DNA, 4001 bp, Homo sapiens
ctgggactacaggcaggtgccaccatgcccagctaatttttgtatttttagtagagacagggtttcaccatgttggccaggctggtctcaaactcctgaccgcaggtgatccacccacctcagcctcccaaagtgctgggattacaggcatgagtcactgcgcccagcccatcataaatcttttttcattttttttttttgagatggagtcttgctctgtcacccaggctggagtgcagtggcacgatctcagctcactgcaacctctgcctcccgggttcatgccattctcctgcctcagcctcccaagtagctgggactgcaggcacccgccaccacacccggctaattttttgtatttttagtagagacagggtttcactgtgttagccaggatggtctcgatctcctgacctcgtgatccgcccgcctcagcctcccaaagtgctgggattacaggtgtgagccaccacgcccggccccatcatgagtcttgataggttttgttcatagccagatttttctctgaccccattgctctgcttcaaagtgaagagcaaagtctcagaactaaatatcctgaagcctctctccagttggctaagggcaagagcctttcatgtactcaccataactgggggtgactgtataataatagaccacctgataatattcatcctctcccagtctttcttcatcctcatattcttgtcctatggggacaaggactagaggtcaagggacatctggaacaccttactaacaaaaggacacctggagatgacctcagcgctcccagctttcttgctctttctttcttttctctctctctctctctcctccaatagtcatactcctttcttgcctgtgcacctctacacccctctcagtcttctgggatccatatctgtaatgaggcctgttactccgtgccctttcaatccaggaactcctaaaacagaaaacagtccccttcacatactataaacccaaagggagaaccagacctaaaaaaggtaggaaaagtagagaccaggaattaaaaacgccaagtcttctatttagtatgctccagatcttactgtatttgtgagacatcttttcttatcagtatctcttacaaataactaacatacacccttaggctttggatttgagctttagttccaccttcactgctaacagaataaccctgaacaatccacttaacatccgctttcttaaaatgagtcagctggactaaaatgacccatctctgttagtttttcttccctttcagaactaaaaatatgtggctttgatatgactggatcaagaactccaggcctcctgctaaacacttccctgagctccttgaatgctttcccttcaactccaagctaatgacacaagaatctagaggaaaaggaaacaatgagacacacctggtagactggggaacaaaggagggaaggagccaagctactcttgggaccctgtccctgaagacagccagttttccactaccctaaaggtcaccccacttctgtgtctttactaatagcaggtttttttctccaattctctgggaaaggagataccctaactactagtttcagactgtgacaccttccaataatccctccttcacccttactttagcccctgtcatcttgttcaacttccgtggtgatggagaactgagctcagtgttgctagggcctccttgtgtctggagctccatcctccttgtttgacaggactctgcttttttccccctttcctggctctgccttccagatctccattctgccctcaacaccggaccccagcacgatgagaaaactctatcgctccccactgaaatgtacctctcacccactcctcattttttttctcccaccccatttatggtagaagacctggcacaaaagctcagagagaggagtggacttacccaggataagtggcacagcaaagatggctacaaagaggacatccattctggattctgcactattgctgtgaaagtaaaaaaggaaattacagagtttcccaccaaacttaccccgcctcccctcctcctccaaagcagggaaggagctgcagcaactcttctcctcccagggggcagaactccccgcctactggctgactgactagatctccggttactgccggtccccagccagagctgcccagattgagaggcaaaagggggttttgatgcaaacatgtttcttaagctccccctgccctagattagatccattcaagactcccactgtcactaccaaaataaaaataaaaaataagcctaccaagaagtttcccctctcccggctttccttccttcctccaaggcctcataaaaagttcaccctccctctcactgtctctgacttaccatcaccacccagagttgcctttctctctgaggcttcatcagtctcttttcgtcacagtggaaatgttctgaggaaggggtgagcatttttctagactgaaaagaatccctttcttctgtctgtctggagctatagagaataggaacaatatttacccatcattgtctgacttaaagcacctgctgcatggcttcagctaaaagtctctcagccatggtcagttatttcctttctggtaacactgacctcacctcacctctttgttttttttttgagacagaatcttgctttgtcacccaggttggagtgcagtggcgcgatctcggctcactgcaacctctgcctcccgggttccagtgattctcctgcctcagcctccctggtagctgggactacaggcgcgtgccaccatgcccagctaagttttgtatttttagtagagacggggtttcaccatgttggcccaggctggtctcgaactcctgacctcagatgatccacctgtcttggcctcccaaagtactgggattacaggcatgagccaccgtgcccggcctcacctcatctctttctcaacttccaggatgcaggttggaagaagggagaaagcagatagtctctttccctgctacaggtgccacaccttccctcccacattcagtcacttggtatgttcccttcattccgtcctacaggtgtagagtttttatcctttcctctgcttttatgtttcccatgttcattcaattcagaaacccttagcaacatacgtgctaggcacagtgtgctaggcctagtgtgataggcaattgagagcttataggcaagggaataagaaaagacagttttgctttgttcttaagggaagttaataagtatctgctcaacatctactatgagtcaggcactatgcaagtgtctgtggaaacacccatgaacaagataggtttacagcctcctgtcaatggtcagaagatgctgtggtaacagctcaatggagagatgaagctggccacagtggctcacgcctgtaatcccagtactttgggaggcttaggcggacagatcacctgaggtcaggagatcagcctggccaacatggtgaaaccttgtctctactaaaaatacaaaaattagctgggcttggtggcaggcgccagtaatcccagctactagggaggctgaagcaggagaatcacttgaacctgggaggcagaggttgcagtgagccgagatagcaccactgtactccagtctaggcaacagagtgagactccatctcaaaaaaaaaagacatgagaattgtctcattcctatccaccttactctgcctgctgggctcagaagcaggacatactggagtcttgaacacaggtcatgataacgctaccctcttaatttttttttttttttttttgagacggagtctcactctgttgcccaggctggagtgcagtggcacgatctcggctcactgcaagctccgcctcctgggttcacgccattctcctgcctcagcctcctgagtagctgggactacaggcgcccgccaccacgcctggctaattttttgtatttttagtagaaacggggtttcatcgtgttagccaggat

SEQ ID NO: 282 - DNA, 4001 bp, Homo sapiens
caaggtgggcagatccttgagctcaggagttggagaccagcctgggcaacatagcgagatcttgttagccaggcatggtggtgcacgtctgtagtcccagctattcagcaggctaaggtgggaggattgcttgagcccagaagatggagggtgcagtgagttgtgactgcgccaccacactccagcctgagtgatgagagaccctgtctcgaaaaaaaagtcttatggtcaggggcacagtagctcatgcctgtaatcccagcactttggaaggctgaggcaggagaattgcttgagcccaggagtttaagaccagcctgggcaacatagcgagatcttgtctgtgaaaaaaacagagaatttccaagaccaggcatggtggctcatgcctataatcccagcactttgggaggccgaggcgggtggatcacttgaggtcaggagttctagaccagcctggccaacatggtaaaatgctgtctcttctaaaaaaaaaaaaaaaattagccgggcatggtggtgggtgcctgtaatcccagctactcaagaggctgaggcaggagaattgtttgaacctgggaggcagaggttgcagtgagccaggatcacgccattgcactccagcctcggcaataagagtgaaactcttgtcttgaaaaaaaaaaatatttccaatcttaactatttggtcaataatcacctaatgagcagtaagacattttacctaatgaccaaccagtagttgctcaataaataataggtggaatcaatggctaacaatgtgaataaccaatgcatgttatgaatcaataaccaggtaagtcagtaacagttcatgtaagcaacactggctggcttagcaactgggttttagataccaggacttttcagatccgtcaacaaagaccctggctcatcaccaaacacttactggttgcatctctgtgaacactgaagagaggctattccaaatatcctccaggccaatcctgacccgtttccaaaaagccagggctgggcaggggctggcgggtggcaggctgggactgcttctgaggtggatggtggggaagggggtagtggtggtcctggtactggtggtgctctgagaggcacagttggtgtcagtacagagacttgtgtccagggggcactcttcccgaagtcggttgcagggacattgttgataggtgcaaggcttgtgctccgtgcggagctggctcagcgccccaactcgaaggcgcccggaaaggccgtgcagcttcccagaccggctccggctcatggtgcccgacttgcagtggcagtgccacgggccccagggcatcagcaccagccgcagatcctcaggagatggcatggctgtgggtgagggtgacggccaccggctcggggtagacccaggtgtggaccactggctcagggtggcctgcgagcctggcaggtcctcagtagacctcccgggggagcgcggcaggcttgaagtcagcctgatttcaggctcctgactattggctataaacctcgtgctggaactccccgctgtattgggagtcgcactgggaagctctctgctggtgctatcctttccggcattaatcacaaccccctcttctgaagacccatcctcctcgttaatggcggacgaccggctaaagccggtggacaccgtggcggccaagagctcggcagccgctggtccagccaggcggtcggcgtcggccatggcatcattctcgtcctctaggattatccttgtcttccggggaagaccagtccgggcggtgctccggtagctgcgggtcatggggcccccaaagcgtaaactgacccgctgcatttcggtcggagtctgggtcaggccttgggcccccgccgcccggggacccagattcagcagcaggacccacagcagcgcgccggcggcggggaccatggggctgggctcttggggttgggagggtggccagtgaggcaagccctgcctcctaccttcgctccctcccttccgctgtagacccaccgggtcgtttgaaccgaggcccgcggggaagggggtggggttcgacgcgcaggcgcgctcgcgcgggccgcgcggggtgctcctaaggaacctctgcggcaagaactctgccagaaccgaaggtttgggatgcaaggggtggtgaaagagtcgttcacttctttggagcagagcttaaatgtctcatcgcagtttattagcctctacagttctaaatttactaaagagggcaaaaatacaggttttgaaagcactccttcccaggctcacaggcagcagacatgacttagaaggaaaaagggcatacagcggttcttcaagatttaatgagctgactctcctggctcccagcaggcaggctggctgtcaggtaagcctcttccatccaaggtggaaggatcacagtccctccagttagacaggaggaaaattaggacccaaaaagatgaagttatttgcccaaggttctacagctaaagtaggattaaaacccagagctctggccgagcgcggtggctcacacctgtaatctcggcactttgggaggccgaggcgggcagatcacgaggtcaagagatcgagaccatcctggccaacatggtgaaaccccgtctctactaaaaatacaaaacaattagctgggcgtggtggcgtgcgccggtagtctcagctactcgctgaggctgaggcagaagaatggcttgaaccgggaggcggaggttgcagtgagccgagatcgcaccactgcactccagcctggcgacagagcgagactccgtctcaaaaaacaaaaaacaaaaaaacccagagctctgcatatcccatacaaaatgaccctacattcagccttccgtcccagcaactggaatgaaagtcacccagcagatcagtttcccagcctcaaagccctgctgaaagtagggtcatgcaaaggacaaaatcccactgagaagtgaagatccggtggtactgaggttggggataagatgatttacaaaacagttcagatgtttcagggattcaggtgtaggcagatcactaactggttctaaggccttttatccagtcctgtgctatgtccctcctgagccatggagatcccggtccagcctaggagagggagagggggaggagagaagtggttcagggggtaggacttgggttttattttctggtttggggagagaagccaggtgaattggaagagctagatgattgggttgagtcatcatttagcacttttgctccctaacaccctctcccccactggatatcatctgttcactgccaacacatctcttcctaatttctagggccagtctgaatctcctctgcactgtgattattcctttattccttattgcctctgcacttatatgtataggttttttttttttttcatttattcttgttggatgcagtagtgtccttcatttcttctctgggtgtgtgcagtttccccatatacattaaagcacccgaaaacagggccctctagcttttcgttcttttgtatgtcccccaaggcattaaaaaagtagagattggctttacacatcccaccccaaggctttattcttaagtgtgaaactcactgtctgacagcttcagggatgtggacttgatccagggatatgagttgggccagctcccccaggctgtccagaaaacggatttttcgtgtgaatttggaactgaaaagagagaataaatcaactgtgttttgtattgggagaagggttcccaaaaatccttgcaaagaaaaatgtagaagtagagtggttaaggctagaaagaatcaaggtggagaaagatcttaatcttgattttgaaaatggggggaaggagaaaggagtccttgttcctagaactagtacctgatgaagggccgaagcagtgccagaaatgctttcacataccatgtagcatggacaaccaccagggctcgcaggtttttccgtagcctgaaaaacaacat

SEQ ID NO: 283 - DNA, 4001 bp, Homo sapiens
acatttatgatattctcaatcatgttatctctcttgctttctccactcatctctgtcgtgacctatctacttatcacctatccaagtatatctctcaggatcctgtagtgatcaattttctccctctctttttcatacacacaaaaggtgtgaagacaaagcatttattttttattagtgttgggtatgaacccagtctcagcactttatagtcttatcttcccagaatttggctttcaggttaaattatgatttgggggagtggcatgtataccgcaggtgacctagcttctaaaatactgtgataagtatttttacacttatatgtgtatgtgtgtttgtgtgtgggttggggtaagctggtgaattcttccatctcaaactcaattccacaactaatttttttaagtcaggaagataacctacctaaacgtaggaaatcagaaaaaaggggggctggggagcaaggacaagccttacatccaagcctgatttctaggaggggtgctttgaatgccccctccccacttctaacactcacaaatactcacttgactcccagcctcagctctgccagcccatccatttcataaagggatgtctcagtctgaaattatcttcaaaccaaagaaggggctacccccaccccacaccaatttgctgacatgctagaaaacagacataaggacagttagggggcctctggctcctccctccaccctaatcaatgagagttctggggtccctggggcagttatccccctcatcactgatctctgccctgccaccccccgacaaagcatacacaatgcctaggggagcatgttgatgaagaacacagcccagcaggcatggaacatgtgtgtgcacgtatgatggctggcagccttagcctcgcccagcaatctggcctctggggttccgggaatagtctgctccgctccagcctccactaccccacaatggccccaatcttgtctcccagaaagcacagtgtgggtgggggactaggggcaggaaaagtgctgtctttatatatctcctggccttccgtaggaaaacacacacacacacacacacacacacacaaacacacacacacacacacacaaaccctccattagatgggtgtgaagagggctggggtagggttctctccccttcgagaacctaagcattttccctgacacctcacttgcctttaggttccactcagcccctttcccacctgccagctcataggaaaggggggaaaggggaattaaattaatctaaatcctataaaatgtttttggatttttcccaattttggtctccacctttctttcatctggggacatctggctcctttccccccatgcccaagtccctcagactttgtcctcccctaaaagctgaagtctctaggtcagaaaggaataagagccagatggaggaaacaaggtcaggagtccaaatacagaaccattttttcccttccttcccatctccactacagtttccttcctgcctctcctctggtgcaagcattaagatgttggccatgtctggtggagagaagggaggggcagattaataggatcagtagcaccgtgaccctaaagcccccccacaatcccattgacaaacttagtgagctgtctccagcctgcatgggctgggggaaggaggggaaccaggagacactctggggcgggtgggcagagccactgccttgggctcagcgataggtgcccaggaggctggaggtgagagccttgctgccaactccacctctacacacatgcctcatccattttggggacccccctaaatcttttatcagccttttctttctgtgatgattttgcaccagcctccattagccagtaggtaaagtaggaaggttagggcgtcctgactgattttaggggatctcttcccactcccagcctagatgtctgagggggctgggatcctccctggacccgaatgggcacttaccaggcttctgtgaggaggagagactgttcgggtggcccctgcggctggactgcctctctccccccagctcctagcctcttgtggagtggaggatgcagctccgatgacgtagcatctgtctatccattcaggaatttcgcttgcctctctctttctttctcttgctgctctccctggaaaggcagcaaaaagggggtgctgcccctctctggagacactaccaccaccaccaccaccaaaataacagcccactctgacgaagcccctccttcttccttccaatgcctgtgtgggcaggggtctttgtcacctccactctgcttgccacctcccctgctgccttttctaacctgaggcaggaagaaggggctaagggaagctattgttcctccaggccaccctcgtccccaagggaagcaagagaaagggtgtgatggaaagactcggtccctagtctccgagttttaattcgctttggaacttgatagagtgattaagtggtgtgtggagggtgaggcgctgagctgataaggagtcatgagaaggtgacacagtttgccatttgaaggcttagggcattccaggccccccttcccaggcctcccctcaactcctatcccggtcagcttaactaatcacaaatccagatcttacttgtgaaggagacagtgacagtaggaagatgaaggctgagagttggagggggcgcatcttgcggggagatgaaggccagcacttggaagtctagacaagagaagagaaggggtgggaccacagagtcaaagtgggagataaattatctttttcctagaggagggagagcaatttgggggttggtttccagggctggggtcccgatatttggtggaagctggggcccagaatggtacaacggtcgggtctcttttctctctctaacccccatcctcagcccctccctttttctccctcccactcttcctggtctgcatgggaactcggtctgagctcgacgtgacagacagcaggcctgcatgctaatgaagtttgtctcaagttcattgtcaaagcccccccttccccacggcccccttccctcctctctcatacacaaatctccctccaacttttgtcccacagacctggaggccacttgagtctctgctggctcccctctctcaccctcccccactgctttcagtctcccctctcttcaccacctccctcaactgggggcgggaggctgtcttctccctggtgccttcccagccaccttctggcctggcgatccctaagctctgaatgagggattctgagggctaaggtcagagtctatagaccgggtccttctttccccacctcaaagcagggagacttcagaggggtgagagaaggcaacagactctccccactcaatgttctctgccccccaattctcagtcctgtcctggcccagtcccccaattccagccccgcttcccctcccccattcctcccattatgattattttgctctccccttgattacatctgcttcactagctcagaaataaagatcctttgagactaattttgcacccccccatctccccaccccttccctcccccttctctctagaccagggctcccgttagctcctttctcaccggctggaagacattgagttccttgtctagggagctggggggttgatgggaggggggtgccagtggaatggggggggggctctgtccaactctgggacgtgtccagcaatccaaacctgtccttcttttgttcctgcaaatctcttcatactgtcaccaccctctggagtctgcctttctcccagtaaccaggggataagggaggaaggggaggaggatcctgaactcaccccacccctcaattccagggaaaggaggaagggggagaaaagggagaaaaaaatttaaatcccccccctcattagccagaaaggaagcgaaaggggataattataattaaaagcagacagctgtggattgcatcttttatgttcctccaagcttcctcccca

SEQ ID NO: 284 - DNA, 4001 bp, Homo sapiens
cgggaacctcctgggggcagagcgggctgactgggaaggaagctgaggccacagaccctctgcagagcggcagggtggccctggcctgggcaaggcatcccccacccatgggggtcacccgagtcagatggggccagttttccccacagaacacgatgtaggtcttcattggtggggtgacaagccctcgattgggactgggggcttggggtggtgatgcggttgctgccagggagagctgcttcccgtgggtgcagtcaataacaaaagtcaggtgagccgtggggacggtcttctgatggccagccagcttcccacctagaagagaggaaaagaccaaaagttagcacaagcaggggacttttcttttcccctgagacagggtctcactctgtcgcccaggctggaggtcatggctcactgcagcctcagcctcagggggctcaaccaatcctcccatctcagccccctaagtagctgggactacaggctcatgccaccatgcctggtgaattttaaaattttttgtagagatgaggtttccctatgttgcccaggctggtctcaaactcctggactcaagaaatccttctgcctcagcccaatcagtactggaattgcaggcgtgagccactgcacccgactgggacatggtttcctgaattcatttgtttattcattcgatagggttcaactggattggttgatacaccaacagaggaggacagtcagggtttaagtgtatggacttcagcatcagagagacctgagttcaagtctccacttaccatccatccatctgccttccaggaacacagagtccaacatgtcagtgcctcccaactttgctgttcccatgagctgcctggggagcttgttaaaatgcagagtctggtgcagtggggctggggtggggcctgagactcgcgtttctaacaagtccccaggggatgccaattctgctggtccatggaccatattatgaaaagcacagtcctcaaccccagagaggaaagccctggccatctttccaggtgaggaaactgaggctcagcctgcacaagtgttggtgggtctcagggagcatcttgctactctccccctccccagataatcttgtccacagcctcagagaatcccatcagtacctggtggcatttgccctggcaatccccccgctcagagcccagcacagggtagagggatggacaaaccagccaatagacttatcaatgaagcaggtgtctgagcaattgtatctgaatccaaagcctgtgctcttaaaaaggtaactttttgagttacccaaataacatacacatccattctcttagctacgtgctgtgaaacacgacgtgggctcagaaggaagcttatgttctagtaggttggctagcacaggaaataaaacgagcccgcccttggctggagaatcccagcaacccaagggaggtagcatgtttgccatcagacccccacccacccccagctggtcttgcttttttttttttttttttttttttgagatggagtctcacactgttgctcaggctggagtgcagtggtgcgatctcagctcactgcaacctccgcctcctgggttcaagcgattctcctgcctcaacctcctgagtagctgggattataggcacccgccaccacacccagctaattttttgtatttttagcagatatggggtttcactatgttggccaagctggtctcgaactcctgacctcatgatctgcccgcttcggcctcccaaagtgctgggattacaggcatgaggcaccgcacctggcccccagctggtgtttctgtggggctggggtccctttgccgcctcttaccggagctggtctccaggcctgtctcacggatggtgcctttgaggttggctctccagtccctggggtcttctgacggggccatgcggctacttcggcgcctgcctagctctggcaggagaggagctgtcctaggccactcttccaggatgtggctcccccactgcgggaccagaccttttatactgaccggatccggattctctgagtgcattccaccaggagccaaaggaactggcccagagcagtcaggggatcgctttgatcaacagggttatgtcaacaggattattgttggctcaatgggaggcaggcctcctaccaaacagaccaaacagacactatttctaccaagcgcagctgcttcctgatttagggtaggcctctggaaccttctcatccagcctcagtttcccaaacctcagtcattatccagtggttccaccagtttggctttttcccctgtctaggaactatacgtaatgctacttaattcacatgtccttgaagtcagccaactgtttttactgaaaaagaagtgcacttggccgggcgcggtggctcatgcctgtaatcccagcactttgggatgccaagacgggtggatcacaaggtcagaagatcaagaccatcctggctaacacggtgaaaccccgtctctactaaaaatacaaaaaattagccgggcgaggtggcgggcacctgtactcccagctactccggaggttgaggcaggagaatggcgtgaacacgggaggtggagcttgcagtgagccgagtttgcgccactgcactccagcctgagtgacagaacgagattccatctcaaaagaaaaaagaaaaaaaaagaaagaaagaaagagagagagagaagtgcactttatttatttatttgtttatttattttgagactgagtttcgctcttcttgcccaggctggagtgcaatggcacaatctcagctcactgaaacctccacctcccaggttcaagtgattctcctgcctcaacctcccgagtagctgggattacaggcatgcaccaccacacccggctaattttgtatttttaatagacacagggtttctccgtgttggtcaggctggtctcgaactcctgacctcaggtgatctgcttgccttggcctcccaaagtgctgggattacaggtgtgagccactgcgcctggccagaagtgcactttattttaattttattattattattatattttgagatggagtcttgctctgttgcccaggctgaagcgcagtggtgtgatctcagctcactgcaacctctgcctcctgggttccagtgattctcctgtgtaaaccacctaagtagctggaactacaggcgtgtgccaccacacctggctaatttttgtatttttttttttttttttttttttttagtagagataaggtttcatcatgttggccaggctggtctcaaactcctgacctcaagtgatctgcttgcctcaccctctcaaagtactgggattacaggtgtgagcctccgcacctaacctattttattttatatctgctactggcccagatgaaagaaatgcactttaaaaggaaatttggtattgctatattaaatagaaacagtatcacttccagaaataagaggtacctatgcctggtagccaagttggccgccaaagatgtccacgccttaatccccaaagcctgtgaatatattaccttatttggcaaaagggactttgcagatgtgattaagagtttgaattttgagaaaaggaaattattctggattacgtgggtgagctcaatctaatcacatgagtccttaaaatcggagaacctcgccgggcgtggtggctcacgcctgtaatcctagcactttgggaggccgaggagggtggatcacctgaggtcaggagttcgagaccagcctggccaacatggcaaaaccccgtctctactaaaaatacaaaaattagctgggcgtggcggcacacgcctgtaatcccagctactcaggaggctgaggaaggagaatcgcttgaacctgggaggtggatgttgcaatgagccaagattgcacccctgcactccagcctgtgtgatgggagcgagactccatctcaaaaaaaaaaaaaaaaatcggagaacctttt

SEQ ID NO: 285 - DNA, 4001 bp, Homo sapiens
accccatcctccaacattgcaggacccagttggtggtacaagaggaaagtgtggccctggccaaggcagttccttccctgagtgggtttccagtgactgggctgtaagtttagggagtttggatgaagggatattgtgctgtttgtggagatacaggtgtttagacattcaaaggcagcagagtagtcaagatgatcttctgctagtgtccagggttagaaacaaacacatgattccctttttcattcattcctttatgcgttcatttatacatcaccaaacattgtctcctatgcaccagaccttgtgggattgttttgaacacttgttactcctctatttttttaatgtgtgtatttggaatctttagttacaaaagtccaccccaaattctctagagctagctaagcaatggagaagaaaaagctaactagggtgaggggcccagaagggggcccagaagcccctcgcacaagattcaccttcctttggagatggctcacttactaccaggactgacctggtgaatacctacccacttcagggggctcctagccttttccctcaggccttcaacctatagtttcaacagggcaagcctgtcagatgagaaaatgtaattcataaagtcctgcatgggttcaagccctctgcacagtggtggagacatggtccagtgatactgaccatgaccagtgatactggtccatgagcagatacaatttcacaatctctccaacacccaggaagatgagggtctcatcatggtcaaccctgctctgaggctcatcaaagggcagcacagaaacagccccaaccctcaaatctccattttcagatgcttctaacttgcgtgggaaagtttattcacagcattctagaaggcatggggctcccaggctgggatttcaccagctcagtctgcttgttcatgttcgtgcagatctttcctctagctgagaaacaagagtaagaagagagggatgcagaagagtgcctgatagaaaagcataaatatggaccaaacaaacagacagaaattaccacgaaatgcattcagagctttattcatgccaaagtttggggactgtactaactctggcaggctgccttggtagagaagcaaagcacagaggcaaagtgatgaggttctacatcactggcactaacagagagggggccagaagctggtgcatgttccagaaggggtagcggggcagtgcattctggagttgagctgtcgtatgtttagcagcagcagtcatcctcatggtcacagcatgcaggacctcgggacctcatggggataattcccaaacagcagcacccagagctgccacatccacagctgcagccacagcccccagaaccacagcatccagagcttcccgaattctcacagcagccagatgatcctgtgttgcagttctggggccgctgaatccagcgtctcaggggactcaccccgaaggtccggggagccagacagcagtagctggtggaacagggagcagagcatgggtcagtgacacagtactgggaggttgagccacttgcaggagcttgaacataatagctctggcaaggagaagcaccctggacatagcacgtctgggtctggcagggagctggacttttgatgtaggtcatctggcagggagctgggcacttcacgtaggtttggcagggagttgggcattttacataggttgtctggcagggagctgggcacttcacataggtttggcagggtgttgggtatttcacataggtcctctggcagggagctgggcacttcacgtaggtttgagtctggcatggaacttggtacttcacataagtttgagtagggcatggagcagggcctgtcacacagacagtttgggtctggcatggaactgggcatttcacagaggcaccattgctaccctgcccagcccctagtcccgaacctttcacacaagatggagggaactgtggctgcttctgctggtcacacattgttctgtggctttgcaaaatctgaaaagaaaggtttcattagaactgtaaaaccaggaaggtttctaggggaaaccttcaacatcccctttgaatacagtgatttgcaagcaaggctttcttgagaaggttgcagacatccagaggctgtatacttggcaggaggtggattcagagccagggactctcagctcagcttctgtgcctgtacctggctatgtggcttggtacaagtcatcgcttacctctgggcctcagtctctatattgggaaatggaggcttgaaatggtgctgcctgtgtttctacccaactctccaagcctcctctcctctttcttcagtgtctgcattgtgaattaccctttggaaattgctgctcccagatgattgacccctgccaccagttctctccagggtgacttcccttcttccttctgcccagacaaggaatacccagcaaagacaaatttatgtccatggaccctgagccaacatgagcctcaagctgtgcccggtactgagcaaagaacaaggctaaatttgagcaggtttctaccaggtgctccttgaaccagctggactaatcagttggcctcattagcacatagacccaagagaggactgcacaattgcattcagataaggggatggggagccagttctctaaagtcccttcttaaacaggaatgccagctcatcgtgtccccctccctctcctctcatgccccaggctccaagtttcccaccagcattgctttcagcctccttcagcagatttcctaagcatctagtcctcgctcacccttcatcccacagctctcatcccaccccagcttccccaaagctctgtttctcaccatgtccttatcccgtatagagacttaccctctttgctgataggagcaagactggaagaagtcagtgatctgaaaaactagcaggtggggagaccttttatagggcagcaatgaggcaatttaatggcatctaaatgaagcaccagagatcacaaggagaagggatggtgttgcattggcaagattcctccccagtatgcctggctcctcagtcagaggcagggcatgtctgtgcttgacattgggttttcccaaacactagataaatgattcctgttcccttcctcaggaaacaagtcagtctccttttcctataagttatgagtgatgcctatgtgatctgtctctaatgaagctgtttccaggtcacttgagtcttcaggacttatccaagttatagttagattctcaatttttcatacactgtgccaaaagctaagtgtagctcagagaatcaaactaaaattgagaatctaatctaaagctaagtgtagcttttggcacagtgtatgaaaaattgagaatttaactatagattcacctcacttcactcagcctaaatgagtgttctgtgggcttccaaggtaacttctgctggtctaggttgctgagcacagtttggcccagtggtctctggcccaatatgacacaagacctccaaaaaatggtttgtttcatggaacatcaggttattctaggttcatttggaaactgggtgggtgcttaatgatcctaggccccaggctggagtctagactgcctcccctcagccttctcatgccccttaggctcccccattcttacctttcaggacctcactaccaggcttcaattccaaagaacgctgagcagggaaaattccagccagatgagcactgtgtgataacaacaacaacaataataatagaatctaaagtttatttgaatactttatatataacaattcatgaggcagtacatttacaaatggacacaactgaggccctgaaagtttaagggagttaccctcatcacaaagcaggtaagtaaggaagctaggcctcagatgcaggagtctgctttcatagatcatgatctttattactacaatatgttgccttttatttctgaacatggcattgtccttgaatccctgcctgttt

SEQ ID NO: 286 - DNA, 4001 bp, Homo sapiens
catctccttccttctatcttttatccagtgaaaatgaaaacatctccactaagaggacttcctagtatagaaatggcaagtatgtactatctaccaatttgctactagcaccaccattacctatttacatgccctttgcatttgtggccaactgatctacagcattgtgccttagtgtattcaagacacttggaattggcagttgagatgattatttgccatccccaacctagagatgatcatttactgagtaccttctatatgggaggagagttaaagtcagagggccacagccggcagtgtgactatctcagaggagatgctgagatcagcaaagtcattctgagtcctaaatcgggttctgaggtccttctcccaggtgtttagaatgtccctcaggcctgggaacaaactctctgggacactaaaagaatagagcaggattgggggttgacctagcaaccatgagatccgggcagtgaatactcgtagtggagtcagagctaagcagttgtcatctccctggttcaggtgaaaggtatagggaacaggatagcccaggaggatcccaaatacagtacacagattccagtctgaggaatggagcctgctgtaggagactgctagagataagtccctctgcagcccctgcaaatgtgtgatgatctcagccacgagggccttcaagtcctgaagctggtccagggagcagacagaagggtgacgctggcagctggaaacatccacaaaggctatggtaccaagcagcacctgctccaagtgctgacatacatgctcaggactgacaatcaggctgttttctccaatctcaaggatgtgaagtccaaaagtcaggaagccaagccccttcagctcctccagatagctctggagctctgatgcccctgcacagttgcaatcatagagcacagctggcttcagtccccgggccacagccagcacctctccagctaagtgaaggcagatggcttggggtggactccgtctctttcccatgccaagggtctgctgagcagctgccaccagcagctgagggctcggtgatgacatgagatctagaagcaacatcaagaatggcctccttagctagcccgagttcccttccctgggtggcatctttcagccagacacttgaggaggggcctagaaacaaagcaggagcagggaattattaacagccttcctgttaaatcgcggtatcttccaaaggttattctgtccctccctgctttgaaatggcgacccagcccagacaagatagtttcaccgatgctgcttgatttttctggttgacttggtctccctcaatcataaattcgtgtgtttttctagccttatagctagatttatattccctctggcttttattctaaatttcacctgttgcaaattacgttctctggttcaaaccgtagggaatttggggcagaggcggaggcggggcagtgtttggcaaaattcacagcatttcgcccaaaagcccttctgggacagagctccaagttccaaatgtatcctttccactgacaactcccctactcttcccgccagagaatagttataagaatagtaatttgattaatatacaccagaatgtggactaacaaccatctcaccctgacacataaaaatgaatgaatgaaatccactagaactgcagaagggtagtattttaacttctgctggccccgccttccctttctgtccgacatcaaggaccctcggaagatgagatttctccgatccacacaccccacaccagagcatgttatagtgatttgctaaatgaggcataagtctgtctcacatacgttctttttccacgtccgctacaggttcgggggctcagaaactttttgcggcttcctgcctgctgccagaaaggcagctagtcccccacgcccagccgcaagtaacactggaaaacccgcctgcgctgggaagaccctcgcagcccgctctgctccagtcccgcaggcaccttcttgcgcatgcgcacccactcgagtgccgccctctttccccccattccgtgacgtcatccagccgctcgcgcgcctcgcgttagaatcactagctaggcagccttactgcgcgccggaagtttgggccaccgtgcggcccgccctttccggccagactgaacgcggccccatctgtcggcttaggaactgggaagggcggaagtaaacgagaaaaggcggaacctggtgaaactggtttcccgctgctgccctcattttgcttcgccgaacgtcctccctgtgttatgacgtctggtgtcccacttgactgggaatccagaaacagggcacacagcagttaataaacacctttgatttgtgtctgtggaaatacgttttgtccagacgaaacatacctcaagacaacatattttgcagaatagcctcacctgtgggtggtgctgaaacgttttaattttttttaacttgacttccctaaatcctacatttgagaggcctacaacagctctctagggagggtgtgaaggtgtgagtattcactttgaacaaatatgtgccagtcatgctgctaggccctggaggtactgcagtgagcaaaacagacaaaacccccactttcatggggcttaagttcatgtctactgaatccagtttgctgatttcaaataagaaatgagaagtgatgacacagaggctttccagtcaggtcattacaaagaaaaagtgttatttcacgtaagagttaacacctttttaactaccagcgatttgacccatgccacgaagggaaaggatttcttgagaaaaccccaatatctaaggaaatggccccaatttatttatacttggagcaggacagagattaagggaacagtggacacctacactggagttgtcactcctggatctatcttggtggtgccttcagtccatgaaaagtgaattgtacagtaaagatggggtcagcatgggaggaggaccagcttataggagttaccagcctaaggctgtctggttcttagctcagagggaatcagaagctgagagtagaaagtagtcttctaattttagaacgttttccttccccgcatttatttaattttcccatggtggttaacagtaaatccctaaaagactgatttagttcattcatttattccagcaacaaatatttgagaacacactgtgtcccagacactgttctaaggactggcagcgaagtccaagacaaacagtccctaccttcagcaagtttgcagtcaagcaggatgcggatgctgagcattacaagggaaatgattattctgagagaggaagtatggggtgctatgggaacatacaaccagggacctaattttatgggaaagggaccagcccagatccaacacttgctctcccagtttacctccagtaggttctttttaacttgaactaatcttgtttggtggggtacacagtgaggaaaaagaagagctagtgacaaaatctaactcccttctcagtcttaagcaaggtgaaggcaagggagtagaagatatcaagggagtgagtggtggtagccaccaaaggagatagcagactgaggccctaaaaaaagaaaggaaatctaaatctatccagcaggaccagagaaagagtgctgagggtgattagatggaatccctgcatgtactctcccggcattctgaaaagaagccaaaacaaggaagaaaccggggtatctagttaagacctcacaaatcactcatccattcctctgacatgttcataaactttttatagtggttacgaaccaaaagcttggcatttcttggcacttttccaataccctttaccagctcacattatctgggctcccacccaggctacagatagcctggctgttagcacttcacagaagggatatagactggcccagattcaagagctgcccttctaatttacctacagtgggtttttaactttgagttcccacgtagagatggggcagccaaa

SEQ ID NO: 287 - DNA, 4001 bp, Homo sapiens
ggcagggcctcaatccctcctctgtaaaaatggggagttcgactgggtgaggactgagttgttttccaaacctccaagtctggactcagccctcctcttggcccctagcccccttgcagatctccatctgccagagtgtaagtcatattgcactttctgtctgtctccactgagggcagagactgggtcagattcattagcacagtgcctagctcttaaacgacccaaagaaagtgttgctaaatggcaaatggttgaatgagttttaggtcccaatggtgtcccacctacattcctcacccatctgcctctctccaggaagcctgacctggaagacggccggtgcatattcatcgtcgatggagtgctgctcctgcattgaggggcagtcagggccctggcccaatgtggctacctccagcccaaacagggaacggtttccccggggagaggctccaatcagggccacctctagctgacaggtgtctgctgtgtgcaggaggcgagggggttgggctggtcggctggacctggaaaaggcctggacctaggaaggaagaagcatgggaggtgtgggaaatagctggatgcctgtgcttaagggccacctccatcattaaatcccaccctcacaaatcagcctttttgagctctttccgatttctcacgccttaccctgaaggccaggctgccattggcaaaagtcctggtagggtcgttcatggggtggccttgaaatgtggcactcagggtggcaggatccaatgaatcagtgatgttgttccaagagaaatcggccaaggagtatggaggatatggtcttcccaaaggctttgctgccgtatcggacacgttggtgctgtcaaactcaagcagctggagggtgggggtagggtggaactgggcttgcctcagtttttctcccgagaccacacctcccactcaccccctaccaaggctttcatatctgagtctatttcacccacccccagtctttagttccaccctctaattgggatgaactctctcctctgcactcttctccttggttctctcccaacctcctcaccctggtaaaaacaagggcagaagaaaactgaatgctgtccttagggagcaccatcaggcccccatcgggctcaggggatagcaggaggctccagttgacgctcagggtgctgtggggggtgttggtggccaccattaccactgccagaggccccaggctgctccacacatagtgcagtgtggaattggtgcccactgcccgtatatgaagcaggttctgcagggggcccagccagttagggatgacctccagagacacctggaacatggagtagtggagggttgagggaacaggaccaaggagagacacaggcaaaagagaagcttgaggggaggggggcttggaaagtgctggacaaaggatgggattttggggactagacaagaggaatgtgtgcgggagctgagggaaccctggggtaaggggcagtggggacaggatgaaaaggggtagggtagagggtacagccaggactcccctgaccctggtgggcgggtcagggcacagggctgcgaagaagaaaacattcaacacttgcctggacctgggtcacccagggctgagtcggggtccagacatcaccctcacatttgccctactccacaatcccgtcccatgacccatgaccatctcccacaccctccaggttgaagaaccctcctcttggcagccaccctccacccctagcccctggatgcccggttccagccaccctgcaagggtagcgtttcctgaaacttctatcgctgtagccccagggccctcacctggcgggtcttctcccccagcaggccaaatggggctgcaaacagaagtagagtccaaaggagcagggggctgggggcacagtgcccccaaccccaggtgcactccacagagccgcgcatacggccgcaattcagccgacggaagaggtgccagagggtcacatgactcgcgttcagctgatccctttcaagggcggagccgccaaactatttgctttttaaaaaaatttcctttcgtcagcaccatttaatgtattaaagaacagctttgtattctatcttaaaacaggaaacgtcagtctcttacaagtaatacaatttaatatggtcacaagattttaagtgaaaaaaaaaacattcatgctacaagttttcagttttccttggacaatgccaaaaacacagtattcaaacggcatgttttaagaggaacgtgaaatctcattttgacacaaagacaggttaaagaaaataaacccaacagggaactactccagtacattgccttaagttcccaaccctgtcccattgtggaactcatacaccttctttctactccagcacatgaaactctgtggttcttcttccctgtggaacaatgtggttcttcttccctgcctaacatttcaacaaaaattgtaaatatttagagatgtgtcactaaatgacaacaacatacttccaaaaaagccaacttatttgttaaatgttgaaagaaaaggccgggcacggtggctcacacctgtaatcccagcactttgggaggctgaggcaggtggatcacaaggtcaggagttcaagaccagcctggccaagatggtgaaagcccgtctctactaaaaatacaaaaaattcactgggcacggtggcagggccctgtaatcccggtggcaggcgcctgtaaccccagctactcgggaggctgaggcaggagaatcacttgaatccgggtagtagaggttgcagtgagccaagattgtgccactgcactccagcctgggcgacaagagcgagactccgtctcaaaaaaaaaaaaaaaaaaaaaaaaaaaaaaatatatatatatatatatatatatatatagagagagagagagagagagagagagagagagagaaagaaggggctaggccgggcacagtggcttacgcctgtaatcccaacactctgagaggccttggtgagtggatcacttaaggtcaggagttagagaccagcctgaccaacatggtgaaaccccgtctctactaaaaatacaaaaattagccaggtatggtggcaggcgcctgtaatcctagctatttgggaggctgaggcaggagaatcgcttgaacctaagaggcagaggttgcagtgagccgagattgcgacattgcactccagcctgagcaacaaggggcaaaactctatctcaaaaaaaaagaaagaaagaacgggctaaaatttggtgaaatttaaaagggttgtagaaaactttggagtgtttgttttcttcacttcactctgattttattttatttatttattttgagacagcatcctgctctgtcaccaaggctggagtgcagtggcacaatcatggctcactgcagcctcaaactctcgagctcaagtgatcctcctgccttagcctcccaagtagctgggacttcatgcacatgccaccatgcctggctaatttaaaaaaatttttttttgtagcgacagggtcacactatgttgcccaggctggtcttgaactcctgtgctcaactgatcctctcacatgggcctcccaaagtactgggattataggggtgagccaccacactagccatcactctgattttagaacacagggcttgtgcacaaaggttaggataaggaactaaagatgccaaaaaataccccaaacattaattgcaaaagaaagactaatgtttatgaagagcttataacatggaaaaatatttgttataaaattaaatgaaaaagtaggatacaaaactatataaacagtaagatctcaactatgtaaaaaaggataaaggaaatagctcaaaatgctaatagcggttgtatttaagtagtgtatctatagtgattttttttttcctttttccttttctgtctcttccaaatttttctctactggggggatttttattgttgttgttgttgttttt

SEQ ID NO: 288 - DNA, 4001 bp, Homo sapiens
ggcatgtaaagatgggatcttgccatgttgcccaggctggtctcaaactcctgggctccagcaacccacctgcctcagcctctcaaagggctgggattacaggcgtgagccaccgtgcccggccttttcttttgttgttgttgttgttggctgccaactttggactccggtgccttcgcattcccgagctgtttttgcttctggaagaccaggggcatcaggcatgactgaaggacctggtctccataagctctgaaacctgccgcccattaactcaaccaaaagttacgaaccagcatcattcacaccaccccagccccaggacctgctccggaggccaagggcccagaggtcgccagacacaaggccaggcactgggcagtttgggttatcttgttagcaaaactgggttccattcccctttacttaaaaaatacataaaaatatacgttgggtttcaaaaataagaaaaagcatctccagacaaaaaagacgatcttcatttttaaaacccatgacgcactctcgggaaggtgttcctgtgctctgggcctggggacgctggtgccaccagattccaggatggccaggtggacccggggccagtgctcccagccttccttctgtgctgttctgtgggcccccagcctgccctgcccacagagcacggcaagcaggtggaccccagacccgtgacagagagccacctggacatgccaggccacagcactgggccacctttccagtgtgaaacagggctttaaaagccagcgctgagctcggccacctcttgaccttctgaacggctgtggtttccaaacacggatggataaccgggccgggcgcaggggtggcctactcacctgggggcgaactccttctggcacatggggcagctgcgcagggccgcggcaccctccacagacggctgctgctccaccctgggggccctgcagggatcaggtgccgggcgctggggcagggacctggcgggggattccaggtgccctcctgccccgtgaagcagccggtaggaacggcccgggccccacaggtccggcggaaagggtgtccaggaaaaggtcttgggtccgacagtgaagacttcagtgggctccgggccgcacctgggctcctgcaacacagagttgttgggccttgcccagcgatggctcccgccctggaaaccccttcatcgctaagatgggcccagtgggcacacctgtcctgggaaggcgggcagtgaaggcacctcgtgatccaggatcagctccgggctcaccgtgcgcagtagctcggcccagagccgctcccgctcatcaccccccaggagaaaccaggggcggccgccagaaggcctggggcagacagagagggcagacagggggtactcagtagcggaaacgctatggtggggagacccgggagggcctggggcagagagagcggggagatggggggtactagagggaaattcgatggtgcgggaggtggccggcagggttgggggaagggctgctggggcagacagtgcggagatgaggggtactgggggtgggggagcggggtgggtgggtggaaatatggggtcctcagcgggatgaggcgatggttggggagattgcggagggcctggggaaggtagagggttagatggggggtgctcaggggagacgcgatgatgggagaggcgcgggagggcctggggcggcgcgggggaagctcggcgtggggtgggggctcaaggcgggcgctgaatggcggcgcggggtggggcgacgggcgtgggggccgggcccgggggcagggagccctccccagggggagaatagagcgggaggcccgcgggggcgccgggaagcacgtgggagcgggaaaaccggccgcgcccccgcccggctcccggcctcacccgcccgccgggcgcggcctccggcggctcaaccccagccgcggcctccgcgccgcctccatccaagcccgcgccgggcggaagtgagcgcaagccccgcccccgcccctccaggccccgcccccgccccggccccgcctccagacctctgcagcgaggccgcccccctccgagacagtcggaaccccaggggccctgatcccagcctgtagggaaactgaggccagggttccttcgtcctgcaccgcacaggggggcctggcgtgagggtggggggcccaggtgggggagccccgcccgtgtcccctttcccgtccgggcagcccccgggccggagccccctccgttaccccgatggctgcccggcccgccccggcactgcctcctcccggctgcacccaacagctcccgcccccgtttccggctctgcggagccgcctctcctcccaggaccattccaggagtaaataaagcttgaaatccgccgtcgccaccaccgtttctttacaaaaggcggggaactcaagctccttaaccaagaaaccagaggcgaagtgacaaagtccaggtggctcacttgggcctcaggggcctgggccagggccctgggggcagctgaggggctttcctgcctggaccccgggctctgcgacctcaaagtcggccacgtggtggcagcagccgcccaggcaccctggtgccacacttggctgtgcccagtgccccatgggcccaggccacttgcctctcccttggccctgctgggccctggagtggctgccaccctcacggaaggagtggggtctacagagatcagggtcaggggccctcgccagacgccactcagggctctgggactccttggcagtttctgccctgcccagccccagcagctttggggctatgctgggcacccctcctgcagggctccctggctgttcctacccctcacctggcccctcccagcccccagtcgtctgtgccctccctccagaactcagctgtggagcccggccctgaacccaggccacccgagtggcccaccgtccttcaaggggccccagcctggaggccataggttggtgttcagggaaagggtcagcagcagggcctggactgggaggtccccctctccctgcatgagtggttttcttccgcacaccttcctgctctagatgctggaggcccccagcagaacaagatggaggcaccaacccccaggcccttcgacttgagtgagcagatggagatgcagcgctgagtgctgcccgggcagggggagggggcctgggggagctgctgcaggccgtgtggtctcagggggccctgtgggaggtagcctgtggctgggcctgctctcaggcgagagaagcccagccgtggggtctctgcagccccacgtccaccacatggcaggtgccagctgaccaagcgctctcagacagccagtgtccagggctccccgacagtcctggctgccctggcttcagctccgagcttctgggtctttcctggaaatgtcaccatggtctgcaggagggccttgggtacttccaggaagactggtcccagcctcccaagacaggagaaaaggccaggcccagcagcccatgcctgcaattctaggacttggggaggtccaggcaggcagattgcttgagcccaggagtttgagaccagcctgggcaacatggcaagaccttgtctctataaataaaaaattagctgggcatggtggcatgtgcctgtggtcccacctacttgggtggctaaggtgggaggatcacctgagcccaggtaggtgggggctgcagtgaggcaagatcgtgccactgcactccagaccccaactcaaaaaaaaaaaaaaataggccaggtgtggtggctcaagcctgcaatcccagcactttgggaggccaagtcgggaggatcacttgaggccaggagtttgagaccagcctggccaacatgcagaaaccccatctctactaaaaatacaaaaattagccgggcatggtggtgcacacctttaatcccaactacttgggtggctgaggcacgaaaaccacctgagcctaggaggcatagg

SEQ ID NO: 289 - DNA, 4001 bp, Homo sapiens
ggctggggctcttctcctggagggtgaccctgggaatgggtagccttgcccacccaaccttggtcaccagtggccatccagccccaggtgtccccatcctcaatttgggctgagggcagactgcaggctggcgttgcagaggcagctgggtaaagtgtggtcccagacagggacgcaagctggcgattgctgcgggggacctgggcctgggcttagcgactgctgcccctatccagatgcctgattgggaccagggtgtggggccgggccctgcagcgcctgtcttgcccgggctggagccctagagctgtgcgacctggggccagggtgttctgacagactcactctcaggggctggatgcccttgggcaccacggcgggtgcctagcagaccgtgctgtacaccatacccctactctggccatctgtgggctccttgggcccctgccgccatgccactgcctctcttgggagcaagtttcttttcttttctttttctttctttcttttttttttttttttttttgagacggagtttcgctcttgttgccctggttggagtgcagtcgcgcgatctcggctcactgcaacctccgccgctcaggttcaagtgattctcctgcctcagcctcccaagtagctgggattacaggtacctgccaccacgcctggctaattttatatatatatatatatatatatatatatatatatatttttttttttttttttttttttttttttgagacagagtcttgctctgttgcctaggctgaagtgcagtggcgcaatctgggctcactacaagttccgcctcccaggttcacgccattctcctgcctcagcctccccagtagcttgggactacaggcacccgccaccacgcccggctaatttttgttatatttttagtagtgacggggtttcactgtgttagccaggatggtctccatctcctggccttgtgatccgcctgcctcggcctcccaaagtgctgggattacaggcatgagccaccgtgcccggccagttttttatatttttattagagacggggtttcatcatgttggccaggctggtctcaaactcctgacctcaggtgatccacctgcctcggcctcccaaagtgcagggattacaggcgtgagccaccgtgcctggccgagagcaagctgctgcttttttttttttttttttttgagacggagtcttgctttgtcgcccaggctggagtgcagtagtgtgatctcggctcactgcaagctccacctcccaggttcacaccattctcctgcctcagcctcccgagtagctgggactacaggcgcccgccaccacgcccagctaatttgtttttttgtatttttaggagcgacagggtttcaccgtgttagccaggttggtctcgatctcctgacctcgtgatccgcccgcctcagcctcccaaagtgctgggattacaggcgtgagccactgcgccaagagcaagcttctgatgtaggggctgcggggggcttcccaggccaggcaggttgctgtctcagcgccagcgtgtagcctcctcccaggatccggagcaggagggtggctgtcttttgcgttcaatccgctgggctgctgtggggttcccgcagagctgctccaaggggccgagagaaggaaggacgctgcccccaaggacagacgggcaagctggagtcaggagaggcgcagccgtggcccacaggccttggatctctggttgggggagcaccaggtgggtatgggagggggccagggaagccctgcagcccccccacccccacccccggccccaggcagcagtacctccaaggcctgggcggcaggaaagggagagatgacgtcattgccgcctggaatctgctgtttggaggcgtcgccatggagaccggaaggctcagggtgggtaaaaatagcaaacccaaaagggtgtaagttccaagaacgcgagtctctgaaaagcgaggcatccatgttctcgttgcctggaggacagagggcccaggctgggagtctagcgggaggggccgctcggggctgctggcttgcagccacccacacgcggtgtgtccctgccacagccacggagagctttgtccccgcgcagggtgtggcgggcgtggcaggctcccagcaggaggcgtctgcaagcacgctcccttcctttgcttgggcaccggagccttagccgaggccgcgctgcagggacttttccttcctcggagaggggaagcggccgtggcctgtgagtcgctgggcttcccaggcctcatccaggccggaactccgtgcctccaggcggcctctgctggggcgggaggtaccagagctggggttttcgctgcctggcctgaatgctcttttcctgccccagttttggagaaggaaaggggcggttgcctgagaaagcgtcctgcaccccagtcctattcctctaggggtggttttcttgccaggaagcaggattttcctccaggccaggaggtggccgtcctgctccttctgggcttggtccccggaaacgccagtacacactgtctgcacctccctttggctgcgtcccagtgtcctcaatgggtccccccaagtcccaggccacagaatacagcaggaggctcgagggctctgggctgctctccccagatggccgagtccgtggagaaaccctgtagccgcgaggggctccctggccgggtgccacctctgagaaactctgccctgttttggctctcggtgtcgctgggggctcctctctcccaggccaggctgcaccggggcacggaggggacctcgcctggctgcttcctcccgcagcgcgagcctaggcagaagtgtcattgggctcaggaaccctcagatggcccaagaatgacccaggaaccctgagaaggcccaagagtgacccaggagccctcagatggcccaagagcaccccgagtggggagggatccagggtgattcccagccccgagaaaggaagccccattccgggagggtgactgtccccgagcggggggatgactgtccccgagcaggggggtgactgtgcccgagcgggggggtgactgtccccgagcgggggggtgactgtccccgagcaggggggtgactgtccccggttggaaggtgactgcccactacagcaacaaacgttctcctgagcagcctggggaacgctttcctccctccgtgccggaggctggtggggctgagtctccgccgctccctgggtgctaaatcctggaacatcttcaaagagtttcagtcccttctcttctgcacacaccattgttctcagggtggcagggcacccccttcctccacccagggcagggggagcacggggtctcacctctcacgcccagacctcccttggcttgtggtggccttgactggagagggcgaggggacatagagccctgtgtaggggtttctcattcccccaagacatagctcgcatgccttatgtaacgcgtgagctcacgcagagggcctgccagaaatgacggcaggggcgggaggggcctgctcgggaagccaagtgtggctcaggcttacgaggagcctgggccctgccttgaggagagaggggccccgggcctttgcaacctggggctcccacactggcaggggatgggcagggcctgggagggagcgaaggccgtggtggtgcagtgtatggcaaggcctggggtggctgtgctggtcacttggcctgtgggtgcctggccaagcaggatgtggggtcaggcccaccccactcccccactagcaggcaccagcaggcccgagatgtcagaggaaggggcctaagtcacccaagacccccgggagaagctctgggggccttagaggggtggatgggtggaggcagtgccatctcccccagtgccagctgcccttccaccctgagaaacagaccaggacggatgctgcgctgaggatggccctgaggcagggctggacccagtgcccgcgg

SEQ ID NO: 290 - DNA, 4001 bp, Homo sapiens
tcagtggcgcgcccggggactggaaggctgagccgccctcctcccatgtgcgcgggagtccctccgccactgtgcccagatcgccggcgaagcgcagggggaggctgggaagggcatcgggagacacgggcctgcgccccctacccgggccccggcccacctgtccgcacacctgtccgaagccttaaaaggtcttcattccttttcggtctgatctgagagccgagctctcggcagggatggggacccagggctcggcctgcaggtgccgtgccaattagggcccaggcaggagaggggcgtccctgcactggggctccatcattacgttcgcatggccactctagcatgggaggggggcagggcctttccctgttagttcacttccctgttggtactcacccacctgtctgtggaaaggcagcaatggtcgatttcccccttaagaaacaaagcgtgaaggaggaagagaggctacaggaatctgccatccgggagaccctgtctctaacgggccatacggggtccccctgtgtctcctgcagccctgcacagccccggtctgaggtaccttttggagggagtggcccagctctcccggcctttgccacccggcgtcctgtcccagtttatctgtgtccagtccgattgatgggctcatggattggaaagctgtgacagacgccctgggctgggaggtataaaacgaaactgtttaactccagtgaaaaaacagttgcagggatcccagaagtgggaaaaggtcgctctgagcacctaccgtggggtgggtgtgattctgagactaaggctctgggggccgggcgtggtggctcacgcctgtaatcccagcactttgggaggccgaggcgggcggatcacgaggtcaggagatcgagaccatcctggctaacacggtgaaaccctgtctctactaaaaatacaaaaaattagctaggcgtggtggcaggtgcctgtagtcctagctactcgggaggttgaggcaggagaatggtgtgaaccagggaggtggagcttgcagtgagctgagatggcgccactgcactccagcctgggcaacggagcgagactgtctcaaaaaaaaaaaaaaaaaaggctctgggacccctggcccacgagccccaggccacggcctcctgcctgggaggtgtggctccccatgcagccagcttcttccctgcctcagatcggtgacctgcactctgtccaggaggaggggagacttgcccagggacaaacccgaaaacacggcaaggtcaggggaggagggcactgtttcctgtcgaagtccacatttgtgaaaaaacattgattgggcagagagaggtgttgtattctggaatggaggtgagtggggggccagtgagggctgggccggtgaggggtggatgtgatgttttgcctggcccaagggagctggtgccccaggttcccagtctgctggcagagctgggtcctggtgggggcagagctgggcaggcccacatggcctgtgcatccagggtgtcttgtccccttaatccttcagaggatgaacccccacccttcgccggccttcttgggcgtggtctggtagataactggagctgggagaggctgaagacagtcaaagctgctctcctcttttctaggtgagaacagtgagcccgcaaggtcagggagctgcccccaggtcatctgggctgtcggagatggaggcgggagaggagccgtgtgctcctgatccctggcccaacgctctccttccccgtcgcccactcggcatcggccctacccggggcccggactcccactcacgcactggaaactccctgtcttggggccgcgcacaccatgcctggcaggagctggagatgcagcagagcagacgcggctgcaggagcagccgtgtttcctacagtggagaaggggaccctggcaggagcactgcccagccaggcacgtggtgctcaaccctgtgggcactgaccccacaaaaggccggggtttgtgctgcaggaggcctctgtttggggagagctctgtcccggctccagtgcggcggccctcccccagcctgctggaatgggacctcatccctgctccagcgtcatggacttttccggccttgggtcgaggcctcagcgattcaggcggggccgttttggtaacacccgtgtgtgtgtgtgtgtgtgtgtgtgtgtgtgtgtgtgtgtgtgtgtccgtgcgcgcgcgcatgcgtgcaggcatgtgagcctgtgtgtgcccgcgtgcctgcacgtgtgtggacatgcgtgcggtgtttccgccccagggctggacaccaaggcccgtcttggatgcagggtgttttctgcaggggaaactgaggcgtgggaggctcagcccctgcctgggggggtgactgccagggagtcagcctcagagctcccacccctgggcacaacgggcacctggccctagggcctgggcttcttgggagcccggggccttggctgcacacagaccatggccctgggtcccaggccaggggtgtcctctcagccctgcctccctgcagtgcacgtcctccagcccgccttctggtctcttttcttcctctcaactttaccctgtctccctcccttcctctctctgcccccctcctggcaagcggattgcaatccaaacttgttgttaacttctcccctgcagttgtccacgggcccttccaagttaaacattactcatggcgacaagagcccgcagggcagtgcctggcctggaggtggacccgcgtgcggaaggtgctgggagggggtgagtaccaggcccctccctgcagcatctgtggggcagctgctggtacaggtggccccagcaccctgagcccatacctgggtccctgcagcctcttgcctcgccctttggagtcacgaatgtgcctgtttatgtaacccccatgctcggccagagcgggtaagcctgtgggcagcagctccctgggcaggcttgggaggggccagccaggggccccagaggggtttgggccgggccaggcgagagccctcccctcagccagtcactccagctctgtgccaggctaggggtgggactggaaacaaagtgttcagaaaaaaaatagcctcatctgttttgaatcgattccgcttattgggccctcagttttcccagcagggaagtggagggatggggagtcatgggctcaagcacctcagggagccctcacagctgcaggaggcacaaagcccggaccccactcactgcacccagcagctgctccaccctggcctgtcaagagcctcccaggttaggagcagagccccccaggccgggttccccaggggagcaaagctggaggtcaacagcaaacaggcacggtgtcctctacccaccatctgccaccccctccctcgcgtcctctcttaccactccgtcccccacctgctgcatgcatcctgcagggaccaagcaccgtcctgcccccaggcctttgcgctgctggcccccgccccgaaagcttatcccacacccattttagggctgctgagatggacctcataggaagccctcctccaactcagcacctctcgacttaccctcgtctattccttttaagaacatggacccccatccaacatagaacatttggagacttaattttttatgctctcccaaggaagctgccagctctctagaacaggaactctccgctgtgtccgtgtgcttgctgtagggaggcatgtagtcaactccacagaagaaaccatttccacactcacccacccagcgccctcagggcccagccccctggcctgcacccggaccctgtcgggcaggacacatctggctgaccagagctcaggccaggggcctcccgtggggctcagcggggacagctggatcctgagccaacagggggagggcagcaggccgaggcacacgaagttcaggggggctgcttggtgctggtggcgttcggccaccccactttgtgcagg

SEQ ID NO: 291 - DNA, 4001 bp, Homo sapiens
aacaataccatatctttgtatatttgttcagtctatgagtttctgaaatagaagatagagctaaggaaataatcttaggaaggaaaagtaatttttgactagctattacttatggaacgcctactatatgaaagacagatctagtaccttccctccttttttgagccactgaaactctgtaagaaagagctagtcatactgttctgtgctgaaacatctggtgaatattagaaatacaggagtgtcatctcttaaatgtgactctgatgggtttggaatagaagaaagagatcttagccatgatctgagaagcccaagcttagaggagtatcaaatacaaacaggagtaagtgaaaaccttacaatttatgattctgtattaatcctactcctgtaattcacaacaaattgactattaaacctcccccactctccccaaaattagtacatgtggtagattacaagcccgatgagaaaaggcagcagtgctccattaatatttataaatgtcgcaatgctcatatttcccatctatttggaaaatcagcccaagtaattaaggagtatggggaattataaagatgaaaaatatcaggaaaacagtgcacatggaagttatcaacacgattttacctctactgttgcatcttaatgacttcgttttccatggatggcattttttaagtttaaatttctgggtgaaaacaaaacaataaaacttcattatcatccaagcaacatagatatttttcaaatatggacttacatctttggcttctccacgaggtattgaaagtgtttacttccaatgattttcaccatgatctcaggcattgcatctgatccacggggagtcttccaggctgaagacatgattcctttcaaaatcccttcagatccctaggggtgaaaataagtaaattgttcctcttgattttccattagggaactgcatcatccttgccaataacaacaagcaataataatagcaggacaaagtgtttcacctatattacctcacttaacactcctaacaaaggcatgagaaagatatttttaactactattatcatttttgttttactgttgaggaaacaagcaaaatgtagctatatgacttactcacatcacatcacatcaccagtaattagccgacttgggaatctcacctaagaggtctgtacagcagatctactgaatcattaggtgactctaccttcctgtactacaagacataggatggaattccagtgaggtcagagcagaaacaagggcattagtgggacatatgaagaatccatattcagttctgatgtttagtttccccatttatgagatcagggtaattctaggtctgttctcagggacttgagggtgaatccaaggagataatgcatctgaagggagactgtacacaagacagacagacttttgttgttatcactgatctctttctacaacaatacaatgaatctgaaattgaactcctgcacaaggtgtttaaacagagtgatgccaagggaaaatcagaagttcagtaaatctggccacagctgaacactcccttttagaaccacccagaggctgaaaggcctttagaaatcattctactccaaaggctccttcacagattggaaaactaaggcccagagagggtgtgttatttgacaagggtcacagaggaatgaaggacgggactgtttccagtacttgggtctgatgtctaggccagggttcttcccaaaagtccaatactaaagacctgtgctagggcagcccctcatcccggggacctgcagcctctttgcacctgtctggaatcttccagacccggaactcgtgatcctcaaatcccctccctgcccagcagctgcgtgtcggccctgattgcccggagagaacagagtcggggggcttaccgctagggcagcgtccccaccctggcagctcagaggtgcgcggtccgtgcttctccccaggaagctgacactctcagacccggggacgggacggggcgtggggaccgagcccaggaatccggccaatcacagggcccgcatcgcgggcggcgcctgttccgccctggtcgctaaggacgctgaaggctgtttctgggcggggaccaggtttttctccactgcctaggcaatggacccaggctctggctgccaacgggtgaagagcctaggtgtttttgatctgtgccttctctgttcctcagagatatgcgggcgtccttctagaagcccatctcgctcacctgtgtggtcacccttgtcccgcccttcctccgaaggcttcatttccctttgtgagtttgcacatagttgagattccaacacagtaggttcaaatccagacgtctccactgtatggcttgagtaaatcccttcttttccctgagattgtttcctcatctgtgaaacggggcaaaataataacactgtcctaactgcgatttggtgactaaattaaataagaatatcggccgggctcagtggttcacccctgtaatcccagcactttgttaggccgaggtgggcagatcacgaggtcaggagattgagaccatcctggctaacatggtgaaaccccgtctctactaaaaatacaaaaaattagccggtcgtggtggtgcgcgcctgtaatcccagctactcaggaggctgaggcaggagaattgcttgaacttgggaggtggaccttgcagtgagccaggatggtactactgcactccagcctgggcaacagagcgagactccatatcaaacaaacaaagaaacaaaaaaaccagaatattatagattgataataataacgttgagtactgtctctatgccagatccctatgacaagctggataactctcacctcacaagttaatagttataaacaaaatagttttactttattttaaagagaaaagaaacaagttggggtattgataaactactccaaatcctgcaaaagcaagtacagagctaagattagaatatagatctgcatatcctacatttccagacagttgttattatgctaaaagaaacttcagctgatgcaggcaaagacactttagattgattcccaaacggtattgttatttgcatcaacataggcagcagcagctccagcatctgttcccctgtctcctaacctctagctgtactgtgctttacaggtgaatatatcacccactggcacatgcagccagaggtggacagcacactcagctcccctccaggggctcactctctagagggtgagacacacagccacattctatgatatagaaagtgttaagggagcagagaagcggggacagctcccttctcactcctccctcctagccttcacgttgcttccagatcagtcttcccaaggcccaactctgacaagccccctcctctactcaaatgtctgaaagatctcatcagccacagcaggtgtctgtggtttcaagaccttccactatctgacttcaagctagatctctagcttgatctcccactacttctcctaggcttgttatgctgcatccaacccagtctactcactggcttgaatctccctttcatatctctgcctcagtgcctttgttcactttgtttcctctgcctataatgcccttccatttctcactgtgtcagcctgcctatccattctttaagttggatctcaaatgatatgtgaacttgggaatcagacactttgagttcaaatccttgccctgctagttcagtgtaatcttgggcaaatcacttaacatctttgtgctttagtttcctcttctatacaatgaggatgactttttgtgaagtttaagcgagttatataagaaaggaacttagaagaatgcctgacacataacgaacaatataaatgtttgctcttattttggaagaagccaaactggattccagagctgaaagtggcttcttcatcttatctataacttgtggtttctctcttaggaaatatgtgtgtctttgtctgagagtgtg

SEQ ID NO: 292 - DNA, 4001 bp, Homo sapiens
cataggttgaagtccgaacccctagtacttcaggatgtgaccttatttggaggtagagtctttaaaaagtcagttaagtcaaaatgaggtcattgggttgggccttaatccagtatgactggtgtcctgattagaagtttggacacagatatgtaccatgggaacacatgtgaggacacagggagaagaaggcagccatctacaagccagagagagaagcctcagagggaaccaactgtgtcgacctcttgatcttggacttccagcctccagaattgtgaggcaatacatttctgttttttaagccacagggtctatggtactttgttgtggcagcagtcctagcaaattaatacaccttctatttctcactggctaagaataaaatgcaaactcctcgccatcccctaatagaccctatgtgatctgccccactccctatctcccattgcttacctggatccagccccatcctcctcctcctggccccctttcctttttacagccttgcctgtgctcactataccaaaagctctttccccaactttgcatggctgccttgcttaattctattattatattaattaattaattaattaattcatagacagatagtctggctctgtcacccaggctggagtgcagtggtgtgatcatggctcactgcagccttgaacagctgggctcaaatgatcctctggctttagcctcctgagcatcttgcttaattttagatcccatcttccaccgttgccatctcagagaggccttctcagaccatctccttaaagcacatccccatattgtttctcctagcaccataaactttccttttgtagcatccttaattagtaactttatgtgtatttgtatacatattttctgccttcatcaagtcagggactgtgcactaggtgtatattcattgtctagcacagcacccaggcacataatgatgctcaataaatatttgttgagtaaatgaatcttcatcttttcaaggtctttatccatgtctcaggttccagaccaaatcctactttccttcttaaattagccttctgatcccccaagtccaggaaaagctcactgtcttgacatgcctctcggtagcatgccggttcttcagtcatggtgattatcgctgtctgacggtatcagttacgtgtgggtttccacctctggcctgcatcctcccaaagcaggaccacacactgtgcatctctgcagggcccagagcacagcctcgctcagggcccccgagcacaggaggcgctcagtgaaagcacgtggacccaaatagatcagagagcaggaatggcggaggatgtgagtaactgggccttttgcagggataaaataggtgccctgccctccacagcccccagggagaaggatgacaaacgctccttttgcccgggaaagttctgggggtaaatctcatctgcccgttgcagccacagagcaaagttctggagctgagaagagggtaagagaaagcccattggcctgcagccccagaattacagagcagcccagactctcttctgcccagctgtgggctgcacaggaggcctgggcatctctgccagttcctttctctggaggagaaccccgcctccaagagaggggtaaagtcggagcttagaagccaggagcccacccccaggcaagcccagctaacagcccccaaggccaccaccaccactcactgctggcgtagtcagtcccttcctcctctccagggctggtgggaaggctgagccctctctttcgggggctgagtctggacaatgggaagggagaagccccctcctcactgccccgggaacataaagcaggcctttcactgaggagttctggctgcttcggttggttcttggcacccagcaaggcggcgtcgggaggggcgggcatacaagcgtgttgggggtggggaccaggcccgcgattctgaggagattcgcccgcccagggccaccgggctggctccccagctgtgggatgagctcatgcagggaaaccggaacaacttggggtggggggagggaggaagagtggcatctaggaggctgcgaaagcgtggctctggggaggaagtttttcatggggagtagggacaagcctccactcctccagccctgcccccgccccccaattcatatcgtcaactccacagcccctcttcacacccttccttggatggaaattcctggccacgctgacagccggccaacctgggtcgccagccacccccagcctggctcgccatccctacagtccctctccacacccttccccggaaattctcaggccccaccgcccgccggccactgcccccttggccacacagatgccaacgctccgttttggccaaatcaggctgccctaagcccggagcacagcttctctggggtgtgtcggcaaagggggcgggggtgcccatcgcaggtgcctttccactgcacgcgccagcagaagcctcctctctggaccttgcccctcccagtttcctccagcctccccccatgaagcgtctcttccctctcgccgagagtttggcgtagacagcgaaggagccatcgtgactggcggagaagcctggagtagacgagacagagacggcgaccgagtcgggtgggggatggggtggggaccgacactaagcccttggggcctagaggcagccgctactggggagaggtggggagcagctcacgtccttgggaagaactctcttggtttggggccttggctgggaggaggaaggggagaagaagaagtaggatccgattatttaaatttggggataaattgtactagtaactcttgcaccgtccttccaccaacctcactccccacccccaactcgcgtgcacacagggaccgcctctgccaccctgagatttttgtcttagggtaggagtgggaccgcactgggtcaaatgaaccggttcccccccctccccaccccacacacaacccccctccaccgccctccaattcttaaccctgcctctgtctacgcacacacgcccctctcctgggatggggtaggaggctattgtgaatgaggctcataagcatcgcccccggccctagatggcaagttcaaagccaccacccaagatcagctggtaagagccaagacttggggaacgcgtccttctttggttaccttttcccagacaggattccaatttccaaacgtggaagaggtgtgcgtgtatgtgcctgtgtgtgtgagtgcgtgtgtctctgtcactgtgtgtgtgtgtgtgtgtttgtgtgtgtgtgtgtggagaggggggtgtattaatgggtgatgttataaatgaaaacaggaggactgaacttaaaagaaactggtcaattgcaaaacagacacggataaacaaccctttagatgtaatttgtggtttatctggaggtggaggtggcgctgaagaggaacccccgccccccaatattttatccttagctgcgcctccacccccagcatttggagcggcggagaagcggctccggagtgattaatccggggataattcaccccctcccgccccccggcgcgaaccccgcgaagcgggattggagcgagtcatttccgagagcgcagcgcgcctctccccggccgggcggacacttggttcattccagccgcagaagctcagggctcccgcgtaccgggattttttccgagcagaaaaaagctccagagctctcctgacctcctttctcctcggcggcgagcggagcctctccctcggcgctgccggccgcgccatgccgcgctcgcggggacgggagctggggcgctgcggctgccccgcggggagggctcgcggcgaaaccgggatttcggcgcttgtgccgggcgccgggagccgctggggccgcccgccgccgccaacgccgccgcctctgctgctgttgctgggctgtgggttgctcagcgtctcggccgccgcgggtgagtccagccgcgccgaggagccagc

SEQ ID NO: 293 - DNA, 4001 bp, Homo sapiens
taaaatggggacactaatacctgcctcacagggactctgggaacattaattaagtttacagtccactttgaagatgcaaaacgtgaaataagtaagtgctcaacggcggtattaataaccacagcagatttactttcttttcctaatttccctttttcctctctgctccttcctttcctttcgaatatccatcctcaacaatatctgcccaactttgccctgatggagaaacacttagctctgtgtttcccagacacaggatttcccatcccggaaacgggctatttacagccatcttcccgcactttaattttctattatgtcctctgaatatgtcagtgccttcccagtaaatattttgatgtgtgctcttgcagcagcttctgtggaggctgaatgggacagctgctccctgtattagggaattccagatgtgatttaaaaccatcagactcatccatgtgaatgcctagcctttaggtgggagaggggaaggatcttctagttgcttctggggaaagccacaagccatataacccttagccttagctagggtggtttttcaaggacctcagattcacatgcgtttaggatgagaaatgtctgcttaacgggctggtgaagaggcagcctggaatatagccctaatctgactcttcacccacaaaacttcagaactttggtcagctcttctataaagcttggacaaaggaccatggagggggcaatatacagcctttagggtttcaccagcctcaacagtgggccagaacattcccccagaaggtcagacttcatctcctccctcctcccttgctgccaatggagtaggggggtacttactcttcttgaaagctgagctcattgcctcttagagttccaaccacagggacagagagctgctccatggaggtccagggctgtgaggcctcaggcaggccttgaactctcttccagatttcatggcaagtcttgtctaggctgtcttggggtgtgtcctggtggatccagatgtatctggggaatgggcccagggcgcaggggcccttggccaccagggccgaggatgaaggaagcccattcccgctggccatcctcctcctctctttctggaagcccctctgtccacccagggctagaacacaaccaccaccacccctcattcaccagaaagggagatgaggatggggcttggcagaagtgggtcagttctgtctggctttcgctccagcaaggtggttaggttcagaggccttctatttgtgtgggaggggtgggtggaggacagctttcttttggggaggggagggcttattttgatttgtttttatttgctctttcctgacttttgcctccctccccctctcccttagaagaaaatatttaaaagtcaacaaaaaccagtagcttaggaacagtggaatgctgcggagctcaggaaccaggcgcctgggcgggcagaatgacatctgggaacagctggaaggggagggctggctctccccacagtccctggcactgcccccttgcgacgccgccgtgacaactttcggcgcctgggctcagcccatgctgtcccgctaagccacgcggaggactgggtgcgggcctggcaccattgtaggcactcggggggcggggccccgcaggaggcgctcgcctgggcgttcccagggagcccctcgcagagcgagcgtcaacggcccgactcccacccccggcccaggtcctgcttttctctcgccctacccctcctgctcccggtctcccgctgctgctctgctgcccccggaaagaagggatgaggcgtgtgtggatgggcccacagcccttagtccccggcccccagcagacccctgccccagccgcgccgcgctgccaggcgggcaccgggaagggcccagcggctcaagagcgcgctgactcggcaaggcaggctgggccgggcggctcccaccaatttgcctgccagtagctcccacaccctcgccgtcgtcgagcgggggaattctttctgtgggtttcaaacgcaacggctcggtgcgcggggcgccctgggttcggagcccaagacccgccggtggggtgggtgggggtggggcccaaaggaccccagagcgcttcgggggatcagaagtcaaagccaaacgcgccgccgccccacttcgccgctccacacaaatctcagctcctgcctgggggtcccccggcaacctcgattttaatcctaactgccattttatggggcgcttgccctgtgccaagcgctgggctcacattcaatcctattaaagctcgtgaaattagtaccactttttattatcgttctacacgggaggaaagcgaatctcaaagtcataagggattgcgtccaaggccccctgagaaaagggaagctgagactcagaccccagcactctaggcctgatctagcccttgaccactgagacagcttcagtaggtgggtaggagcaggagtaggaggtccgaggtgcagggagaagggctaagttagctgtttgctgatcaacaggcccctaccctcactgaagcggcttcattcaattgggcactgacacagtacctctgctgagggagactttctggttccgagagtcagggggttgcttctctagcaattcccctgaaaaggaaaagcaagagggtggagacggaagaaagaagaatggacacaaatagaggaagatggcagtctataaatgcagggctgggttgaatcctgacactcatttccgagctgtgtgaccttaagaactttctgaacttctcccatccccattcataattcccccagtactgatgcaacccctcctctgtgcccgatgagttgctgggcactgaagaagcataagggtgggcaaaaatggcatggtccctgctctcctggagcctgtatactagcgaggagagatcgatgcaaaccagccaagcgagtaaagcagcaataattacagatgcaatgggactctgatggaaaataactattaggttggtgcaaaagtaattgcggtttttgccatcacttgcaatggcaaaaaccacaattacttttgtaccaacctagtaacaaagtgaggcactggggagaagaggggaggcaatattccatggtggtccaggccgacttctttgaggagaaaaatttgagaaggatgagaggaattccttttctgtaaaatggtgttaataaattatgaggatcatgtttctggcacatagtaggcactcaaaaaatatgtgttggatgaattaatggtatactgtatgtaaagtgcctggtatacagtaggtgcccaatacgcaaccttgctctttacagaggggctgagttcctggaaatgtttactctaaattttgaaatctgagcttcattctcctttgattttcattacaaaattgaagatgtgttcctttggggaaaattctgagggcctagactgaataaaattatagttaagaatgtagaaaaccttttaaaatagtgtatttaaaggaaaagtgatcatttctgatgaaatattaatagttctgaaaatgtcactcagtgtttgtgctgcttggcatttggttggctaacaccttaagcttagagcagaacgccaacgaccctgcactgcccaggccccaggattctggaagttagccagctcactcactcttcctgttccctctccccctcagcaggagaccaggcaacgggggctaaatcagaaaggactgcaaaaaaaaaaaaaaaaaaaatcaaatacagcagggatacggaacaaagatagagcatgtttttagagtgcacagacgagatttctagaaaattctgcaaaaatcttaagtgatgtacttagaaatagtataaagctatgtccatatggtagccactagccacatggggttgttttaattttaactttatttttatataaattaaatgaaaaattcagctcctcatttgcattagccacatattatgtgctcagtagcca

SEQ ID NO: 294 - DNA, 4001 bp, Homo sapiens
aaaggcacctagtgaagggagaccagggagggtacacacaggtacatgcgtgggcagctgctgtctcctggggctggtctcccacaaggtggtttcctcgtgcagcagtgacttggtgcagcccctctcacctggcaccaatgcatttgtttcctcaaaagaccatagggtggcgtttacctcaccacttaaaaaaaaaaaaaaaggtggatcaagatgcatgctggctcaggaggatcttcatatccgccagagggaggggcaggcagtctctttttactccagcaggtgagaatttctgataaaactagattaacaccagctggcctccttgcagtgtctaaatgtgcaaagagagctgatctgatgacaccagccagggggacaggctgctggaggcaccccagaagagagaagcccaactaaaggccacctaacttactgctcagataggctgctctggccgcagcagccccttagggtagaaagacaagtaagctcggaggggaaagtgaacgggtcctgcgtgggtggctgtggccttggctgtcaccgcagcagaggcccctgctaagcaggcgaagagcgaggagaccgtgagaaaggccaaagtcaaactgaaaaccccttccagctggcctctgctcttgggaacttggaaccatacgttggcaacaggctcgccgacaggggcacgctttctcccggagagggcactggggcgcctggttcttcgggcgggcacgggagaggggggcacctcccagcacgcaggagcagccagtgccaagctggaggaggggaggggcgtgcaggcagagacctgggggtggagttaagggagggagggtcaggaaaacttctcattccctgcctccattcaccctcctgcaccatctctgtaaggggcctctgctttaaaacgtgggacatagatgccaccagaacccctgccggctgccggagtcctgcacagaattacatcggcgcactctctacttctcaggaacagaagggatccgagggagctatgggttcatctctggccacatgcatccaaactaataaaatcatcccccatccccctggcgccctgcggggtgctggcggaagtgcaggtacccctgaatgaggcggaggagactctggctagagttctcgtccccacgcggtccgcactccgcgaaccaaagggggctgcaggtatatctagcccggctcgtcctctttccccggctcagctgacttcgacgcccgggagtttgatcctcgccgccgaggccctagagctcattctgatccgaccccattcctctcggggaagtgggctcgcggacggatgcacacgacggagagaaggagcagaaatcggggcgccgggacgggagccctactccgaagccggcagagccattccggccgccgctgcgggctccaacattggccgcaaagtttccggctctttggggccccgcctgcgggtcggagaccccagcgcagcctctcccctctggggtgcacactccacgcgcttctgccacctgcccggggacgccaggagcgggcggtggcgcgtggtcgcagcacttggagcgcgcggccccgccaggaggtctccggccgcgcccttctctccccccacgccctcccgcggcggggtgggggtcgcaagggtcgcggcagccgtgtcttacccagtcccggcacgaaagtgttgaggaagaggcagatgacggccacggggaagggcatgtaggggatggcggcgcgcagggggcccttcttctcgcggacctgcaccaccaccccgctggacgaggacgccccccgggggtccgccgccgccaccgccgccgccgccgccgccgtctcggcgtctttgtgcgagggctccatggccgggcgcgctctcaggcagccgggcagcacggccggagctggcgcccagcgtacgggagcaggagactgtcggctgcgggctccgggctccgcgccgagctcaggcggccgccgtgctccgtgcgccgcgcggctcgcggagactcccgccctccggcgtccccacacgcccggcggaggggcggggagggcggcgcgacacccggtgacagcgctctgacgcccctcctcgccaggccccttccccgccccctccccccaaccaaaaccaccgctcacaaggaatggaaaatcagggcggagggaaagcagtggaagaggaccgcaaagggagctgtttgcccaggtgctggaaggggtggacacacctcgccctcccagacaggtgaactaggaaccttgaccacgaagccctgcgaactgggagtgtgtgcttggctgacaccgtcgggaaagcctcgaggctgagtcccctgatctagagcaagcctttggccagggacatggggacaagggacggaccgcgcggcgcctgacacctagtcggccttcagtgcattgtgatttaaatgattttgtttggggcgagcgcagtggctcccgtctgtattccccactttgggaggccaaggtgggagaattacttgtgcccaggagttcgaaaccagcctgggcaacgtagcgagacccccccccccccgccccagctctattttgtaaaaaaaaaaaaaaaaaaaaaaaatcacttaaaaaatatataggagtgaatttgtttcaagtgtcagagaaaaagcaatccagagatcggatcgataatagaggaaacagatttgcaaacaccaggccaggtctccgcaagactagttaaaagatgggacacttccctacacacacgcaccaaaagcagaaagaaatgcgcctgttgcaggcttgttgggaagcgttcaccatcccctgaactatactggaggaaacctgagccttctgtgagcccgacgtggtggttaaagagccagtgaggacacagcgccgtctggcgttaataatggggcagttggtagaagcaacagccggcagcttgaggtcctgtttgaattcgattttctgaataaggctgcttcgcctccgcacctggaaaaagtaaacggatgaaagttaccgcctctaacgttagggaggggttaaaggcttcggaattatccagacagtcagcaaatcgtctgaataattggaagggtgcaatagcctcccttcaggaataatagtgattattattataaacaacccagggtctcagaagaggctaaaagaacatgggttattgtatacttatacttattgtataagtctctgaataaaataattttaaaagcaaatggccaggggttagtgatgatactggtggacacacacatgcgtgtgtacacatacacagatacacacacacacgagtcattagcttaggtttggcagtcagaagaacagggttaaaaattttagtctttgttcagccactaaaacctgtatggcttagaagaactcgcttagccttttctggcctggagttactgtgttggttaaaatcatagcaagcttccatttaatacacaattattgaaggcctactaagacttagattccagggagagagaaatgagtaaaatccagcctctgccttcaagaatctaagaaatgagctgagagatactgacaactacaaagatagacttacagaaacagtgaggaatgttgcagctgtgatgtgctggaggtgctgcgacaacatggacctatctgtgaagccagctagcgtgggggaggcctcggggaggtgtcccaaagaaggcgatactcaaagggacttgagcaatgactacagttaactatttgcagatttgttttattttcaacaaacacttatttacccaagcactctctgccaggcatcattctaaaaaccctttacacattttaactcttttaatccttaccataactctacaaagtaaggattatttattaccccattttacagatggggcaattgaagcacagagaagttaaacaggctgcacaaagtcccccactaatcagtggtagag

SEQ ID NO: 295 - DNA, 4001 bp, Homo sapiens
caggcacttgggaaagtgtcaggttctgggaaatgcatggaactctggctgctctgctgtgttcctgcccaaggctgaggacttcatacccctctggggcactgaccttgacttggcttcaggttcaggtaccacatgtaggatgcccggatgcaaattactgcaaatgtctatgtgatccttctggtctgctttggactaggaggcccagggtgattccatgagactccctttctactttggtcaggacctcttcccttttccattacccctggcctttcttctagaatgtgagtctctgaagcctgaaggggctggggagggggaagcagggacagtgttgggggtgctggaaggaagtgaagggacagattcagttatttgatccctctctatgtgccaggcagtgttatttttccattttacagatgagcccacttaggctcagagagggccaataacttgcttgaggtcacacagcaaggcagtggctcctgagtctaaactctgagtcctcgtttttctggcaagagaaacatgaacaaggactcagcattgctgccagaactttcactttcactggtcaaagcaagtcattctccagagggggaaggtgaagccgaagaaagagggcccaggcagtacacagggagtggagaggcctgaggacatggcccgagaaggctaggcctcccttagcccctgtggccaagtacaaactggagaggattcatggggcactgggggcagacggactcctgattctcagtgccaccccaagccttcaccctggaggccaagtcaggccaaggtccaaggggctgggtcccgaggaagggtgcttacccggctccccttgctcccccttgaggcctggccgcccccgtctgccaggtcttcctgcctcccctttcttcccgtctggtgctcggcacaagtcctcggtcaccatagaggccagcgatatggccagcacacagagcaccagccatccccggggaccctccatgatgcctctgtggagacacgggagggcctgggcaggttggacatcacactcacacccagctcccacccttgagtcccatgcacacaatgatatatgcacagtcctccccaagtgcacatgcaccctctggggctctcaatgtccactctcaatccagccccaggaccccacgcatatacacagaaccacaaactcacacacatccacacatgcaacagagcacacccacatcttcacacactcacacaaacacagctctcatccacgcacctacaaaacacagtaggcaaactcagaaatccactatacccccctagacacacaactgatacccaaatagaccctgtccctcacttgcacggacacacacattcatacactcccacaggtaatcgatttcattgaacaaatatgtattgagcgcctgctccttatttaattaacactggctcacccagatggtggagctctgcatacacacaggaattcacaaacgcccaaagcgacacctgctcactcttctgcatgctcagcgcctttcagcatccacctgagcatgggtgactggctgcccctacagtcccctctgctgggtcccactgccagctctagcaccccaggcttttcctggtttcttatgtgttatggggccaggacccaggaaccctggtcttacccttcagttgttaggtctaactcatcgcctctcaccctcccccaagccctggctcaaggagttaaggtccctccactcacccattctgggtcctggatcagtgctgcacccccatccctgtcctagaatcaggcacagttatttccctccctccctgcctcagctgcccagcctcctgggccagctcccctgggtcccagaactctgcagccccctccctctgggactctggcctcacctgcctcctgttgtcaactccaactggatgctcctgccctccgcccagggaccctgtgggctgcccagcaggagtggctccaggctgtggccaagtttcacatcccttcctacttccccttcttcagacctgccccctgaacttccccagtggccagaagctcaccagggacatttcaagcagacttcagcaagactgggacattgggcgtcctgccccagcaacagctggtgtgggagtgggggcagtgaggccagtgcctgtgaggatgtggggtggaggccgtgcagggtgaggttctgagaaccagcgaagcacagaacaccagagcggaaggaatctttaaaaaaatctgtcccttgtaggacttttcatgattatgaaagtgacatgcaattcattgccaaaagcttggaaaatacaaagaagaaagaacagtgcattggtgagaaggaagcacagcaatctgtttctagacttgctgcttcctagttgcatgtctttgggaaattacttgacctcctgagccctcagttttatctgtacactgggaacggggtcctatatcatctgattattataacattttaatgacttgcacatacaaaacacttggcacatggtgaacacttagtcactagcttttgccaacatttaaaaaaacagcaagtctaggtgctttggctcacgcctgtaatcccagcattttgggaggtcaaggcaggcggatcacttgaggtcaggagttcgagaccagcctggccaacatggtgaaactccatctctactaaaaatttaaaaaatagccaggtgtggtagcatgcacctgtgtagtcccagctatttgggaggctgagctgggaggattgctagagcccaggaggttgaggctgcagtgagctttgatcttaccactgcactcctgcctgggagacagaacaagaccccatctcaaaaaaaaaaaaaaaaaaaagagatggcaatggcgggccgtctggaatggctgctgtcatcacactggctgcagcagggaggcacggccagggctgcatgctccatgtagccagtgggagctggggacagtgggaaccccgccctcctgggaaccactgcagctgccaaaccacagctgatcctgcttcatggagcaggtgggggcccccgccatcccccatgcagctgcagctgcctaaactgcagctgtggacccaggcatccctgcaatcttgggggcccgggaaggccccccgccccacccttcaggctcagaagtgtctgctcccactgcctggcttctccctcctcttggcgcccactctgatcttagagcaaagttggtgctgagcctgggtgctgtcgcagcctggctgggtgtgggcatgcttggggcagtgctgacacactagacccctgctgccttggccccctctggactttgggcactgactagcatggaaggaaagccaaggggaaactgagggcagctcggcactggcctgcagacgctccttggcatgaacagcctgggcaccatgaacagcagcaggagacagacaggctcctgggtggaaggggatgggtccctggtgaggccctaccttcaagccagggagggcctcaaggctgggggccaggctgccagtcccacacaccagagtgggaacttatggtgtattttctgggcttgcctatagccacccatggaccaatcagtatgcacttcctcctctctgaggctcatgaaagcttcaggctcagccagagctgggcagacattggatgaccagctgccgagaggagctacccgctccagggcctcctctctgctgagagctgcagagatggcagaacaacttgcctgcagaaaggagcttcccattccagggtcttccctcttctgagagctggaaagtcgacaggatgacctgcctgcagagaggagcttcccattccagggtctcctctctgctagcagctgaacactcatcaggacaccctggctgtggaaaggagctgccccctgagggaggctctgcaggaggctgagctgttctatcgctcagtaaagctcctcttcg

SEQ ID NO: 296 - DNA, 4001 bp, Homo sapiens
caatttaacaactttaataagttgggtacgtataggccaggctctgagccagatggcttgcatgccattatcccctgtaatttgatattcagcccctgagaatgcactcttgctttcttattttacagatgaggcaacgggatcagagagggcaagcaccttgataaaagtcacacagctcctgtgtggctgggagtcaaacccacatccactggatcttaaaactcaatgttatgttaagaggccactgtacctggtggtaaaaacataaactttgaagccagacagcctgataaaaggactaatgcatgggacacaccaagggtagtggtaggcacatggtcagtgttcggtgaaagtggctttttaccaccacgatgattgctgctcttgttaggcagcacacattcacctggtggcgggagcctgtagtgtcacaaggaaagcaacactcagcgttcacataaggtctctactgcttcttagctaagggacttgggaaatcactccttctctctggccacagtttaccctcctataaagtggggataatgctactctctccctcatagggtatgtgcgaggacatgagttacagcttccaacagagcctggcatgttggaaattcttaatgaatattagctattttattattatcactgtcatccaagaattcctgagtggttgaacagaagggaagatggttggagaagtaaaaaaagacaatccctttgaaagactgtgtttagagggaggggctctgtcagttggaggcagcaaggggtggagagctgtgaccagttggtggggagagagggtggggagcagggtactgacaggacttgggcttcctggggaagccaggggcagggggagtgggaaagtgctggttctagcccatttcaaaagccaccgagtttcagccttgggttagggcttacaactcatctggtttaactgcctcctgcctgtgccagcccatcatcattgccagcgcggtttctcctgtcctccccccaggctctgacctttccatctccttcggtccagcagtccctttccgcaacatggagtcaggcccacttgactttaaagccccatctgctaccggctgcataacctcaggcaagtgccttaacctctctgagcctcttggcaatgctgatttcaacctgacagggctgccagaaggatgacaggagaaggcgcttagaagaaataaggtcccccctgccccgtgcagtgccacatcccactccccagctgcacaaacattgcgctcactcagtactagctgagaactcatcgtaactctacctgcacatccccttatttctttggaagagtcaagctgagctttctcagcgagtatgaggaaataagcaaggtgttggggaaatgctgggccgggcaggagcgactggcttataatcccactcctgcctctggtttactgataaattttgagccagggcatgcactaagcttttgcaagcttgatctcctgtaaggcacagcagtgctgaaagattctgttctctgtaggggggccgggctgagagaggttaggtgacttgcccaagataaccaatacataaggtgcagagccagactcagctcaagtctctgcgatgccaaagctcctatgtgccaggctcccgctttaggtggcctgcccatccgctaggccctgggtagcagcagactccccaactcaccccagagatctgggtcccataggtctgggattgggcccagctacctgcactgttaaacagcctaactggctccgaggcaggtgacgcaaagctcacacttacggaatcaccactttctgccatattggccctgccagcctcccccaggcgccaagccccgtcctcacctgggaagctggtgtcctgtgaggccactgggctgagcagcagtgggaccaggagccgagagcctactgccctcggtccgaagcggaagttcccttccccagaggcgggaagggctttcccctgacggtcccctcccatggaccagcaggctggcccctttcccgtcccctcactgtccccccaccctgctgccctcaggcagtttcaggtcctatttctgcaacccactggatttactgtaaatgagacgggtgggtggcaagtttggttctgccaactcagcagctgtggggagaacacgctgtcctgggggaacatccacagctcaccctcccaggctctctgacctcgtgatcttcttctacactgggcaggggtgttcctcagtgagcatcatgtggcgggcccgctgcctgagtgctggcttacagtcagagcctttgattccaatcccgcctctgccacttgccagttgatgtgttgtcagtcaagggagccccaattttctctgctataggatgggaccataattgtacctgctctacagatacagatctcacaggccactgggaggataatggaggaaatgatgggggaggaagtgtctgggggtaaactgtaaagggctgtgcacgtgttcattgttaatatcacttcatgtcccaggcttcccctttctgggctcatctcttctgcttccttcccattctgtgcccctgctctttccctgttctcagaaaataatctcataatgaattttaaatgtgttcattatttattgatacccctccctctgcttccagcagggctggacgctgatgacaataataggcccaggcaggggcctgttgcttcttctcgatcctggaatcacgccaagttagggccggagaggggctgaggttactcggcccatcctcctcattttatatacgaggaaactgaggcccagaggggagacccaccatttaacaaatatttagtgtttgcttccatgtgcactgaagagagagctcttagcaaatcagccatggtccctgcccccatggggcctcccttctacggggggagactggtgttaaacacggaatgacatgaggcttcattgcttctgtgataaatgtcacagaaagacgtgactgctggggccgatgcctcatggaggtggcagatgcagacctggaagccggcatccctggcactaggatatcagtctctccctgtggctgcgtctcagacgacatgatgactagcaagcaccaggagctggaggccctcttgacatctgtgcttggagatggaaattcactgggcttgtggatgcagcttggtggaaattaagtgttaactgcaatgggtgaacaggagggaaagataagtttgataaaaccaaaaggtctctgagctcagtcaactatagtcccgaagggacccaggctagggtgaagagaagaaacactggattccacaaagggagaaacgagttagtaggttgcaagttgagggcttctgagcattcccaaagccgagtggctctgggcctctagttctttttttttttttttttcttgagatggagtctcagtctgttgctcaggctggagtgcagtggtgcgacctcagctcactagaacctcttcctcccaagttcaagcgattctcctgcctcagcctcccaggtagctgggactacaggtgcatgccaccaagcccagctaatttttgtatttttttttagtagatacagggtttcaccatgttggccaggccggtctcaaactcctgacctcaagttgatctgcctgcctcggcctcccaaagtgctgggattacaggcgtgagccaccatgcccagcctctgggcctctaattcttaggtggctaagggcaatgggaaaagatggatgtcaatttggggtagaagcagtgaggctaagaacaggaagcagcagaggtgggttaggagcacggactttggcagtttgaatcccagctcttcgtcttgctaactatgtggccacgggaatgtttactggcctcagtttcctcgtgtagaaatgggaagcatgaacgcctatctcctggggctgttttgggggccagcgaggtccccc

SEQ ID NO: 297 - DNA, 4001 bp, Homo sapiens
gtgatgctgagcagagcagcgtctcatccttcgtgatgtcttcaaaccaccaattgagagggggccaggaaacagcaatacagaggggacttgagaggcagctgagggcagtggtggagaatgtggacttgagagttggacaggatcccactgtgtgactttggacaagttgctcaatctctctgaaccccagctttgacatttgcaaaatgagggtcaatcactttttcaagggattgtggcctcggttttatcatttcctaaaactgagaccacacctgggacttgggggctcaatcacgggtggccatcagctaccctgggcagggaggtggtcagaggcagctgtgaagtacaagctcctggaaaatggcagacctggaggcctcattgagctttgagctcaccctaagctcaccctaaattggagaattccttctggaatgttggtgccattccctctatccaggagggaagatgatggtgggaccactcctaaggacattcctctcaactggcctccctcctttccactgcctctgtcaccccatcacctccgctcagtgtcaccccaggccggctccaggcatgcctagcatctgagacgtgcccagctcactcacagacaaggcactcataccccccagggctccagttccagccccagtcacccattcatagcctcagcccccttctcttatgccaaggattgcctgtggacctccaacagaagtttctctggctgcgatcctgacctcctactccccacccctccaactatccagaatcctaaggagggaggtgagcatggatatctgataaaaccaatgataaaatagcctacacctgtatagacctcccaggtgctcagggctgttttatatttaagttaacttaatcctcacagcaaccttgtgaagcaggtgctaccatctcctcgttttacagatgaggaaactgaggcactgcgaggttaagtaacttgtgcgggttcacatagagggaatcagtaggggctgggatttgaaccctggcagtcgtgcattggatatattcactgtgtgggccccagcttccccaggtgcccatgttgcagggcaagaagactttccctgcactgtctcctgtgagcctcctggccacctttgggggcaggcgctcttattccctccctataatcgggtaaggaggagaaggaagatggaagtgcgctgggcccaaggtcacctctggggtggcctgaagcctgggctctgaggatagaggagccagacacaccgtgagagtccacctctgccctggggcaggcgtggcagcaaggcaagcacttcctgctgtcccccgcccccttggtcagccccagacagacactctgatccctgccccagacccaaacccccaaaccaggccagcagactcacctggctcccccttgggccccggcagtccgtcgtacccatccttccctggtgccccgggcaggccgggcatccctgggatcccgtagcagcctgtgttggcttggcccctgaggggcagcagcagcaggagcagcagcagcttcagcccaaggtggggcagggagctgggccccacgtccatcccggagaaggaactgggagggagagagctgagctgtccccgccagcccctcacctgcccccaaccctctcattccccagggcccgtcctcctcagccctcgggagctcgccttccttcctcccccaggagcctcaccatggatggatggtggggccttttcttcagcccaggccccggggcccagcaggagtgggaaccctccttcccctcacacaccaagctgcccctggcaccacatttcaggaaggtggcggaaggtggaggaaacggccatctgcccatacctgggcaggggtccgggcctcacctgcaggtgggcggtttctggcctggcacagagatgtcctcagatctgcttcccctctcccaggcaagaggacacggtgtctgagtggtcagagcaaggattgcccaaagcagggctgggccccctccccttctcgtgccctcccccaatcccacatcccctttcccagaattttccctgacttgacactttcttttgggtgctgagccagactgaccacagcaataccccatccacatccccccaccggcagtcagtgtccgaaatgaggaactgtcccctgccccagcatctggctgagggtgtgtgtgtgtgtgtgtgtgtgtgtgtgtgtataaacacaagcccccagggcacagacgtcccccagagtcaggttcatcccatctaatgaccaatgttagcatttgctttgcctgagactcagttttcccagaatccctaggaggaagttattatccccctttacagataaggaaacaggctcaggaggatgtacaccgttgcccaaagtcacacactgagtggtctcttggggcccaaagccttgctctgacccctctgctcagctgcccccagaaacaagcctcacatgcacttgtcaagttgcaagccttgttctagaaacttccatgtgccccatcccagtggccacacttggaggtggacccccaggatggacccgctttggcggcaggcagctgttgtggtgcacgggctgccctggctacagagccagggccctggcttctccttccagccctgtcactgcatggaccagatgccttcagcaaatcactggtccctctggcctcccttctgtctactggggtggccttggctttcagtattggtgcctcttccttcgttggggcacctggtcttccctgacggttccatcttccctgccaacaccaccctccttgcctgcatcctgggggtgccctgcctctgggcttggagcccaccatggctggtgaggggctccccatcaggaccaggctggcagagctgagaggccttctcccctctccctcttctcctcacatgagattctagggatgaaggggctgtcaggcagtagcagggctccagcctcgaccccacacctgccacctgtgtccattggttccccctctgtaacatggaggcttcttacagctccaggccagtggctgggattcagtgcacaacacacgtgtgatgccttgtcccgtgccaggtatgggcaggtgttcagagctcttcccctgcctcactgaggaaccctcagggtctcagtctccccttctgtgtctccaccacgtgccatgggactgcagagagtgtggggtgagttaaggggcatgaacccacttggccctaggagtccctggtgggtggaagcctgggccgagaagaaatgatggatactgcattatggggctgggggccacccagcctaacggctctgggctcctctcctccctcttcacctcctctgcgcctgggttcggcttgtccagcaggtggcagcctcggcccacgctcaaccctcccgtgccccgcccacttggccccgctccgggcagctccagttcattcccctcccagaggggccagagattttgcatcggggtagtgggtggatggtggggtatgggtaggatttagggtaagggggtggccgggcactcactgcacaccccatttctctagcttggcctctactgccgctgatggagcctccacccctggcattttctttgcgtgccctaaccctgtggggtcaggcacccctggctcagccccagggcccttcccctttctggctgtgtgtccttgggtggatgtctgctttctctgagcctcagtgtccacatcgattttgctgggattaaatacatcaatggccgtggaatgcccagcacgttaggttcccgaagacctgtctcttttcccggtgcctgtgaaacagtgtgtgttctgggtgagcgaggcggggggagaacagggctgagctgactctggaagggagctgagggctaccctgaggctgtggagggttcatcctctccctgggcccccctcacttcttcccgacccccaaa

SEQ ID NO: 298 - DNA, 4001 bp, Homo sapiens
cgaggccgtgtcgctgtcgggggcccggcagaggcgcaggtccggggcggagacgtgcagccgggactgcgccgcggggagtcccccggccggggcaggtggcggcccgtggaacagggattcccgccggcgcgtgtgcgggctctcgggcaggaaggcccagccttcgcggcccgccaggtgaggcagcgagcaggtcgcggggaggccgcgccccgccacgtgccgccgggccgcgggcactgcgccgcccgggtccgggagccgaggcgggatgaagaactgcgggatgcgatccggggtgaggacgttggggcaggcgcttgtgggcgggcccggggcgcgacgcttggagaacaggccggaaggcgcccaacgggccgcaggctccgcggcccccaccttatagccagctttttccaagagccacatgcggtgggtggggtaatggaattccgaattccgcagggccgagagggtccaaatcccgtctcagatgggagtgctcggcggagcggggctgggcgaggagcgcagaggagtcagaggtgagtgatgctggcgtacaccgggcggtcagccaccgcgccccggtctccggacccactgggagcgcggacccctatttgagcagaaaaagaaagggcggcgcagtctggggggctggggagaaatggagggagcaaagggccagtcagtcacattttcatatacgggcctccgtcaccaagtacacagattctcccactggtactaaagatgccccattcaccttacagttagagggcccatatagtatccaccagaaccctagggtactattaggacaaataggataataaccgcattatagcaaaaggactcagatcccaacccccctgggacactgcgccctaggcgggctcacgccctcctcccccgcccatttcgaagacttgggttttcctctgggatccagtctggcgccccttgggacttcctccctttgccaggctgccccggctcaagcttctctggcctgagccatccctcagtcctagccccacctgcctcctctggctcctccttcccctcctcgagtcgctccaagccagaagaggactcacttctgctcctggcagccaggggacacacctggctgctgacctcaggacaccctgggctggtccaaggagacgcacctcccggggacacagaatcccacccccagtagccctgaccgtccagctcccgcgcctcccagccctaccgcatcccgcgtctgcagggcggggccgggccgttgggtcgcccctcctactctccactccttttctccctcggaaaccaccgagcacaaaggcagcattgattctccgccaccctcagagcggtctccggaaggctccgccaccacgcgctcgcctcacccctgcgcggagccaccaagagcaccgtgttccgaccctctgccctgggatccgagctagcgaccctctccgtcgcgcgcccggagtgctggcctcacctgtgggtcgcttttgggttctggcctcaggccctgaaactttcagagccagaggggagcagctttctctgcagcttgctcccccagcgcagtccttatgggaggagctggcaggggcctccgctgcctacgtcctacctcttttcctggataaacacagctctgtctgcgcggccatcagcccggtcttctgacttcctccagctgaagccaggtttctagcaacaatccattcctgtgcccaggcctcctctgctgaagctgggctgcttaggggtgggggagggctacagagaagagggagacggccatcagtggacagtggccacttctttggtgctcggttccaaccccagccctcacaggtgaagtccatcttctgtaaaaccctcctggttgaaatcctgccttggcccccagtgccctgttctggagccattccaatagctccaaggcagagtgacttgcagtgatcagttgtctgcattattctggctaatagttctctgaattattgtggctaaaggaaaagtggccagactcaggatttctggacttagaaacactgaagataaagctggatccaacagtcaggatcaagctggcctatgtcctccatccctgacagatcttaggaagcacaggccaccacagacaagatgagaccatcagttgcagtctagacacacctaccatccttcagtctctgaaaggaagcaaggctagttcctcccctaggaccactcttctccttcatgcttcagctctggaggccctcactgacaccctcccatctaaattaggggcacctgctgtacactttcatagtacctcatacttttcctttatagcattgattacagtttttccccctctatttatgtggttatttgtttaatgtccacctctcttactagactaagaatcttaaaaacagtgcttggtgcaaagcaggtactcagtcaggatgtatttgatgagtgaagtagtaagcaaaattatacttgaatcaatttgttcatccattcattgaagtgcctaaaatgcaccaggcactgtgctagggggatacatagaatagagagctgtctaaggggagagacagacaataaacatgcaaacaacaataagacaaatcctgaaatgcaggaaaaaagatgaaacaaaccagtgaatgcaatgattattgtgtcatctaatacttgaagattttaacaaagcaagtgtttcttctgtggcgatccctggtggcctccagaccttccattcatgtggcttctgactcagctcagccctggtgttgtttctggggagggtccatgttcttggagtgctgcagtattcattgctttgtcatcagtcagatgggctgggaatctggattctgcgactgactagctgtgtgacctctagcatgtaacttaatctctttggggcttaccttttccatctggaaaacagaaagaataaaactctcagagttggtatgaggattaaagataacacgtgggcatcatttaggctgacatccgctaaaagtgtgagaaaacagaaaacccaactcagtctgacttaacaatatggacacttgacttccataataagaagtccagaagtaggtaggacccagggaacacaactgttttatttttcttcctcttcttttttctctttaggctagtcaagtgaagcaatgggagtggagatggaacaaagaaatctgcaattggttgtgatcaattagttgtaaacactactgcacttggaccaacctcttccttttcctgactgcttaggaaggatggaatgtatttccttccttctgggagtgtttgaatgaagattagactctccttgaccatgaatgaagagcaaccagttttttagtatacagtgatttagactctgggtctagagtgtagatatcatgggcactgtgaaagcacagaaggagaaaaggtttttatgtgagtatatgggagaggaaatagtttattgtcataagctttttggctatggcctccattacatctctagcttttggaaggcactaaattgaggccattcaaatccatgtccacctatcctttgcccgtcacgagactgatggcttaggaagcatgtggtctaggtactagagagggagcctgacccacctacctcaccgctgctgctgaatttgtgcacaactctctgacctggttccatgtcacaaagggtttcattctctctgattccctgaatccccagctctagccgcagatcctggaaccctagcatatgcctgaagctgaatattttacttgccagagtaagagtttttacatagactctgtcatcttctactggccctcctcttaaactgaggcagcggctgctagctactcaccaaacctattttactttctttttctttttttttttttttttttgagacagagtcttgctctgtcgcccagactggagtgcagtggtatgatctcggctcactgca

SEQ ID NO: 299 - DNA, 4001 bp, Homo sapiens
caaaccatcaggatgcatcctaactcttctccaactacggcatttgcagttcaccataactactcctggtggtccctcagcagaaaccagctggccacagagtatgggaatggaggctagaacttgcgagctgagaagacacaagttggagttccagcaataccacagtctaagtctgtgatcttgaagaagctatatcagcttcttggatatcagttccctccatctctaaaataatgacattaaacctagatgaacaaattctgcaattctgtaactgctcactgaaaagctgagactactctagccaactttcatatttcaaggacttcaccttttaaattcctgcagaaatggaaccaactcaagaactttagtcagcatggcgggtcccttgtgaaaaataatatcagcacttagcaatgcagtgcaatttgagagtcactggaaaaatctttagtcctcaaatttctccttccatgagaagttactttttaagttaatatttattttgtctaacttcccccttttaaaatgcagataccttgtgaaaggatagtatttttctccagtctcgggctgagtgtcttcttccttatacctgggctctcaattatatcacttacaaactccagaaagaactggctcccacactttccccacccttcctagaatctcttttttttttcttttttttttttttttgaggtggagtttcactcttgttgcccagactagagtgcaatggcacgatctcagctcaccccaacctctgcctccctggttcaaatgatcctcctgcctcagcctcccaagtagctgggattacagacatgtgccaccatgcctggctaattttgtaattttagtagagacaggggttctccatgttggtcaggctggtctcgaactcccgacctcaggtgatccgccagcctcggcctcccaaagtgctgggattacaggagtgagccaccgtacctggccaaatctctttatttttctatcagcccctttattctgtgctcatactacattcaaacatatctctaagcttaatgccaaccttctttgatgcttctgcctcttctgtagtctactttttattcttttggtgttaccatatttagagatagaataggaatcagcaaagagacaagtggttgaagaattaaaatgaggaccagaatggtactgtatcctggccaaccaaggaagaagagaatttcaagaaggaagggttatcagcatcgtcaaattcagaaagtaaagaagatgaggacgactaagactgctagcttcagaaaccaactggaggctggccagtgtcctccttattaccaaatctaaacatctttgctgtcagtggtggaggagatttggagtggttaatcaaatctcaaaatagaaatggccccagttttcagaatgtagactaagaaaagcaagcttcctgtgaaccctttgaaaagtctgattgaccccttgcctcaactctgatgtgggaaggtggtgaaagatcaacaaaccaacacatctgtcttttagatacagtaacaagagcaacaccttacacctcttcttctttagcttattttattagaatgcaatattattcctccatttataatttttaaaacttgaggttcagatagggtttaaagtacgtctcaagtcttacatccccctaatacagtgctcctgaaaagatttctgctgaaaacacctccaagcttttgtctctgttttatccttctaatcctgcactccttaaagggccaaaccaccagcctttcctccaagcttccccaagggtttagtagtccaccgacctttggtagttgaggaagagcagaagactctatgatgatatctgggatagtttctcaaagaagaaaactgccttgatctatgtagtcctggttcctccccagatcagagtttatcataataccctgaagttgactggtaattgctccaccaaagagtccctgaatttcagccatgtggttggctggtcaaggacggttgatggaaatagatgggcagaaacttttgacgggcccaatgaatgattaacagcagaaataaagcagcactgtttacctaagctccttcctctttgctagtcctcattcttcgtaacatgtcgcaatcgtttattttctcctctgccaaccatttcccctaagtggaaaggtaatttgaatttgaagccagaattcttttttcttttcataaacacataagggttatggcaagacacagtccagctagcctggaaaccttggatactgcgaggttcagagagcctccgcaaaaatgatccactttccatgacactaggtccagtatgctttcctggagtttgaaaactgatattcttgcccagagctcgtctctatcccaccccaaggaattacaaaaggtggggaatttatcaaacatgcattgggtttccactatgtgctgagttatctagaacgtatttggagttcagcaaatgttaactgctactacatgtcaggcaccagagggcctccaaaaattgatctatccagtgcgctcagaagaacgcaatgaaggaccggccatgtttcctctcgcatagatctaaaaagaccacaagcacttacatagtccaattaagctactaatcctcaaggttaagatttgtgtgctcagaagattgctattaaaaggcaattctttctgagaacttcactttttctgtaataaatactgaaagtcccagaagagtttcagaaaaggaactaaactacaacaggttgagttaatcaaggaagtttctacagaagatgtgagatttggataaaaggtagaaattattagataaaagtggtaaggatattagatgtaaagaaaccatgcgctaggtcaccaaggtgagacactgatttgaccagaatgaagatagaggaggattccagattgcacagtcttgagactaaattggaagaaatatcacctttaaagctgctatttctttaaagtaccgttttccaatgtattgaagtcctttcgtttactttccacagtgactcttgcagatttttctctccaggtcaccaaattgtcacattccctctcagcagatgctcttacctcctactttactaaaaatcattctaccttagcttcatcaatgtcaaattttccctcctattcactcctcattccgaggagaattgtttcttcttttcctgcctcattttcaatgcatctctcatcctgaaatgtcccttcaattttgccaatacctcaaattccacctttcttctttagtgtgatgctgaacttctcaaaggtgtgacttgttctacctgcctgttctttctcattcatcactccacctgttgctttcccatctggcttctaccactcttctactgacatgtctctctgaggcacgcccttaggtccaagtccaaaatatctttaattcatttcttaggatctgtctgcagcctttgtcactgctgatcatttcctttctgaaactctcttctcctttggcttccatgacactaaacttacctgattcccttaacttaactaatttctctttcttagttactgttaccttctcttcctccttctcattcctaaatatagatatatctcaggctcttctttttttaaaaaaattatcttcgcaattttaatgatcttgccttctgtcacagctttaactattaccagtaagaagactagccagcactacattattatttctgattactctccgaaactcaagacttactttcttaggttttgttttttttttccccccactggacatcttgcaagcacttcaccctcagcacatccaaagaggaatttctcatttccggccaacaagcttcactttctgaccccagctttttctgacctctggttctcgggaataaaatttcagattcacttttgaactcttcctctccctcacccttcaatgtttgattagttgacaggttgtt

SEQ ID NO: 300 - DNA, 4001 bp, Homo sapiens
aaatatacacttacttagcattttttattttgttgtgctttttcccatggcatggaaaaaaacaggagagaatgcacagggatatatgagtttggttatatgaatgaaggataataatatcggtgtgctctactctaggtatacaagagaactaatgcaactattctttaaaaaataatagtaataaataggatatggattaattattccccatctccacagaggataccagaaatgagttttgtgaccttgagcaagtcagctggatctcaattatcacattggtaaactgagaatacaaactattcccagttcaaaagttatatgataggtgaaataaaatgatacaatgcacttacttcaaaataataaagaggatatacatgaaacaagattatcatgtgtggataattgatgaaattatgtgatgagtctatatgagtgaatttgactcttctgtcgtttgtatacattttaaattttccataacataaacatttttaaagcaatataaggttaaacaaattatagcaaaaaaaaattagttctaatatctggaagaaattatttctttcccatagagggaattgattctgttaattcaactgaattaatactgatcaagatctgatcatagagcttccaagagaagctcctccactggagtgctttaaaagaggtctcctagaaattgagaatttttgttttcttataaagttttaccacagcctataggaagtaggatgtgaaggagtaaaacaggatatcaatatgggcaaagatacagaaagatctaacttacagcggcactcagtagtggtgttatcccactccttagaggcattgcaaaaaagggtcttctttcctaccaggtggtagcccttgatacaaacgtaagtccccagaatctgtccttccacctcctttgcgacaaatatgctattgtccactggaggaagctctggacagtgctctgctggaagaaaaaagaaaacagattcacttggcatatcatgtgctgtcagagaacccttattagatttccccattctcatgtctttttgctggattattgatcctgattcctgtgctcttcccaagtactctgtattctactcccaagtagccgggactacaggcacccgccaccacgcccagctaattttttgtattttcagcagagacggggtttcactgtcttagccaggatggtctcgatctcttgacctcgtgatccgcccacctcggcctctcaaagtgccgggattacaggcttgagccgctgcgcccggccggaattccgaagttttattttcaaaagtataacaggaattttactcaaattcaaccacaagttgtccacttctaaacaaatagtcccctacacaaatagcgatcctggagtttataacaagtaagacctcccaggattttgaaattggtactctttttgctcccagaacagaaagggaaagtaaaaaaacagtaaccacccacttcagagatcagggttatcattaaatgtacactaagctcctattgagtgcagagcattaggccaatttgagatttttcaatagaagaataaagatattataaatgtaaacttccttaaagccctagacagagttcctcaaaacaccgcaaaaggacaccaaatgcctgtaagctgagttgaaggaaagcatacgtaccatctgaagcagaaactcgccacgcaaccataagacagcacgcacaccaaaaaaacatctggtgatcaaagtcctctccccaggctggaattcacccagctcagacacctggtttgaaaaaaaatagatcttctaacactgcttaagaccaacctaaccacctcctctctagagaagaggttatattgatttaccctccctggagaaaatgaaaagaaaaaatcttacgacaggaaatcagaacagctgtaaggaagctggtatagggaggaactgcaaaaatacaaagggatggtaaaagagttgccaggtttaaaactcagtttcagaaatttcctggtttctgggaatgcaaatccagttgaccagtctttttgaaacgcaggcttatccttccccaacaaacatgggccaaatggtcttgccatgaccttgacttctgtcaatagttgccaatgtttacagtccaacttctgtaactctggccagcactggggaaagagaacgggctgtcaatccctggttcttgcccaggtagaacacaattttgaatgctacctcatcctcctttcctgaataccagatatcctaaggctgtaagcagcactgaagacgaaagctcaaggaagtaaactaaccttacctgtctctgtccctccagagttagggcttcccagcaaggaactggtcttaactgactccaaagctgagagctccaaagtcctgcagtgacacattgttctcgcttgccaggcctgtacccaggcttcctactttgtggctcttccagggacaggatttggcctgagtccagagttaaccaaatgagtaaagagagaggtgaggagaatgctttggtctcaggaattaaggcatgtaaaattgttttgagggatcccatatcatcttgcttgtgactactataacccttggttggttctctgtgctgtaattatgaaactggggaaaaattcctacaaaatttcaggttttaatagaataataaagcattaaggacacagtaaggttgcaaatgttcttctcttctccatccattactactgtttgtgatgattaatctatgtctttctcctgaaaggaatcaggatatgccacccccaaatatttggcgttaagattcttttaagctgaagatatttgagattcagtgatatggaaaggaacagagattttgggggctttccttatctgactaaaggcagcaaccttggagataaggttgccataaattccttttcagggtaggtctatcctggaggggagagcatgagtaaaacatatttcaaattccttctccagagaaatttcatggccttgaaggagacagaaagaacactcgtacttatatacacaaacattatcacaaaactttctaatttcctacttttcccctgaaaacccacttgcctttccaaaaaataatctgttttcttttttgtttgagatggtgtcttggcatgatcttggctcactgcaacctccacctgccaggttcaggccattcttgtgcctcagtctcccgagtagctgagattacaggcatgcgctaccacgcctggctaatttttgtatttttagtagagatggggtttcaccatgttggccaaactggtcttgaactcctgacctcaaatgatccacccgccttggcctcccaaagtgctgggattataggcatgagccaccgcacccggccaataatctgttttcttgtaagtgcctttcttctccccaccttcacctattaagatgatgtataagccccaattctaaccaactttttgaattacttatcactgagttttcccacatgtactcaagttacatgtataaatagaattttctctcctgttaatctgtcttagtctaatttgcaggtcccagccactgaatacaatatggtagaggaaaggtgtttttttcctcccctttattcccacaggaaactgctaactccaggacagggtttgtgtctgatttgtatttgtattcccttccacggtgcttcatattgcaaagcagttgtctgttaaatgaatgaaagtaatgcagaaataaatgaaaaaaactgtcatccagaaactctaccacagcccccaaaatccatatgatcacttgccatttatcacatgctgccttatgattttttatgtcttatcttttcttaactaatatgcaaattcctatagtgtaagcaccctctaagacatgattttcaaaaagttaaaaatatgacacaagtaaatataagatgaatatatatcaaagatttaattcaactcatta

SEQ ID NO: 301 - DNA, 4001 bp, Homo sapiens
ccatggcatggaaaaaaacaggagagaatgcacagggatatatgagtttggttatatgaatgaaggataataatatcggtgtgctctactctaggtatacaagagaactaatgcaactattctttaaaaaataatagtaataaataggatatggattaattattccccatctccacagaggataccagaaatgagttttgtgaccttgagcaagtcagctggatctcaattatcacattggtaaactgagaatacaaactattcccagttcaaaagttatatgataggtgaaataaaatgatacaatgcacttacttcaaaataataaagaggatatacatgaaacaagattatcatgtgtggataattgatgaaattatgtgatgagtctatatgagtgaatttgactcttctgtcgtttgtatacattttaaattttccataacataaacatttttaaagcaatataaggttaaacaaattatagcaaaaaaaaattagttctaatatctggaagaaattatttctttcccatagagggaattgattctgttaattcaactgaattaatactgatcaagatctgatcatagagcttccaagagaagctcctccactggagtgctttaaaagaggtctcctagaaattgagaatttttgttttcttataaagttttaccacagcctataggaagtaggatgtgaaggagtaaaacaggatatcaatatgggcaaagatacagaaagatctaacttacagcggcactcagtagtggtgttatcccactccttagaggcattgcaaaaaagggtcttctttcctaccaggtggtagcccttgatacaaacgtaagtccccagaatctgtccttccacctcctttgcgacaaatatgctattgtccactggaggaagctctggacagtgctctgctggaagaaaaaagaaaacagattcacttggcatatcatgtgctgtcagagaacccttattagatttccccattctcatgtctttttgctggattattgatcctgattcctgtgctcttcccaagtactctgtattctactcccaagtagccgggactacaggcacccgccaccacgcccagctaattttttgtattttcagcagagacggggtttcactgtcttagccaggatggtctcgatctcttgacctcgtgatccgcccacctcggcctctcaaagtgccgggattacaggcttgagccgctgcgcccggccggaattccgaagttttattttcaaaagtataacaggaattttactcaaattcaaccacaagttgtccacttctaaacaaatagtcccctacacaaatagcgatcctggagtttataacaagtaagacctcccaggattttgaaattggtactctttttgctcccagaacagaaagggaaagtaaaaaaacagtaaccacccacttcagagatcagggttatcattaaatgtacactaagctcctattgagtgcagagcattaggccaatttgagatttttcaatagaagaataaagatattataaatgtaaacttccttaaagccctagacagagttcctcaaaacaccgcaaaaggacaccaaatgcctgtaagctgagttgaaggaaagcatacgtaccatctgaagcagaaactcgccacgcaaccataagacagcacgcacaccaaaaaaacatctggtgatcaaagtcctctccccaggctggaattcacccagctcagacacctggtttgaaaaaaaatagatcttctaacactgcttaagaccaacctaaccacctcctctctagagaagaggttatattgatttaccctccctggagaaaatgaaaagaaaaaatcttacgacaggaaatcagaacagctgtaaggaagctggtatagggaggaactgcaaaaatacaaagggatggtaaaagagttgccaggtttaaaactcagtttcagaaatttcctggtttctgggaatgcaaatccagttgaccagtctttttgaaacgcaggcttatccttccccaacaaacatgggccaaatggtcttgccatgaccttgacttctgtcaatagttgccaatgtttacagtccaacttctgtaactctggccagcactggggaaagagaacgggctgtcaatccctggttcttgcccaggtagaacacaattttgaatgctacctcatcctcctttcctgaataccagatatcctaaggctgtaagcagcactgaagacgaaagctcaaggaagtaaactaaccttacctgtctctgtccctccagagttagggcttcccagcaaggaactggtcttaactgactccaaagctgagagctccaaagtcctgcagtgacacattgttctcgcttgccaggcctgtacccaggcttcctactttgtggctcttccagggacaggatttggcctgagtccagagttaaccaaatgagtaaagagagaggtgaggagaatgctttggtctcaggaattaaggcatgtaaaattgttttgagggatcccatatcatcttgcttgtgactactataacccttggttggttctctgtgctgtaattatgaaactggggaaaaattcctacaaaatttcaggttttaatagaataataaagcattaaggacacagtaaggttgcaaatgttcttctcttctccatccattactactgtttgtgatgattaatctatgtctttctcctgaaaggaatcaggatatgccacccccaaatatttggcgttaagattcttttaagctgaagatatttgagattcagtgatatggaaaggaacagagattttgggggctttccttatctgactaaaggcagcaaccttggagataaggttgccataaattccttttcagggtaggtctatcctggaggggagagcatgagtaaaacatatttcaaattccttctccagagaaatttcatggccttgaaggagacagaaagaacactcgtacttatatacacaaacattatcacaaaactttctaatttcctacttttcccctgaaaacccacttgcctttccaaaaaataatctgttttcttttttgtttgagatggtgtcttggcatgatcttggctcactgcaacctccacctgccaggttcaggccattcttgtgcctcagtctcccgagtagctgagattacaggcatgcgctaccacgcctggctaatttttgtatttttagtagagatggggtttcaccatgttggccaaactggtcttgaactcctgacctcaaatgatccacccgccttggcctcccaaagtgctgggattataggcatgagccaccgcacccggccaataatctgttttcttgtaagtgcctttcttctccccaccttcacctattaagatgatgtataagccccaattctaaccaactttttgaattacttatcactgagttttcccacatgtactcaagttacatgtataaatagaattttctctcctgttaatctgtcttagtctaatttgcaggtcccagccactgaatacaatatggtagaggaaaggtgtttttttcctcccctttattcccacaggaaactgctaactccaggacagggtttgtgtctgatttgtatttgtattcccttccacggtgcttcatattgcaaagcagttgtctgttaaatgaatgaaagtaatgcagaaataaatgaaaaaaactgtcatccagaaactctaccacagcccccaaaatccatatgatcacttgccatttatcacatgctgccttatgattttttatgtcttatcttttcttaactaatatgcaaattcctatagtgtaagcaccctctaagacatgattttcaaaaagttaaaaatatgacacaagtaaatataagatgaatatatatcaaagatttaattcaactcattaattaatgaggaaacattcagatgctacaactggttcaaagaaga

SEQ ID NO: 302 - DNA, 4001 bp, Homo sapiens
gaaattatgtgatgagtctatatgagtgaatttgactcttctgtcgtttgtatacattttaaattttccataacataaacatttttaaagcaatataaggttaaacaaattatagcaaaaaaaaattagttctaatatctggaagaaattatttctttcccatagagggaattgattctgttaattcaactgaattaatactgatcaagatctgatcatagagcttccaagagaagctcctccactggagtgctttaaaagaggtctcctagaaattgagaatttttgttttcttataaagttttaccacagcctataggaagtaggatgtgaaggagtaaaacaggatatcaatatgggcaaagatacagaaagatctaacttacagcggcactcagtagtggtgttatcccactccttagaggcattgcaaaaaagggtcttctttcctaccaggtggtagcccttgatacaaacgtaagtccccagaatctgtccttccacctcctttgcgacaaatatgctattgtccactggaggaagctctggacagtgctctgctggaagaaaaaagaaaacagattcacttggcatatcatgtgctgtcagagaacccttattagatttccccattctcatgtctttttgctggattattgatcctgattcctgtgctcttcccaagtactctgtattctactcccaagtagccgggactacaggcacccgccaccacgcccagctaattttttgtattttcagcagagacggggtttcactgtcttagccaggatggtctcgatctcttgacctcgtgatccgcccacctcggcctctcaaagtgccgggattacaggcttgagccgctgcgcccggccggaattccgaagttttattttcaaaagtataacaggaattttactcaaattcaaccacaagttgtccacttctaaacaaatagtcccctacacaaatagcgatcctggagtttataacaagtaagacctcccaggattttgaaattggtactctttttgctcccagaacagaaagggaaagtaaaaaaacagtaaccacccacttcagagatcagggttatcattaaatgtacactaagctcctattgagtgcagagcattaggccaatttgagatttttcaatagaagaataaagatattataaatgtaaacttccttaaagccctagacagagttcctcaaaacaccgcaaaaggacaccaaatgcctgtaagctgagttgaaggaaagcatacgtaccatctgaagcagaaactcgccacgcaaccataagacagcacgcacaccaaaaaaacatctggtgatcaaagtcctctccccaggctggaattcacccagctcagacacctggtttgaaaaaaaatagatcttctaacactgcttaagaccaacctaaccacctcctctctagagaagaggttatattgatttaccctccctggagaaaatgaaaagaaaaaatcttacgacaggaaatcagaacagctgtaaggaagctggtatagggaggaactgcaaaaatacaaagggatggtaaaagagttgccaggtttaaaactcagtttcagaaatttcctggtttctgggaatgcaaatccagttgaccagtctttttgaaacgcaggcttatccttccccaacaaacatgggccaaatggtcttgccatgaccttgacttctgtcaatagttgccaatgtttacagtccaacttctgtaactctggccagcactggggaaagagaacgggctgtcaatccctggttcttgcccaggtagaacacaattttgaatgctacctcatcctcctttcctgaataccagatatcctaaggctgtaagcagcactgaagacgaaagctcaaggaagtaaactaaccttacctgtctctgtccctccagagttagggcttcccagcaaggaactggtcttaactgactccaaagctgagagctccaaagtcctgcagtgacacattgttctcgcttgccaggcctgtacccaggcttcctactttgtggctcttccagggacaggatttggcctgagtccagagttaaccaaatgagtaaagagagaggtgaggagaatgctttggtctcaggaattaaggcatgtaaaattgttttgagggatcccatatcatcttgcttgtgactactataacccttggttggttctctgtgctgtaattatgaaactggggaaaaattcctacaaaatttcaggttttaatagaataataaagcattaaggacacagtaaggttgcaaatgttcttctcttctccatccattactactgtttgtgatgattaatctatgtctttctcctgaaaggaatcaggatatgccacccccaaatatttggcgttaagattcttttaagctgaagatatttgagattcagtgatatggaaaggaacagagattttgggggctttccttatctgactaaaggcagcaaccttggagataaggttgccataaattccttttcagggtaggtctatcctggaggggagagcatgagtaaaacatatttcaaattccttctccagagaaatttcatggccttgaaggagacagaaagaacactcgtacttatatacacaaacattatcacaaaactttctaatttcctacttttcccctgaaaacccacttgcctttccaaaaaataatctgttttcttttttgtttgagatggtgtcttggcatgatcttggctcactgcaacctccacctgccaggttcaggccattcttgtgcctcagtctcccgagtagctgagattacaggcatgcgctaccacgcctggctaatttttgtatttttagtagagatggggtttcaccatgttggccaaactggtcttgaactcctgacctcaaatgatccacccgccttggcctcccaaagtgctgggattataggcatgagccaccgcacccggccaataatctgttttcttgtaagtgcctttcttctccccaccttcacctattaagatgatgtataagccccaattctaaccaactttttgaattacttatcactgagttttcccacatgtactcaagttacatgtataaatagaattttctctcctgttaatctgtcttagtctaatttgcaggtcccagccactgaatacaatatggtagaggaaaggtgtttttttcctcccctttattcccacaggaaactgctaactccaggacagggtttgtgtctgatttgtatttgtattcccttccacggtgcttcatattgcaaagcagttgtctgttaaatgaatgaaagtaatgcagaaataaatgaaaaaaactgtcatccagaaactctaccacagcccccaaaatccatatgatcacttgccatttatcacatgctgccttatgattttttatgtcttatcttttcttaactaatatgcaaattcctatagtgtaagcaccctctaagacatgattttcaaaaagttaaaaatatgacacaagtaaatataagatgaatatatatcaaagatttaattcaactcattaattaatgaggaaacattcagatgctacaactggttcaaagaagaatttgaggaataggaatgcatatagtcagtcagtcaaaagcattctgaagtgacctttccaatagatacaaaactggttaatatcctacagagtaacaaactgtaatatttgcaattagcttttctacctggtggaaagtaattaaaacaaaatggacaaaatatatttgctctactataaccaggaatcatttgcattgttctcagataagagtcatttgcattcctataaatttactgcaaattaacctctatgcttaaagagttctaaaagaactttaaataaagtcagtcagagatcatctccagagggcctgctagaaaatgcccaggaatccattgagcatttactccagtgatctctttttgcta

SEQ ID NO: 303 - DNA, 4001 bp, Homo sapiens
taggctgaagattataacttccttccatcaccattgttttaaaatgtttttctcaacaaatttttaagattttataataagcaaatgttaaacatgaacttataaaataaatgtgtaccattaaaatgtaaaactatataatatgttttcaatgttagggttcatgtgaaattttattttgcagggaaaaagagtgctattacttaaaaataaagtttaaaatctctgactgatcagaaagatccatgccaattggcatattataaatttgttttgtctgattattgtcaaccatcaagggaatggaaataccaaaaaataacaataacaatcacacagcagcactggtgacagctttcactgaatgattactaggtaataggtaacaggtattgatctaagtactttcatgcatttaatttttgttcttactttcctcccattgtacaggtaaggaaaatgaagcttggaaaaattaaataacttgcctgagatcagacagctagtgaatgtcagtgccagaatttgaacctaataaaatcatttcaccatgtagtttttcactttcaaagtcagtgtcagacacactggcattagatacaaagacctcatgatttcctccttcagcactttgtaaagtatttaattggttccattttgccttgacttgaaatttgccccttcactggtctgtcttgtttgataagttcatcaaacatcaagactctttgttcattttcaaaaaggattacaatgataagcttttataattaagaatatctcggcggagatttcctttacacagttctcttgcctttatcttctaattattacagatgaattttctgatttcaaaattgtatttcctttaaatacaagttacaaattaactgcttttaaaaatgctttcctcccttctgaactgttacttaaaggaattctcacttgctctagcatttaaaagcactaatgattcaaaattgcatcatctatcaagaattagaattaaataattctatttaaaatctttaatgtttgggagacagggattgctttaaagctatcccgaaggtgaaataaaggactgcttaggctccacaaaatacttaatattaagataccaaaaaaaaaaaacccatgaagcaagcttggaaatctcaagaaaatagaatgggtaaaacacaatgtacatatgaaactacatcacctccctctattatcccatagcaaaagataaagtcatttttagaatcaaatgacccagcatctctatagtcctttgccttccccacagtgattttgaacacattatctaattttatcctcccccaaaactatgagacagcactcttatgatgctcttttacagataagaaagtaggggttaagttaactgttcagcaccactcaggagaactgtcatttattaagtgtctactataagctgagtacattttatattcaggatcttattttatctacattaactcttatagaagaggtattattattctcattttacagctagggaaactaaggatcaaaccgatgagatgatttaccctgaattattcagcttctaagcattagagctgtgatttacacatagaccaatttgactccaagtgcacggtcttttcactgtcccatcctcctccacaggagtagtaataacatgaaaagaggttattttccattctaacacagcctctgctgcaaacataaaagtgtcttagttccccagcaggtgattcctacgtgcaagttttgcagagacatatggcccacttactggttcaccttctcctgtgcagttaccccaggctgacaagtcatcaaagacaagatgaagaaaacaacagcaaacatctcagccagaagccaccgcactatattaccttgaaggaataaagctatctattcaggaaattggagtaaaagatgtctacaggctgggacctgtaagatctatctgatgttggaaactcacccagatacacattgatttgcacagaactcacttgattctctttcaaatatggttaaatagtaaccagggtattgattacctaaatactctaaaagtgttccaggcaccaaaggccactgccctttagaccttttgaaaaacaatatccgtgtggttaaggaaaggaagatatttaactaataccagcttagcaaagaggtcttattttcaaaaggaggcaaaaaccaaaccaagatgcagttctagaattcctggtctttttcagtgtctcttggaacttctgaggtcagatcaatctattttgcaagactgaaacaaggctaatattggtatatcaactcagacataaagcactcagaaaaatgtaggaaatgctaaccattacatgaaggttctactgtacgttgccaaacatctaaatcctgaaatatatgtgtaattcaatggactttccacttttcatacagacattgggcatcattgagatccagggtatctgtttattgagggggccaaatgtcttaaatagacatctccagaagcactctctagaattataatgtcaataaaaccacacatcaggactaatggtgccatacctgcctaaaatctcttactcttcaagacataaattaaattaaattgagatggatggatagataggtaggtaaatacatagatgatggatagatacacagacaataatttaatggctactatgtggcaggcatttcatatgtcttatttaattttcatagcagggatatgagatggaaattattaattccatttagatggaattaatgaagatgaagaaatggaggcccagagaaagtaactaacttgcccaaggttgtatagctgtctcaatatccttgggaatatttagattctctcattagcaggactgtccagtagtatcattactgatctcaaagttaggagaaattttaatgaatgacttgtatgcttaagaaaatgtgtttctgatttaaatgcggagatttttttaaaggcaccaaattgttatcatctcccttttctcagagattttggtaaacttgacagaagtaaatgtggattctgggtcctgggaagtccccggagcctgtgatttctgtgtctctctttctcctacctcttttcattttgactccttggtcctcttggcctcagttctaccctactttgaaaaccacactttctgtttgctccacaatattccagcgtgactagcatttcattttgctttcactgaagatatggaggacaatggagggtattctatctggacaccctggggccagttcaggatggcacatctggaggccacctctttctaccaacttccatcctttctcatccgtagtcaaagttcctgaaacagatccacagagccccctgggaagtgtagctcaagttcccccactcctcccacagcttttctcatgaggagacaacctccgctacaacagtgtcctccactgggggtgattttgccctcaggggatatttggcaatgttcagagatatttatgttatcacaacttggggagttgtgctactggcacctagtgcgtaaaggccagggatgctgccacacatcctacagtgcccaggacaaaaaattgtctggcccaaaatatcaagagtacctaggctgggaaacactgccccacagaaaaactggtctgccttcccctgatccctgaaataaaagcaatcgggtcttccttcttaaagcagctccttctctaaatgtctctgatgtcttttctccttacccaagccctcaatggctttaggactcttccttaacctttatcacctctcccaccccacccccagcacggtcccttataccccaccatattcctctgtaatattttcctgccaagcttctctccttcatcctcactgtctttgatccatatcagggcctcatctctctgtaactctcattacccactcctagtgggcctccacttctcacttcaaccctccctctcta

SEQ ID NO: 304 - DNA, 4001 bp, Homo sapiens
gagagattacacccacctcatgatgttgtagtgacaattaaatacaatttctcagactgcactctaatcaacaatttgcccctccactccctacctcagagtgaacttcctaatatatatatttgatcgtgtcactcctttgcttcaactcttcaatggcttcccaatgcattgtggtgaggatatagttcaagttccttagctggtactccagcatcccccaactctgcccatgacatgatgcctgttcactcctactctatctcatccctctcaacttcctgccgggacctgtgttcaaggcccactgaggtgtctggaagcttcaggagcaagccagctctctcacactcacgcaccgttgcctgtgctgctccctctacctggcacacctttcaaccccttagccattcggcaaacacccacgcacctgtagagattcagccctcacactctctgttctagaagcctttccaggccctatgccctgtagagctgatcattccctccttgtttcctggctgccccgtagcatcttttgtaacggtacacatagcatatgctcacatgttggcattctttgtgagaacataggctcatctctgtatcctcagagcccaacagaaagctccacccaggggcacaatgctatagatagggttgctatggttcccttaagtcctccattccggagacattttcttgggtcctgaatgcttctctgtgtacacacagtacacacaaggaaggtcttggcagcttagttattctctgggctaaatggagtttcttgatcatcctaatagctgttacttattgagtggccaatagatagtgaacgaatgctcatcatcctgtggttcctaatggcagctcaacagaactgagaccagaggctgtgtcccatgggtaggaggtactcctcacataaagtgaaaggtttgttcagatctcatttttggactaagtaaaaggaatggaattacagtccctcttcccacaggagtgtttacatggaggccggggacacatgcacacttcaacatctcatggcaggggtttctcatgcacacggagcatccccacattgctacgtcactggctcttctatcactggagcccaagtttgagctcccactaggatattttctttagcttgttttgcaccttgttaatggagactaacaatgatgaaataaatcagccagcatttaactgctgggaaccttgtggggggtgagagagagagagagagagagtgtgtgtgtgtgtgtgtgtgtgtgtaagaagggggtgggaaagaacctgagaatctgaagatttggggttgatgagcaggtagagtaggtcaatctcatttattaaaatcatttcatgaatttgctcttttgtcctctgtatgtaacaaactttctttttcataaagaatcacacggaggctttgttcagaatacagaaaaaatatcctattcttctcagcatgacaaaatacatttaaacctgtcagtttcttacaggaacttttgttgaaatcagctacttggttccacaataatttgaaaagagttgttgatagtatgttatcagatgcatgcaaattgccttaagagacgttcctcattcaataggcatgcaacaaagagatggtcagcatcatgtggctgcaccttccctgtcatattattgatcagggaattattggtaactgtcacttacctggagccaggcaaactgagacagcccagggcagcacagagaagaaatagctccaccggcgccctccaagcccatgtcctggaattcttcattttcccaatgtgacaggagatgccacagaggctgctagacccataacaagcctgtgctgtgagtgccactgtcagcttctgtccccaagagcaaatagctctgcaaagtaaacagaaagccactagtgactggaaacagactttgcacagaccaaaaacttacctgtcactctggaaaccaaccagaataatgaaaaatctgtagcagcatggtgtttattcctctgtaactttagggtaagctgccaagtggacaggctattagtgaggtggcaaggactgtgggatctaggtctagacagcctgggttcaagtacattctctgccactgactaggttggtgcaaaagtaattgcagtttttgtcattgcttttaatggcaaaaaccacaattacttttgcaccaacctaacagctttggactatgggcaagttgctttacttctgtgccttactctccttacttgctaagtggtgagaattaaacacgttaatataaggaaatgtttagaacaggcctatgttcagcgctcagatatgtcagctattattacttagtagaattcagggtttggagtcagacaggccaaggtttgaattccatgtttgcctctttccagttacatgatgttgagcaagtcagtaagaggctgtagggctctagaacccatctacctgacttcaaattgcttctgtatgattcaccagctgtgtggccagagaaaattactaaccctctctgggcctaagttccttcatcaataaaacagggataataataataccaacctcaccgggttgttgtgaagattaaataaattagattattattaattattattgtaattataattaattataattattattattaaataaattagatttatttaatcttcacaacatgttcaaaacatgttgaacattgcctggcacattctatgtgcactctctataagtgagctggtatttttattgactgtctctgattctgtttcttcatatgtaaaattaggaggactatgacaacttaccactcacagttgggagagtcagaccaaatactaaatgtgtaattgttgaacaaataggcattatagaaataactacatgacactttgggaggccgcggcgggcggaccacgaggtcaggaaatcgagaccatcctggctaacatggtgaaaccccgtctctaccaaaaatacaaaaaaaattagccaggcatggtgttgggcgcctgtagtcccagctactcgggaggctgaggcaggagaatggcgtgaacctgggaggcagagcttgcagtgagccgagatcgcgccactgcactccagcctgggtgacagagcgagactccgtctcaaaataaaacaaaacaaaacaaaacaaaaaaaacccaggaaataactacatgaaaataattatctaaatatatatgtgctgttgttgttattgtttgcatcccaaaagatacaaatgactgaggttctcaaacctaccttcctgaaaaccatccctgactccccagaatcaacatattaaagtccaaactgcaccaacctggcatttacaaaaccaacctgcaacgcataaagggctgagtccacgtgttggatggcgtcctgttgcttttgctattgcagatgtgggtgaggaacctcacatgggagaggcagcttgcaaggtatgagggtgggctagtagaaagaacactggatttgctttccttaaacacagttacagagtttctctaagactctgttttctcatctgtgaaatagggataataattcattactacctacttgataagtttgttttgggtttgaacgtacaaaacgggaagcctccccctcctgccacccctgccgagtagctgggttggggttggagaatcaaataaggaagtatagtgaggggatggatgggaaagccacagaagatggtagtcctctcacattaattgtgtccaaaacacagaacacaagttctgctgccagaccacccaggatgcattccagttgtcataagcctaggtgcaagactccatgtcaccgttgtcccaaaggatgaattgacctgaactttgacgcaattgattgtggtggttaatcatttgtaaacaagcagaaacttgtgtttcaagaaagatccatgtcctgtctcctatctgcctgcctttaagagaagcc

SEQ ID NO: 305 - DNA, 4001 bp, Homo sapiens
gccaagtcaatctaacacttagaagattggggtgggtggggtgagggtgtgggcagagggttggaaggatagggactagaaagcggggaggagaaaggagtttagagtgtgtgtgtgttggggggtgctactgaggggagaaggggagattattcctttgctttaaaaaattgcatgaataaagccactgagctgtaaactcatatgtaaattcttcttttctggtcccattagctctagaggaaactcctcatcaccaggaggctctgctccctacattctgagatggttagggaagggtgggagtcagggcagggtctactctagattgagggtggtgggtgggcacaggcagccaggctggcagggacaggatgaaagtgaagcattgtgtgtagagaagagagctgccagctgggtcacatgccaggctctcgtgcagtcctgtctgacgcaaaggctgagggtctgcaggtccagcccctccctacggccaaactgcctcaagaagaaaacgaaggccttcatggtttatgctgcaatattcatactactagaaactctggagaaaaatcctaaattccttcctctctctgtctcttattcccttaaattcctcaaacttgtgagatgtcctgctcttatccttgacctattctgctagcccaagggagagctggaggcagcctctcattttaccatatctgtgggaccccccaacaactcaaactccctggtctgtaaaggtgcctgtccactctggtcagagcctcaacacacttattctgtctcttcctcctctttccctctttttttctttctcctcagatgagatttgtgactctccatttggctgcctgcctgcccccatcctctctgcatttgccttctgctctctggacacccacctcaccctgctctttccacaaacctcagttacacacctagtatgtgctggacactgtgctaggcacaggaaacacaaaaatgaggtctaggagttcctggggacactcctggagcgcttcagcctgttctcccaagaatccctcctcatctcctgggagctcctgaaagtcctttgtaaactgtaaaatgtcaaacaaatgttgactcttactgccactttcagaggataactggggagttagtcgctccacagaatgaagagggaatcttggccaaaaggggatgaattggagatcagggtctgagttgggcaggaagtattcttccccctacccccatctatccatctttttactccaggcctctttgactccctatttggaggagtttgtaaataaagaagtccaggagtcctgcctgggaccagggcagtgggggaaagagctctggagaaaatctgtagcctgcaaagagattccagcacttgcatgtgtacacactctgcctgcctgccgctagttctccccgacctccaataacaacaaggctggagagacaaaaggtaaagaagggaagtggtctcctccacaccccactcttttttcctcatctctgagcctattattccagcctctaggcttcctttcacacctctcctccccccattaagcacacctggcgacatgtgaacatcagcacaaatccacacacagacatttagttgtacctacccccatctgcagccaggatccaaatcacctccagcaggagggcggagaacaacatagtgtcccaggaaggggtgcaggggactgggaatttgaggactagaggactaggacaggcagagagagagggagggaggagtgagagagagagagagagagcgagcgagctcctggcgtgagtgtatttatctctgcttctcttgctgtctctgtctctgtgggcttccaggggattcggtgttcagtagggtatcatgggtttctggatccccaggacaaatctcttgctgcctctttgccctctctctttatctccctctgcagtctccactccactagctggccagcgactttacaactgcctcctgcttttaaggtggctctgaactggtgtatgtggggacgggggtgctgcctgggctgctggtgaacagctccttaaatagccaattaggcatgcaggatggccccactcggagctggagcgcggcaagtttcactggagccctggccctggctcaggagcccagctggggtgagctcttccttcctctgctagtcacacagatgctgtttagatgggtgttccctggagcaggcagggtcaaggaaggggctttggggttcaactcagccccctcaaaaggacactgtattttcatccccccgcctgatttctcctctgaggagcagctccctgggtggtatgcggcagatggtgggggtacctgttcccaattccctgcataatctgagctgccctggaatgggaagagtccagaattaggagatatataacaagaaggaattagggactcagggtgcaggggaggggtggaggaagtcaataactaaaacctgagttgtgtcctaagttctaaggaagagaagtgaggcaaggagaactcatctggagcaatctcttctgtgcctgccaccacccccttcccacggtgaggcctgggtccacgtgcctgtgtggcctggggtggggggagtgcggggagggagcgttgtttgctggataaagcccatttgtatgcccagtgggggaggggtgtagcagcaccatggagagacagcggctgtaactgccagacccagccacctccctctccagggagcccagatctagggcggcttttgtcactgaagaggacactgacctccggcagagaggccagggcaggaggaaaggagagactttaggaacaatcactaccaccatcagaaaaaggtggtttccagagaaagagaggggagggtctggagagaccatgtgatccagatggaagaggggctcagggtcttccttccagcccaacaaagggctgaggcaggacatgtggcactgaatgaaacctgccaccaaggagctgcgtccgtggagcatggaggctgcacgtctcaggaatgtgaactgatgtttgctccccacgggactggaaatcccgattggaatgtacatcctaaatccctcgttagagaatgtgaaacccacagatactttcaagccagacattgaaacctctttctcctccatgctcttcaccagaggcaccagccaggaggatgcacccatctgaagctccctctgccctccttgctcctgccgagtagcaataaatagccaaacaaagggagcagaagctaaataagggagcaggataaaagccaaatgaacagaataatgcatgtgctggatcatcagctcctgcagagacaggagctcactgtgcctttctatcccctgtgattgatctgcaaagccaagccattttgctgatgtcatttccctttttcttctcctatcaccctctgagttatttgtccccttcaggaaagttttatgttttgaggttccccaaagccccatccatcccatctaagaagagtaaaagacttgaagtataaattagatttcccgggaatcagggtacttaacacaaagaaacaaaaaaagaaagcagagacatcttggtatgaaagaagagatttagtaggaaagaagaggtctgaacagaatgacctctgccggaacagagttcccctggagcgctgagctgagattccgatttccaaggcagatagcgtgtcttgccaggcgccacctcctggctcgtctatgaatttttaaattttaatttaaaatgctttgtgtatgtggttccttctgggaggtatttcactgctgctgggctttgggattttgcctacgcaactgaacattgtttcacaaagatatcttagcctggaatcaacacttccctgatcttgggtgagcaacgcatccaggtgcttatgcttcccagacgacaaaggccctcctttctaggacagagggagccagaaggcgagcgccgt

SEQ ID NO: 306 - DNA, 4001 bp, Homo sapiens
ccctcaccgctttttggtttgtaatcaaggcaattggcctggagcacaacgccttctcagagcaagatgctttggcccagggcactgtcaatactggaacatctctcaggtttccctggaaggcatttacaaaagctactctcaagttctcctggagcccctagtagtttcccaggaagcccactgtctcagaggctgggcagagcctgggaaggacaaggacttcattgtctgaattctctcttccttcacctctgaaccacctgcctgcactgcttggccaagtgaagcagaatgccccaggcttccgaggcactgccatgtgtaagatcactgtcctcaggaacagagcggttgttcagagctggctggactttctgaacctcccaggatgtccctaattccgttgcccttgacttaacagatcatcccgttcaccctgaaggaatgcttccggagcagctgaactggggcagactctgcaggaagcagatgtttgtctcacttcctgcatcagccagcggccaccagcctcctcatgggccccaatccatggtcccgtatggaaagaagggggatgcgggaagaagctctcctcactgcccctggaaagggctgtttagtgtccacaaagtccacagacacggccttctagctttggctcacatgtggaccagaacccatgttgaatgccaggattttacatttcacattttaaaagtctggtttggggcctggcgcggtggctcacgcctgtaatcccagcactttgggaggctaaggtgggcggatcacttgaggtcagaagtttgagaacagcctggccaacgtggtaaaaccccatctccactaaaaatacaaaagttagccaggcatggtgatgagtgcctgtaatcccagctacttgggaggctaagacatgagaatcgcttgaaaccaggaggcagaggttgcagtaagccgagatggcaccactgaactccagcctgggcaacagagcaagactctgtctcaaaaaaaaaaaaaaaacaaaaaaaaaaacacctctcattttggcagcccacagatcaaagggaactgggtccttatgtcaagatgttctgggtaaactgcctaccatgaaatttccaagaaagaaggtctcgcaaaccccacagcaccttccgtgaggttaccgagagtcttttctaagaactttgttttccacttacacggaccaacaaagcaaatggttttacaaatagaagcagtgagtgtgcttttgaaccagccaacactgtggatggaaaaaaatttaaagcaaaaagcctgtaagtaaatcaggagtttgtgaaggggaaagctatttccttcttttccttatttgaagtttaagttcagcttattctccataccttctgagacactgaaaaggtaacatctgaagccacaatgagcagacccccaacatatggcaagtgggctgcctggccatcctgtgaaatgccctaaaggaggactcttggccgggcgcaatggctcatgcctgtaatcccagcactttgggagatgggcagatcacctaaggtcaggagttcgagaccagcctggacaacatggtgaaaccctgtctctactaaaaatacaaaaattagccaggcatggtggcaggcacctgtaatcccaggtactcgggaggctaaggcagcagaatcacttgaacccgggaggcggaggttgcagtgagccaacatcacactactgtactcaagcctgggcaacagagcaagactttgtctaaaaaaaaaaaaaagaagaagaagaagggcacttgtcctgttgtaagggtgtgagggtaactgggggagcatgcagaagctaggggctcacctgagtaggtccagtcagacacatgctgggcctggccacccagcaggaacagggacagcagaagcaccagggccctcatggtgctgcacatctgtaatgaagactgattccggcgaagctcttcttttaaaggctcagaaactgtaaataacaatttacaattgatctgcccagctggctaaaccaccctttgctgcacccactaaaacaataacaccctccccataacagcacttctggctccgtgcattgcgccaggcagccccagcacctgcctgatctcctcccacgtcaatttcatatccggtcagtccatgggtttggttgttcagtgtcttaggaacacctgaagagccacacagtgcagccattgtggacaggtgaccgcggaaatgggaaaaggcccaaggcagggagaagcaggatgaaagactttcctggacgtcggacttcccatgctctttctcctgacattagagatctggggactgctgatgggatcaccactgcctgcaaaccctgcccatctcagtcatggacacaagccaccgctgcagacatgtggctgccctcagccaggcatccagggaggtggcctggcctccatgtttggacatttcacggtcctctccttaaaccagtggttgatcctgggtcccagctcatgagccacattccaatgtgtgcctttatgccattcaagctggtgtgggcgtctgcatttctacatggatttgttctgacacctgcagggctcttgggcacacctaagccaatcagccaattgccctcgcaggatccatggattacctaatcctgtgtattcacttggctagacagtccctgaaattagctgaaggagaaacttttgagtttatgcctgctgacaggccagcatttcccatgcccttccacaaggtcaaacacaaagggtagccggagctcctgcgggggggctaccatgctgccggacacaaagggccacccctgccttgttatggggagctgaaccccctcctggcctagcttaactcattgtccacttggtcctggaatggcaaacgtcagcaggccttcacaacaaggatgttagcggtgaacgtaggcctcccgaatacttctaagactccccactgtcatttaatagggaacatcagctgctgcaaagaacttgctggaaacttccatttctaaagctcaagagctgaaagaatctcagagagagagcaaagcatgttcaaggacaaggattctgaaactagacaggatctgtgccacctgctaactgtgtgaccatgggcaactcagcgctctgtgcctcagctttccttccttttcttttttctctttctttcttcctttctctctttcttttctttctctctttctctctttctttcttttttgagacagggtctctctctgtcaccaggctggagtgcaatgatacgatttcagctcacttctcttggactcaagcaatcctcctgcctcagcttcccaagtagctgggaccacagtcgcatgccactacgccctgctaatttttgtactttttgtagatacaggttttcaccatgttgcttaggctggcctcaaactcctggactcaagcgattctcccgcctcgtgctcccaaagtgctgggattacaggcgtgagccgccgcacctggccgcctcctttctttaaaaggagttagtgatagcacctcctttgtggggattcggcaataaatgtgcctgcagtagttggagcagtgcctggtgtgtagcaaatggcattagcatctattcagacccctcattttataggaaaaggaagtgatttatcattgccacccagctggttagtgagggaactggaggaaaaatgcttcaatctccagcttatggaccatttctttgcaaaaatgagaaacctactcttctgtccttgctaaaccagtgacgcccacctgctgactcccagccctgcggaaagggccaccttgtaaatcacaaggccccacctctgctgaggagaccaagaccctttacaagcccaggcaggacccctgacatcaaactggcaggaaaacacaaactcagtcatctgaattttttcttgggaatctgaattgggagacccag

SEQ ID NO: 307 - DNA, 4001 bp, Homo sapiens
aatacagaaggagatgagacacattcatttttctactttaagatttaaagatgaggacatggaggccccaactttaaatgatttgcccaggcaacatactggtggtttgaactcaagtcttctgactcctaaaggtgtattttttccactaaatataacatttttgacaaatcaaaaagaagctattttctgtctgagctgaatttccattctcactctcagctcctgaaaacttattcttacttcttcctggctcgtgttcctaatacaacctgagtttccacattctctatctcctgggctgtctgcggattcctactccagttctcccattttcctgcccctgcttcttccctggaggctttagagcccatgctccacctctacctatgcaagatgttctttttacaccccagaaagtaaaataacaacaacatcaacacaagtaaaaaacatcacctttcatctcaacattaaccaggcagcccactagttcaactcaattggcatatgctgtggtctcaactgtggcctccaactcaaggacaaagcaaagatgggtagggcagtccctggccccaaggaatgtataacatagtggggcaggcagattggatacaaccaactataaggcaagactccagtaaggagtacaacagaggcacgaaagtagggtaaaaggaaccctttctagctgggagaaatgaggagaggttccggggaggtagctgtgatcctaaagtcagtctcctggtcctatcctaacacatcaagaacaaccttcaaagcatgatgtgtgaaacacatactaatttacgagtcatgaacttccaaggcctttttccttgggacctcaaaatattcacatctcacaagagatggtagagtttatcattaatctcgttttacagataagttgaaatccctacctaacaacagtcacaaaaacaactgaaaagcaaattcagctcctatctaccaaaggttttcaatcactttacaactataggttcctaactgttccaaaaaacatgctctaatgggggagctacttgaacgaagaacaggcaatttgatgtattacacagaaaaacgcaagtgaaaataccgaacagctttaactgtatttaaaacaattttctaggtactctttgaacatcttctctaaacacagtaagtaacgggcaagaacaaaaccgtgacacaagatacaccagatacttagcataagaatcacgtcctctgaatctttcttgacacatccacttaattccagctaggaaaaaaaacacgtattttctctcagtatacccactacaacctgcctggttttgactcctggctctgctgtcatgagcatgtggctctgagtcatttaatctctgtccctccataatcctcctctgcattaaaataacagtacttacctcattggtggttgggaagatcaaacaaagtaatacacataaactgtttggaacactgccagacacctagagagcattcaataggccgtcgttgagtgtggttgtgaggattacacaagataacgcaggtaagagtatttagcacttagcaagtgctcaataaatgatggttctatcacctgtctgcatccctgaagaactttggcctctctgaattttttatttctggagcccagcaaaacgccaagcacagcggcagtgcttattaaaagttcaatgaatgtgtggcaggtggcagtccagtctgacaggtgaagcccatcggcagttcctggtcggccttgctcgcacctggcacttaagaaggcgtgcagactgcaatgactgggcagttcctccacacaccatcggattttgcgtggggctaccatttcaaccttggttgaaaataaaatgcaggccaaggcaggcaggtagaagtggaagggatgtggaggtggcgacccggggtttgcagggcaagaggagttgaaggggcaggcgtggaagacaaaggggcagaacagcgaggggagagacaagcgggcggccggggacgaagcgggggacccggcggggcggggcggggcggggcggggcgaggccggggaacaaagagctgcctcgcgggccgcggggtcctggcgaccgggaggagggtcagggagaaggcagaccggggaaggagggcgcccggaaggcggggcggggcgcagccaagagggggaggggcggcggggtccagggggatggtcgggcgtggatggggtgcgcccagggagggggaagaggtggaggtgttggggttcgcccagggagggggaggaacggcggcatagggtgtgcccagggagggggaggggcggcggggcggggtgtgccccagaggagggggcggggcggggcgcggcccgggggcggggaggtcccttctggctacagcgattttatgcacctaatcaggctcctgagctgagggccttcgctgagccgctctccgaggcccaggaaagcccgcagcctccaagggtgcagcaggaggaatgtcccctcccctcccctcccctccagacctcgcagcatagtgacagttgcaagacgagcaataaggagacagccaccctgacagtaatgcctgtggctcccggggctgagcaggtaccagtacaggggctccccagaggctcttgactgccctcctgtatcttgttcctttccatctgcactggggatggtggccttgggaaaacaaaagcagttcctgcacggtcatccggagcttaaaattgggtggtggtataataaaaagttacctctatacctctagtttcacaccaagtgagataaagtttagaagaaatctgaactacatccagaaaataaatgttcttctgggtgaggaagaaaaaaattatttccagaaaaaagtttggaagtcttggtctcaaagactgctgttatcaatatcaaaatatcaattcatggaaatgaaaatataaacaaaaactatcaccatttcttgaacagccactgtgtgctcctggtgtacatcctcgcaccgtcttcacaatccattcaaacatctgatcagtgtctcaatcagataggcatagatagcactacactgccggctttgtaaaagggttgcagggaggtcccaggcctcatagaacttgcagtccacctcaaagtaggtacaatttgcaaaggaggggatttacaacaggtacgttgcccatgagtatgcccaggtcagtatatctttccattataccatagtggaagatatatttatttattcttcctaaatatagtagaatttcagtcttaacatctgtttctactcccttgcttaggaaagcaaaatgaaaccaagcagaggtacctatatacaaaatgaaagaattaaacccaacaggtaaatccaactaatggaaaactgacgagagaattctggtacacccaaaagagaaaggttgagacttgctagaaaattcattaagtcagagactgtgttcctcaagaaacagttctaatgcataccattaagttccagtgattaaatgttgtgtcacatttaagtaaaataggtgtcttctccttttaagacattttcagcagctgggtgcagtggctcatgcctgtaatcccagcactttgggaagacaaggcaggtgggatggtttgagcttaggagtttgagatcatcttgggcaacatggcaaaaccccatgtctgcaaaaaatacaaaaattagccaggcatggtagcacacgccagtagtcctagctacttgggagcctgaggtgggaggatcgctagagcccaggaggtgggggttacagtgagccataattgcaccactgcactccagccttggtgacagagtgagaccctgtctcaaaaaaataaaaatattttcaccttttcatgtgcatctccattgtgtccaccaggattacctttatattagaagaggtcagtgcttgtcctacatttccaaagtaggcagaatgacaagagctattatataag

SEQ ID NO: 308 - DNA, 4001 bp, Homo sapiens
acaaatcctacaagcagagtccacaactccaatatattaagtttcctttattaaaagaggtgcctcaatgcaaaaatacaattgtgctctgaatggaaatattcaccactgtttttttaatcctagttttctatcttttctaaaagtcacttcactcctaagaactcagcaataatcagaaatcagaaaatgcatatggaaaaaattgcaactgaatctgaacctgaaagatcggcatagttgaatgatgcatcttaaaagcttatctattattatgcaaatcaagaaaacccaactccattgcacttcagggctgggtgtctgcaaataaatgcaaaattacctttcaaaatccatccactcctcagtcctcatgtcaccctttaaaaaattccggtggtctttccccacagtagagaaggtctgtggaactttcctcaagaaaattgtaacctcttgggaggagattggtgtggggaagtggaaagaagaggaaggaagaaggaaaaagaaaagaaagaggaggagaagaacgagaaggaggaggaggaggaagaagaaggaagaaagaagagaaggagaagacgaggaggacgacgcgacgaagaagaaagaagtaagaaacctaaatcccaaaagtgacttaaacacctctcccggtgggaggtggaaggagtggtcacagtaggatggaaatcagaaacctattccaagaacgcattcttggaaacttcaatctttcgaagaccacattcatccccatgattgttagaatgtgtaagagaatggtgttattttatctaagaatgttatagcaaaggtttcaagctgggaatgtcatctcaacctctcctaatctagtgggcctttatggccaagtggattaaaataacagcggggcagaatctccaggtggttggtgttcagcaatttttactactgttggtcgtgagtaacatcatcaggattccttactagctgcgggcagtttttctgtcagccctccttcctctcccgaggaggacggacatgataaacaatctggagaaatgggaaccttattcactttgctccctttttcttcgacccaaaaaggcacacacgaaacaaaaatcatacagcagacagcacgcaaactacagcaggatatgcggaaagcaacaaaaagagtcccccagcaggattagagtcgggagtctacccagaatctaccaggccagcccctccccccatgctcccgggaggggaaaggagcgcggagcccactcggagggccgctctccgccgggacctaggtgtccccggggcagctgcgtactctgcggcgccttccctcccggcgcccattggtgcgcctcggtagggaggacgcgaggacgcgaggacgcggtcaagggggtggggtggggacttcggaaaatcgtccgagccagacggggctggctgctctgggatggggacacaaagggggagtttgcaggcgtggcagggtgaaaacaagcctacatgggaaatgtgtgcaaattagagaagacgtgcgaggaaactggagaatccttgacgagatgaaggcgctggtactcagaagaggggggctgtgcagggtcaagtgggttccgtgcagagggcaggggattctccagagaagggcaggggtagacgaatgcatggaagaagagttggtgtattgtcagggggtctgtgcagaggacagaggggtccgacgggaagccgggctctatgtatgcaaggagccgatgcacacagtccaggggacttgtaccgggagtgggatgggagtttgagcaaaggagaaaggcgggatgtctggccagctcgggggccacttacctgcatggtgacgacccccagctcctcggccgccagcctccgcatctggctcgccagcacttgcgcctcgtccaggatggagaagtcggcttcggccccggcgcccaggagccagcacgcgaccaggcagagcagccagaggggcggccgccgcgcccgggccacggccgtctcctcttcctccggctggcgggccatgctgcctccccccactccccgccgacgggctccgggcgcggggaagcgggccgcgggaggtgccccccgcaaaagcgcggcgcaccccgcaaaagtttcttcctctgttgcaggctctgctccgcgccgcggtggcgaaggctcccaaacttagggggcgcccggctacagcgcgggagcgcgggcggccaccatcgcggggctccgcggcggtgggggtaggaggcggccgcccgagcggtccccggagcccggcgcccacacgggccccgcggcgcagagggcgtctccgagagcaggggcgcccgcaggccggggtgcgcgggccccggggctgacagtcggaatcggagtcggagtcggagcccgagccgagccgcgcggctctcgcttcctgcgagtcccagcgcagcgagcaggcggcggcgaggactgacggcggcccccggggaagaggagcggcggccgggctgcgagactggggcagccacccgagcgaggagggaaaggggaggcttcacaaacccacacaactgaaagaaagaaagcaagcggtggggaaagggaggcgtctggtgccaccacgctgcgctccggctctgtgcacttcccggctgggccgccgcggcggctgcggtgatttatggaaccagcaagagaggcggggaaattcccccggttgcccctcctctctctccctggctcccgcctcagaacctgccccccgggacgccgggggccgggggaccagcctctctctctgctcggggaccggcccagcccgggcaggggagcccacggaccttcccgtggctggagacggagacccccgccagcgctccccgcctccgtccgcgccagggagcccacccggcccaggttccagccatcgaaaagtcctttaagttctaggacgctggctgtctgcctggcagcggttggggaagaaggggactgccatgtgtaggtccactccctctccttgatgttattcatcacaatggctagctagcgttccacccacagatttctgttgcaaccagccaccgtgtgcccggcactgggctcgggggtgtgcacattatcctttaatctccgcgacatgccataggaggtacgtatctttatcccaattttttaggtaacaaagactgaggcttagagaggtggaataaattgccagaggtcacccaggggataagaaacaaatccagagtttaagcacaagtcttactccaaggctattgctcctaaatacgatacagttctctctgtctctctttggaaatgaaccatctgatcccatcaaaagcaagaaaaaagaaaaagaacgactgaaccggagtccaccgcgcacacacctgttctcccaagcatggagaggcaaggttaaccttcctgtttgtccctgactactggctcaggctcgctgagaaatcacctgttggaagcacctggaacaagtcaacctgctgtgtgtggagaacagccactctcccttccaagccctgtgtggttgctgcttgcaggttcctggagaacagagccaacactggaaggttaaaggactagtccagggttacctagcagaggtggtagcaggattagaacctggatttaggactcttttcattttacagcaaaaccttctgttttacatctttgactatattgtattaaaaagtcatcttctcttgtaagctctccctggcccatttttacctcattgagatcacttctccattctcaactcccctgctaatttttgtatttttagtagagacagggtttcgccatgttggccaggctggtttcaaactcctgacctcaggtgatccacctgcctcggcctcccaaagtgctgagattacaggcatgagccactgcgcctagcctgtgatgtttgttttacatactaaggcaagcatgttgagtgtggggaccaatccctt

SEQ ID NO: 309 - DNA, 4001 bp, Homo sapiens
ctgtgagagtggagcaggggagcgggatgcagagaggagagagggagaagcccagccggggttgctgtgggaggatgcgaacagcagcaggaagaatatctgcttagagatgctccttcgtttctaatgagggggtgctgcctagaagcaccacgcgccagccaatcaccgagctgctgaggcagggaactagagaagaaggggaaggccagagactggggttgggggagtagggagatgcccaggccctgggggaaatgagccgcgtgtctggctaatactagagacccaaggcagctccagctgcctcactgctgcacacctggacggtgggggtgggaaagagggagaataggggagaaaagaaggggcctccattgcagatgcatccctcccaaatctccctcccaaagtcccatgtctccaaccccatccccatatttaacgccagaccactagcttgcctcctactaatccccttcactgcctcaccacccccaattcccaatggccttgccaggcgtccaatccttagtgaagaacaaggcagtgagctgcctaatcagcagtctgcatttggtgcacttgattaaacctgcaaagaagctccttccatgcctgttcaccctgacaccaccaccatcagagatggcccccaccagtgctttggggagagcagttcctttggagctagggagagagagactgcatgcacacctctggcctcagcggatgaattcaggcccagccgatccacctggatcctggatactgggagagcaatcagctgggtcaagcactaagaagcaagagtacccaaccaaggaccaaggacaggatgggcctgatgagctgctctttcttggctgagaggagaactccaagtttgagctccttgggctgtggcaacagagatcacctcccctgacagacactcactcatgccactttcagtggaacttaaacttaagtccctagagttagctgagtccccacccaaaagcctgttttatttattcatttgtctatctgtacacagggttttggccctgggaacttctgaactgataaatcccctcatggagccttgacttccctacaggaagacagtgcggtgtctcctggttggtggggatacgggcagagtggctggcttaaagaaaggaaaatgagaattaattatgaaaggaagcattggggcaacccaatctatgtagagggcggcatgtgaagggagtaggggtggggagggggctgggaatcagacaaagcccagcccagaaagggatgcacccagggacactaaagatttccacataggaaaaataaaaaaccaaaagtcttaccttgaaaaacactagtgcccaaacgggtctccacggcaccaagcttgccccttagatgcaccgaagagtgtgcttcagcaaaggggcaaattggcaccaggaaggggtgggggatacattccatgctaggtaccccccttcacccgaagaaatgcaaagggggagagggagttatggtgggcaagaaaggatatggccaatcgatgagcttcttggcatatttcctgacaatgttatcttctccgaagatgaacagggatctgttgacggtgaaacagttctgccggacgggaatggggttgtacaaagccatagtccgcgccctctgtgctttcgtctgcttgtaggcggccgcctgccccgaggccggcacgggggttccttgccggttcctgctctggtccgagtctccatcgccggaccctggcctggcgaccaccgcctccccgaagcgagccatcctgaggtttaaacagacagaagacacacaaaggtgatcgcggccgaacacccgcacacagcaacaagcagaaagacacacggagactcagagccgcatccagacaagcacggggaccaccgcctctggggagctccgcgagctcttcggagaggcagcagcagcagcccgccgctgtgaactgttgaatctaaatgcaacctctgcgaagctccattcctcaagaaggaaaaaaaaaaaaaagaaaaaagaaaaaaaaagcgggtggtagggcttgggggtgcccagtttctggaggaaaatatttttttcaaaatgccagtgtgtggtggtgttcagggaccagagaggagaggggtggagtaggctgctcttcaaacatagctcctcttctggcagacgcaccacctagttcagggagagaggcaggcaccggcccgctaggtaacagtttggtgatttattggttgggggaaggggtgggaaggaggggaaaatgaaaacaaaagaactttaaaaaaaaataaacaaagacgaggacggggttacgatgacatgctttataacgccagcccctgcaagtccatctaagaaattccaccgcgaagacttgggtctttatatctgccagcagagacgcatccaaaggttggagaaagagggagggaggtggggagagcgatattgaggttcctgcgtaaaccgcaatgcccaaaatctcaaaataagaagtcgatccaagcgaaaagggacaaatgacttcaaagctcctgcgcttgggctagaagttgagcagcatccagagagcagcgaagcctgagtgccagcatccgcccggagcgctcgccaccgccgcctccccggatcagcatgcaacagcgatccgcggctgcgccgccgagagggcgggagtgcgagcgggcgggcggcgagcaccggcgggcgaggaacaggttgcagccgagcctcgcggcggcctggcaccacacttgtccacagaccgaacttcctcactaacggctcagtctccctcttccccgcaggcagcgccctcggcggagcactggagaagatgcggaaggagaatggggaggcgaggcagaggacagcgagcggcgcgcagaggcgcagcgaggcgcgcaagagcgctgggagaagcgggggaggagctggccaggcgggaggggcggggacgcagccggaaggctggaggttcctggaaggtgaggctggcttgccttcttgatttatgtggccaaagggtagcagccacctctgcaaaggtccagtgaagagtcccctttcccccaagtaatgccgagaagagagaggcaggtgcagccagcgatgcggcggagtctccgcaagagagcgagggcctggcgtggggcgcacacgcacgcgcgtcttgggtccctgcagagaggtgtccccagtgctgtgccctgttcggtgccgggagcggtgccacgggcccgccgccgccctagtaaggtgtcggggcctttgcgcgcctagcgccatggccgcgtcgccgctcctccgcacctcccaggctccacgaacacggccaggcatttccaagtagagggcagaaccctctccccatctccccacttagcacctgggaggccccgtggaggaggctaggacctctgggggttccacactctgctggtggtgctggctcctggcgggagcttctgccctcacggggcggcctcccggttccgctgtaggaaagccctgcccgacgtctcctggaagggccctccatggtgagttatgggctaaaactacccttctcgaaatgcgaacaatcagaaggatcctcccgccccccatcctttactcccaaataagctccacggactttctcaaacccaacccattaatgtagaaaaaaaaaaaaatagaattggtatctgagctgcagaggtgggaaaggtggactccaagccccagggaaagagctcctgtttagccgccaagcccttccccacaggtgactggtggtttgaactgagggcagggaccagctgtcccctcccatgtccacactagctggggcacaccgtcttctgtgttttcctgccttggctcaacacataggcctctccaaatccttccaacccgaacaatggaagggaagaaggaaaggaggggctgaggaaggaaacagacactgaccaaag

SEQ ID NO: 310 - DNA, 4001 bp, Homo sapiens
tcttcacaccgctccactctcagcgcctgtccatgcccttgcctgctcccaaggagccatgactttggcagattctggccaatccacagaggcttacccagataaatggcatgggagggtaagggttgatgcagggtaaggttgagaactcactgagtaggactgggaaggagagatggagagatgaatgctgaatttccagagccatgtgcacatgctggtgtgcacgtgctcacacccatcacacctcacccctcccagacacacccaccccgccacagccatttccagagggtaccccaggcccatggctttctcgactttctggcccattaggcagcaagtctggaaagagctagagaaagcaagggaggaagcgagggagttgtttgggggtggatggggaggcatattacgtagttgggcttgacagaaaaatcccattctcttcccagtaacctccagtgtttgagaaaagaggagggccacaggggcagggcgcagaggagcagaggatggaggagagggagaacccacagagtaaacctgattgcagaagagaggcaaggagggagggcctaggagggtttgatgtgggcgatataccgcctggccgagagcgggtcaggggaacagggctgaccctgaccccaaactatctctacttgccccacgtttctcttgtccttccagttatccctcattctccttccttctagggaacagctggtaggagcccagccttccagaactcttcagaaatatttcaaatatgccccaccctcgctctcagaacccacttgacacagccctccccttctctctgtcactccttcctcccttccccaaataacccagatattttcatcattctccccaccagagcaaatgcaaacatagcatgagtttcaaagtccctgtccccagggtggcacgtctgagctagaacaaccaggcttgtttggcctgtgtcttggagccactgagaccaggtgtctttcagatccatttctccccttggctctgtcctcagctgggacctgcccccagaggaagccttccttcagctcacctctgtccactgtcaccccccacccaacccaaacaagggagagttttctcaaagaggccatcgcatctttttttggtccctatcctattctaaaatgaggctggtgcttcaaaaacctagtggcaccccatgataatgtggatttgggcacacatgggaacagtccccatgaaacaggccccacccataggtggtcagtaggcatctctggttgtcatccaggacttgggtggcccactcaggcccaggaagccccaccaagtcctccttctcttcctcttcctcctcctcctcttcctcctcctcccccaccctcctcctcttcctcctcctcccccaccctcctcgtcttcctcctcttcctcctcctcctctcctgcttagccgagggctccttcccccagctcctcactcaattctgtgagttcaccccatgtctaagtgccaggcctccctggccctcctgtaggaagtttgtgctctgtgatcaccccgaatccctccctcatgacgcacacccccccccacggcccgggccctgaaggatacttccattctacaatgctgatgcaggccttcctcagggggttctccagggtcaggcagaacaaggcccggggtggccttggcagaatctcaggaactggcttcttgggctgtttcttcctcaggccttcatcctggggtgaggatggctccatggcttccctgggaatctggctttctcctgctcccccaccccagtgctttcccttccctgtgtccccaatgcccccgccttggggactaggctggctgaggctgtcggctgagcctgccctgctgagccagccagggggcgggggcaggagtgggggcaggaggattactctcctcgctcccagcaagtaaaattagcctccactcggctccccgctgccgggcctgagcttctgaggccaggcagctgtcattccacccagcccagccagtgacttcccaatctgtcccctgaggagggtggggtgggtcgggggaagaacttacacacaggcctgggatggggcaggggcagtgggagagggagacaggatggaaggtttcaagcctggggcaacagaggtcaggaataggtagccttggatatggaacctcaaactgcagagtggccccctcatgccaaaattaggcttacccctcctcagccccatgacattgtctggagaaggcactgggcagcctaagtcaggacagctccacagcagcccctacccatctcagtatctgcaccatcagccaaaactccccaagcataccctcaacccacccccacaagcaatcccatgtcagagaaacagtaaacccctctccagtgggctagaaggctcccagaacaaccctgagtgtgcacacctctggcatagcacctgcctcactgtggagcatctgctgtgtatctttcttccccatctcctcccatccctacaggtgtaaaggttgtgtgcattatctctgggactctggccccttctctgcacagtccccctatgtactatgctccctgtaaatgttcactgaggccaggcatggtggctcacgcctgtaatcccaacactttgggaggctgaggtgggagaatggcttgagctcaggacttcaagaccagtcggggcaacgtagtgaaactctgtctctacaaaaaatacaaaaattagcagggtatggtggtgtgtgtttgtagtcccagctactaggggggccaaggtgggaggatcagttgagcctgggaggttgaggctgcaatgagccaagatctggccactgcactccagcctggatgacagagtgagacagagtgagaccttgtctcaaaaagaaaagttcattgaggatagccacggtaatcccagcactttgggaaaccaaggtaggtagataacttgaggtgaggaattcgagaccagcatggccaacatggtgaaacccgcattctactaaaaataccaaagattagcgggcgtggtggtgtgcacctataatcccagctactctggaggctgaggcaggagaattgctcaaacccaggagaaggaggttgcagtgagcagggattgaatcactgcactccagtctgggcaacagagcaaaacctgtctcaaaaaaaaaaaaaaaaaaaaaaaaattcattgaacgcctgagctaacaacactgaatcttaaatgtgctgagctaacagcgaaccccacatatcctcccagcaagtactctgggctgggagtgagaataagaaaggggcaccaggaagggtgagggtagacaatgatctaggaatgagaaaattcaacaatccttttatttagctctttggtgccgacgcagtgcctatgtacctatatgcacgcccccctcccccaaggcttacagtctgagggaaaaaaaccacagtccccacccaacctgggacaaaactagacgacctcatgggggggatgcggggagggagtaaccccccctcccaacccaggaagccagagaacgccaccggggcacacaggtcgcctctgctgagtctgtaggttcggtctgggctgagcgccagcagcaatctggcctcccatcccttcctctgggttcctttctcgaggagtaagcgtgctcccaaagaagtcgctagtatctgaggccatctggtggagagcagtggcatggtaaccgagggctcaaagtcgggctcgcatcccggggactcgcagagactggactgcgcctgcggcaaggaaggacggagcagagccacctgaggccgagcgggagccagacccagggatgaccgtcctggggagcccctctgcaccccggaggggacgcaggacgcccggagcagtcccaggccctgcccctcgcttcacccacggagctcctaggtctctatcgtgcccatcgtacccgc

SEQ ID NO: 311 - DNA, 4001 bp, Homo sapiens
caaagaagtggaaataaatgtccataaacggatgaaaggataaacacaatgtgccacatgcatataatagaatattatttagccataaagagcatgtgtactgatacacgctacaccatggatgaacttgaaaatgttagtgctaagttgaaggagccaaaaaacaaaaggccacatacagcgtgactccatttatatgaaatgcctacaataggcaaattcacagaaagtacaagatgagtagttgtcaggggctgagggaggaatgggaagcaattgtttaaaacacactacatggtttctttctggagtgatgaaaatgtcctgaaactagacagtggtgatggctgcactacactgtgaatatatttaaacaaaaaacaaatacctgaattgtacactttaaaatggttaaaaacttgaattttatctcaaacaaaacaaaaatcaagtgccctcaaatgtatatttctaagtgcctaaactgagaacgatctctactttcaagaggactaacactgagctatccacctgcaagactgtgaagttatctcctaggggcacatagtacccaagacctaccttaaaagacttgtcacaagatacccagattaatactggaacacacaaacctcatagtttttcttcatttaaagaaaagattttgagtttaaaaaacaaaaacaaaacaaaacaaaagcttgggactccccagtacttgttttcataaagcaaatctagttaatacacacccaacacttaactgtgaataactgtcccgtcttcacctcccacttacgccaggaaatgagcaatacaagtactatcattcccattttctaactgagcaaactaagtctccacaaaatttaattctccaacgttcagagtttacagagctttaacacaggccattcgctttcttactattaattacaactaactttccaagttatttattttaaaaatcacatacagcagattgctgtttgccaatcactgacttaaacacctagaaatcatattttttaacaaccctatgaaatggatgctactgcgacacagagaagctaaacaacttgcccagagtaacacagctcctcgtgtgtagagaaaacctgactaggagaattcaagtgctagcactgagaactcaccttccaaccgccctctaccaagaacgacactcatgtttgcacccagctttgcttgaatgaagcttcctgtccactggctgggaaaccagggcagaaagggcctgaggaacacgcgcaaagggccgctctcccagacccactccccgcaccgcctgcacggataatcgccgcacacccccgctcgagcccagcaggcgagtggggtgcgaggtcgagtggaagcgctggggagccgacggcgcagcaaggggcgagtgaggtgtcccccgggaaggcggcgcactgactggcgcgggaccgggtggccgcagggcggctcagcccacggaaacggcggtagggcgggaggctggcgctgcagctccagccggggggcataaggaatatggggccggaccacttacctcttctgaagccatgggggctgggtcaggccgaagtcccgagctgcagccgcgcagaaggaggaacaggaaaccccgcgccgagccctcaaaccgagcgcagacgcctacccgcacgagtcgcggcgctgcagcctgcgcccacaccgaccctgcgcaagatcgcggcccgcctcccgcacgcgacggatctcgaaccttcgcgaggcagccgccgccaccgcccaccgcgagcacgcacagcccgccaagcctggctccacccacccttcctcgcctcgccgagcctagccccacccctccccgccccgccgagtctggctccgcccgcctgccgaatctcctagcaacgctcaagtctcgcgagcgaaccggcaatccgagaagagtaatgtcttgctctccgccctgacaacttttatgtattataatttgaccgcgctgggccacgctgcgcagtcgcagctcggaaccgctgcgttaacccagccccggaaataacgtaccgatcttcggagtccaagtcggaagttgactagagagtcacctgctttcgtccgctctaggacaccagacacaccaggccgccatgttgtgtaaggttagtctctcagcctccgcgagaagaaggcgaaaaatggggaggagcagcctggttactttcaaacgagaaagaacggatatgttaagcgtggagggctcctaatggtagcggtttgattttcagtgagtttggcgcggtggagacgtcaccgcggtctaacagttccgacgtggtggcgtcatcactggccgccgtaggaggtggagctacgttggcctcgtgaccgggccctgtagcggaagcccaggtcaaggccctaacaaaagggcccgcctatggccacagtttcaggccctcctttcagtcatggactgttgaagcacgatttcctggtgctttcgcccctttcaccgaccatttcaagagtccgtagttctcgcctgggtttggattcggtataagtgagcctgtttaccatcaaagaaaatggtgaaatgtcttctggagacgatgttctcttctggttctaaccctgtcactcagtgagacccccagagaagcctagttttcagattattctagtccttggcaggctcaagatgtcaacaacacggttggaaacaacccctgagaggtcacatagcgcgcactcagctttacagatcgtccaaggcagcgacccctgagaggtcacatagcgcgcactcagctttatagatcgtccaaggcagcaattagaatcagcaactcggagaggaaaaaaagctgttagcggaatggaggctgaccattatctgtagtaaagaatcggaagtacagtacaaaaataaattaccgaaacgcaacatgcgtgaatttcacacaaaaaaatgaagttgagggaaagaagccagacatggaagagttcatattgcgtggttccatttaaaaactagcccatggtgttaatgagcatagtggggaggacaatgacatgaaagagccaccagggggcttttgaggttcaggtaatgtttcttgatttggacactgattatagataggtgggttcactttagaaatctcattgagttgtaaacgtatatttatgtacgtagttttttctgtagattatgcttaaggcccggcgaaggggaatttgcccaggtaatggaaatattacaccgatacatagaattgtcaaagttcatgggatgaactcctaagagctgtgtattttatcgtataaatttttttaagtgtccaaccaatagcctggaattattaagtacataattaaataaaaacaaatatcccatggacctaatgcagtgaacagttacctcgttctcttaattgctcaggctaaggactcatacctgagtcttctatctcaggccttacatcttatataacaagccttactggcttaatcttcaaaatatgtagcgaatttaacgagttctcacaacctctgcttctaccacctgacggggtttgggacatgctacccaaaaatatggcacctagacatattgaatactttgaactgaaggaatttgagaaagaacatatgcaggaatgtctctaactttcttgcacctttctgctctgaagcaggacgtaataccctcatgtgagaattgccctgtctatacctggaataaaagtaacatctttatctctgaaaacacagggacgtagagacgaatatgaacatcaggccttgctaagtttcccccagtttattacccttagatcacagtcttttagccccatcacattttcccacaattctccattcttcttcaaacctactctaaacaacactaaggttaactatttattcgggtcttcatttctttatgaagtttccatgttatgtaaaactaacattaatatttatgcttttctctt

SEQ ID NO: 312 - DNA, 4001 bp, Homo sapiens
gtcctgaaactagacagtggtgatggctgcactacactgtgaatatatttaaacaaaaaacaaatacctgaattgtacactttaaaatggttaaaaacttgaattttatctcaaacaaaacaaaaatcaagtgccctcaaatgtatatttctaagtgcctaaactgagaacgatctctactttcaagaggactaacactgagctatccacctgcaagactgtgaagttatctcctaggggcacatagtacccaagacctaccttaaaagacttgtcacaagatacccagattaatactggaacacacaaacctcatagtttttcttcatttaaagaaaagattttgagtttaaaaaacaaaaacaaaacaaaacaaaagcttgggactccccagtacttgttttcataaagcaaatctagttaatacacacccaacacttaactgtgaataactgtcccgtcttcacctcccacttacgccaggaaatgagcaatacaagtactatcattcccattttctaactgagcaaactaagtctccacaaaatttaattctccaacgttcagagtttacagagctttaacacaggccattcgctttcttactattaattacaactaactttccaagttatttattttaaaaatcacatacagcagattgctgtttgccaatcactgacttaaacacctagaaatcatattttttaacaaccctatgaaatggatgctactgcgacacagagaagctaaacaacttgcccagagtaacacagctcctcgtgtgtagagaaaacctgactaggagaattcaagtgctagcactgagaactcaccttccaaccgccctctaccaagaacgacactcatgtttgcacccagctttgcttgaatgaagcttcctgtccactggctgggaaaccagggcagaaagggcctgaggaacacgcgcaaagggccgctctcccagacccactccccgcaccgcctgcacggataatcgccgcacacccccgctcgagcccagcaggcgagtggggtgcgaggtcgagtggaagcgctggggagccgacggcgcagcaaggggcgagtgaggtgtcccccgggaaggcggcgcactgactggcgcgggaccgggtggccgcagggcggctcagcccacggaaacggcggtagggcgggaggctggcgctgcagctccagccggggggcataaggaatatggggccggaccacttacctcttctgaagccatgggggctgggtcaggccgaagtcccgagctgcagccgcgcagaaggaggaacaggaaaccccgcgccgagccctcaaaccgagcgcagacgcctacccgcacgagtcgcggcgctgcagcctgcgcccacaccgaccctgcgcaagatcgcggcccgcctcccgcacgcgacggatctcgaaccttcgcgaggcagccgccgccaccgcccaccgcgagcacgcacagcccgccaagcctggctccacccacccttcctcgcctcgccgagcctagccccacccctccccgccccgccgagtctggctccgcccgcctgccgaatctcctagcaacgctcaagtctcgcgagcgaaccggcaatccgagaagagtaatgtcttgctctccgccctgacaacttttatgtattataatttgaccgcgctgggccacgctgcgcagtcgcagctcggaaccgctgcgttaacccagccccggaaataacgtaccgatcttcggagtccaagtcggaagttgactagagagtcacctgctttcgtccgctctaggacaccagacacaccaggccgccatgttgtgtaaggttagtctctcagcctccgcgagaagaaggcgaaaaatggggaggagcagcctggttactttcaaacgagaaagaacggatatgttaagcgtggagggctcctaatggtagcggtttgattttcagtgagtttggcgcggtggagacgtcaccgcggtctaacagttccgacgtggtggcgtcatcactggccgccgtaggaggtggagctacgttggcctcgtgaccgggccctgtagcggaagcccaggtcaaggccctaacaaaagggcccgcctatggccacagtttcaggccctcctttcagtcatggactgttgaagcacgatttcctggtgctttcgcccctttcaccgaccatttcaagagtccgtagttctcgcctgggtttggattcggtataagtgagcctgtttaccatcaaagaaaatggtgaaatgtcttctggagacgatgttctcttctggttctaaccctgtcactcagtgagacccccagagaagcctagttttcagattattctagtccttggcaggctcaagatgtcaacaacacggttggaaacaacccctgagaggtcacatagcgcgcactcagctttacagatcgtccaaggcagcgacccctgagaggtcacatagcgcgcactcagctttatagatcgtccaaggcagcaattagaatcagcaactcggagaggaaaaaaagctgttagcggaatggaggctgaccattatctgtagtaaagaatcggaagtacagtacaaaaataaattaccgaaacgcaacatgcgtgaatttcacacaaaaaaatgaagttgagggaaagaagccagacatggaagagttcatattgcgtggttccatttaaaaactagcccatggtgttaatgagcatagtggggaggacaatgacatgaaagagccaccagggggcttttgaggttcaggtaatgtttcttgatttggacactgattatagataggtgggttcactttagaaatctcattgagttgtaaacgtatatttatgtacgtagttttttctgtagattatgcttaaggcccggcgaaggggaatttgcccaggtaatggaaatattacaccgatacatagaattgtcaaagttcatgggatgaactcctaagagctgtgtattttatcgtataaatttttttaagtgtccaaccaatagcctggaattattaagtacataattaaataaaaacaaatatcccatggacctaatgcagtgaacagttacctcgttctcttaattgctcaggctaaggactcatacctgagtcttctatctcaggccttacatcttatataacaagccttactggcttaatcttcaaaatatgtagcgaatttaacgagttctcacaacctctgcttctaccacctgacggggtttgggacatgctacccaaaaatatggcacctagacatattgaatactttgaactgaaggaatttgagaaagaacatatgcaggaatgtctctaactttcttgcacctttctgctctgaagcaggacgtaataccctcatgtgagaattgccctgtctatacctggaataaaagtaacatctttatctctgaaaacacagggacgtagagacgaatatgaacatcaggccttgctaagtttcccccagtttattacccttagatcacagtcttttagccccatcacattttcccacaattctccattcttcttcaaacctactctaaacaacactaaggttaactatttattcgggtcttcatttctttatgaagtttccatgttatgtaaaactaacattaatatttatgcttttctcttgttaatttgtcttttgttacaggatccccagccagtgagcctaaaatgggtagaaggaaaagatatttcttaccctacgcacccaggtccaagtcatcattattttgtctgaaatttatcttcctaactgatttctctgcttccccattgtgccttaagagttagttttccacagagcagctcgagatatcttttcagatcattatatccctttgcttaaaaacctctaacagcttcctattaggcttagaataaagtacaaactccttaatgtgaacttgagtgttttacgtatcttatctcacctttatgagcttcatg

SEQ ID NO: 313 - DNA, 4001 bp, Homo sapiens
aaggactcccttcagctcctcagtgagtggggtcatcagtgcagtcctctggggaaggggattccacgtaggggaaaggagaggctgctgtctctgtggtgactagggcgggaactccctttggggagtttgatgggtagagggcagaaggagtaagccagccagccaactatagggaggggatccccagggtccccataccaggggaagctcctttatcacgatggagacagggatgggggaggtcaggcgaggtggagcgattattcctccagcaccctggctcttcgcctgttttcctcagatgaaattctctacatcatccttcccagtttcaacccctcccctctccacccccgccccgccctgtgcccatccctgctggccactgggtccatcgcccaggagccacctcccctttctcctcccctgcggttctttctgtttttcgttggcatctggccgggcatagccaccaccctcccccttcactctccccacttccctttgctccacagaggtcctgttccctctcccccttcctccatcccagccctcctcctcttccgacagggcggtggggggaggaggatgcattccttcagtctcttcacagcctgccctccctcctcagggacctgaggctcggagctgtggaccccttccgggtttccctacaggctgcccctctggcatcccactaaccgttagtagcctttaagaaagctgaggtgcccccacagcgctgacctacatagcccggcccagggcgggaggggctcttccccaagtcccctcacccctggccccgcctcctttctcccccgactcccttccttcatctctctaccattaggaaccagcgaaggtttgagttccagactggggcaaaggggctaggtatgctaccccatcccaaatttgggaaaatcagtgcttagcccaggaaagctttgggtttctcatgcatcctcctccccaaatatcttgattctttcttttgcgctcccccctacccccaccccgcctctgctcctgtcggatttcttttcccagcttctaccactgccagggatattgccatcctgggccccctccgccctgtgttgttgttttgctccaaggataagggccctcttctttgcccacgcccccttcagcagcctcacccaggcccccttctctgcccactcggagctgcgccgcgggtggtgggggacgggcgggggagcagaaatgtttgcatacagcagtttgggggattgcactggctacccaacccctacagacatacatacacaaacacccgacacacgccctgactgaaacagcgacaaatctcactccgcccccaacacacactgacacagacatacacacagatactgacacagaaacgcagagccagacaccaacacagacgcgcgcgcacacggacagcaacacatccagaccccgggctgctcctaacggacatcagccccgagagccaaaccccggtgcacacgcagacacacgctcagtggtgtacacagaagggtgcacacaccggcacacccacagtccacagagacacggatgctcagagacagacacaagggtattagcagcggctggtgactttaaccccggttccaaacaaagccaacaggctccttccgcgagactcccgatcccagcccccgcctcgggtcactccccacctccccaggcgccgccccctccctcactcaccgtcctgggagaggttggccccgccgggcgcccagcagcaggcgaacagcaggagcaggagcaggagcgaggcggctggggcccccatcgcgcttcccggccggctccctggctgggcgctggcgagcctgaatccccgggggctggggatggggagggggtggactacgatgttgaccgaaagggcgcccccgagccgcttcggagcccggggccgaggtggggaccgggagggagccggcgctgctgcagtcgcggggattaaatagggcgctcggagcaaaccatttggttggaggtggagggggtttggcggggggctgggctggtcgcgggggggccaggctgccgcattccccacaccccccgcctcccacaccccctccttgccttcgtggtgccttccaccctctcccccgggagctcggccagccgggctcgggtgtggatcagagggagggagctggctcagcagtgggaccctgcgctcacccctcttaggcttggggtggagggaggggagtcggacagggccatgggccagctggcgagtgcagccactgcaggcctgggcaagggcgtgctcactagcctgaggtcctccagctccgccctccatcctttggcaactggggatccccttaagccctggggtcccccaccaaccatgtacccagggacatctctccagtggataactactaactctcagccttctcctaaacgctaacatccctaattcctcttacccaagagcccatagttatctgtccagcaacaatttgtggcccctggccttaagccctggggtccccctatcaacagtgtacccagggacacctgtccagtggataattgctaactctcatcattttcctaaaccctaacatccctgattcctcttacccaagagcccatagttatctgtccagcaacaattcgtggccccaggcaatctcccttgaaaggcattttccaacaaactcccaggccttgggaaccaatgtctccctcaatctcatgtcaaggaaataactcaccctctgaaaacatgatttcaccccagactcttgcccaatctggcagcctaacaaagcaactcagtcgttttctttcttaaccctccctattacatctctttaacccccggtccctttctccaatacgttttcttctttcttgttcttttgcagatctcgcccatctcaagtttgagttagtaaggttcatggatgaagagtctgatctagaaaccctccaaggacccctgcgtctgtgaccaaagctgctgtcaatcctgaggccagatataacaagatgagagatgcagggtgtttgtacttggtcttggcttaagtgtcccaagtccctggtgtttgccattctttgtgactgagtatctccgagtcttgatatatctcagaaagggatctttctaaatcagttttactgaaacttagcttttggaaatacatttctaaatgttagaattctagaataaaatgatattagatatctaagaattcttagaaaatgtctattccaaccccttaattatataggtacaactgaggctcaaaggaggctaactgaaccaaggttacactgacagttaatagtagaagacacaagtgttggctgggatgtgcaacaatatgattttaaagtgtcttccaatcctgtgaggctaatattttatccctagatgagggatttgggtgcatgtcttctaactcttagaccagctctctttgtctgctaatgactgtctcactgggctaatccttaatgtttgggtaatctttccttcttgaaaacagagtttttcagccctctgtgatgtagttaatgtctctgtcacccagaaactcacgggcaggggtgtggaaagtacttggttaccagtaaagtcctatataaattacaagcaatgatggagaggtcaggggaaatattccccagggaaatccttctggattgtcaggatgctgccccacagtttttctcttagggttgttagagttgatggtttctgggagaagagttctgcctgcctcttggacatttcttgagtgcctggatagttaagattttcttgcagggaagtgttgaccatctttggctgtctgacttgcctgacttgatatatctcagtgactccagaccattctgtctcctagggtttgttgatatcttggaatctccaaaaagtgaaaataaagggggtactatatttgaggggtgtggaaacctggatgtaagagaga

SEQ ID NO: 314 - DNA, 4001 bp, Homo sapiens
agcagcctctctgtcgtgcacttagcctgctctccccaaggactcccttcagctcctcagtgagtggggtcatcagtgcagtcctctggggaaggggattccacgtaggggaaaggagaggctgctgtctctgtggtgactagggcgggaactccctttggggagtttgatgggtagagggcagaaggagtaagccagccagccaactatagggaggggatccccagggtccccataccaggggaagctcctttatcacgatggagacagggatgggggaggtcaggcgaggtggagcgattattcctccagcaccctggctcttcgcctgttttcctcagatgaaattctctacatcatccttcccagtttcaacccctcccctctccacccccgccccgccctgtgcccatccctgctggccactgggtccatcgcccaggagccacctcccctttctcctcccctgcggttctttctgtttttcgttggcatctggccgggcatagccaccaccctcccccttcactctccccacttccctttgctccacagaggtcctgttccctctcccccttcctccatcccagccctcctcctcttccgacagggcggtggggggaggaggatgcattccttcagtctcttcacagcctgccctccctcctcagggacctgaggctcggagctgtggaccccttccgggtttccctacaggctgcccctctggcatcccactaaccgttagtagcctttaagaaagctgaggtgcccccacagcgctgacctacatagcccggcccagggcgggaggggctcttccccaagtcccctcacccctggccccgcctcctttctcccccgactcccttccttcatctctctaccattaggaaccagcgaaggtttgagttccagactggggcaaaggggctaggtatgctaccccatcccaaatttgggaaaatcagtgcttagcccaggaaagctttgggtttctcatgcatcctcctccccaaatatcttgattctttcttttgcgctcccccctacccccaccccgcctctgctcctgtcggatttcttttcccagcttctaccactgccagggatattgccatcctgggccccctccgccctgtgttgttgttttgctccaaggataagggccctcttctttgcccacgcccccttcagcagcctcacccaggcccccttctctgcccactcggagctgcgccgcgggtggtgggggacgggcgggggagcagaaatgtttgcatacagcagtttgggggattgcactggctacccaacccctacagacatacatacacaaacacccgacacacgccctgactgaaacagcgacaaatctcactccgcccccaacacacactgacacagacatacacacagatactgacacagaaacgcagagccagacaccaacacagacgcgcgcgcacacggacagcaacacatccagaccccgggctgctcctaacggacatcagccccgagagccaaaccccggtgcacacgcagacacacgctcagtggtgtacacagaagggtgcacacaccggcacacccacagtccacagagacacggatgctcagagacagacacaagggtattagcagcggctggtgactttaaccccggttccaaacaaagccaacaggctccttccgcgagactcccgatcccagcccccgcctcgggtcactccccacctccccaggcgccgccccctccctcactcaccgtcctgggagaggttggccccgccgggcgcccagcagcaggcgaacagcaggagcaggagcaggagcgaggcggctggggcccccatcgcgcttcccggccggctccctggctgggcgctggcgagcctgaatccccgggggctggggatggggagggggtggactacgatgttgaccgaaagggcgcccccgagccgcttcggagcccggggccgaggtggggaccgggagggagccggcgctgctgcagtcgcggggattaaatagggcgctcggagcaaaccatttggttggaggtggagggggtttggcggggggctgggctggtcgcgggggggccaggctgccgcattccccacaccccccgcctcccacaccccctccttgccttcgtggtgccttccaccctctcccccgggagctcggccagccgggctcgggtgtggatcagagggagggagctggctcagcagtgggaccctgcgctcacccctcttaggcttggggtggagggaggggagtcggacagggccatgggccagctggcgagtgcagccactgcaggcctgggcaagggcgtgctcactagcctgaggtcctccagctccgccctccatcctttggcaactggggatccccttaagccctggggtcccccaccaaccatgtacccagggacatctctccagtggataactactaactctcagccttctcctaaacgctaacatccctaattcctcttacccaagagcccatagttatctgtccagcaacaatttgtggcccctggccttaagccctggggtccccctatcaacagtgtacccagggacacctgtccagtggataattgctaactctcatcattttcctaaaccctaacatccctgattcctcttacccaagagcccatagttatctgtccagcaacaattcgtggccccaggcaatctcccttgaaaggcattttccaacaaactcccaggccttgggaaccaatgtctccctcaatctcatgtcaaggaaataactcaccctctgaaaacatgatttcaccccagactcttgcccaatctggcagcctaacaaagcaactcagtcgttttctttcttaaccctccctattacatctctttaacccccggtccctttctccaatacgttttcttctttcttgttcttttgcagatctcgcccatctcaagtttgagttagtaaggttcatggatgaagagtctgatctagaaaccctccaaggacccctgcgtctgtgaccaaagctgctgtcaatcctgaggccagatataacaagatgagagatgcagggtgtttgtacttggtcttggcttaagtgtcccaagtccctggtgtttgccattctttgtgactgagtatctccgagtcttgatatatctcagaaagggatctttctaaatcagttttactgaaacttagcttttggaaatacatttctaaatgttagaattctagaataaaatgatattagatatctaagaattcttagaaaatgtctattccaaccccttaattatataggtacaactgaggctcaaaggaggctaactgaaccaaggttacactgacagttaatagtagaagacacaagtgttggctgggatgtgcaacaatatgattttaaagtgtcttccaatcctgtgaggctaatattttatccctagatgagggatttgggtgcatgtcttctaactcttagaccagctctctttgtctgctaatgactgtctcactgggctaatccttaatgtttgggtaatctttccttcttgaaaacagagtttttcagccctctgtgatgtagttaatgtctctgtcacccagaaactcacgggcaggggtgtggaaagtacttggttaccagtaaagtcctatataaattacaagcaatgatggagaggtcaggggaaatattccccagggaaatccttctggattgtcaggatgctgccccacagtttttctcttagggttgttagagttgatggtttctgggagaagagttctgcctgcctcttggacatttcttgagtgcctggatagttaagattttcttgcagggaagtgttgaccatctttggctgtctgacttgcctgacttgatatatctcagtgactccagaccattctgtctcctagggtttgttgatatcttggaatctccaaaaagtgaaaataaagggggtact

SEQ ID NO: 315 - DNA, 4001 bp, Homo sapiens
ctctcctggttctgggccttctcatggtaaactcccattagtgccaggaaaccatcgcagttgaagaaccctttgtctgcaaggggcacagctggggctcaagggatggggcacagcactccccatgggctttgcctcttccccccgtaggcactgacacctgacccagggcccccccgaggctgcccaccccactccagccatgagctcactgtctctgtccacatccttggccattgaggccagctcactcttggtggggttgatacccagcaggctcatgagccactccagctcccccgtcttcacctccccgttgccctcttcgtcgaacatctcaaagactcccttgtactccttgatctgctcagccgacaggcgctctgtctgcaggggacacccgcaccggcctgaccaggagccccttctgcccctgtgtccagggaagggtcagaggtaccccctgcacccattcctccattggcagcctttcaaggtgagtggtaagagaggaggcccccagcggagagcaggcttccaggacaaggggtcacacgccaggggtttgcagggccagcagggctctgccaggcagctaacaggggcaagggccagacaggcaggagccagcgtgcgagggaacagcagcagctgcagggccaggcgggccaggcagcggccctggagcctggcaatggacaccaggtgaggcaggtgaaggaagccgagagcagggtggggaggagcccagccctggcccgggaaaggcttccagcccaggattgggatacagcccaggaagcagaaccctgggctccagcctgtgtggcattccggagggagagtccagcaccgggccacacctgcctgccaccactgctgctgcccatctgggagccagctttcagaaagggctgctccaccctggccccggaacaagggctgtgttggtggcagcagggcttggccccctcttctacctcagccccttcctgcccaggctccgtggcaggtcattgcacctccaggttccagctcaacctacccagccagcccaccagagactccatcgggcacagagagcagccttaccatgtcggtggttgtctgacaggattctgcagggtggtgacaccagggctgctgtgggcagagtgctggggcagtggtggcagctgagttttagctgggcctggctgcctggggtccccggggtccagattccaagagccttttatgggtgggaaatcctgccggccctattttgggacaggctctcggccttatccacagggccccttcccggcccgctttggcctgggcttcccctgaccctgaagatgggcaccgaaggctaagtgcgggggccaggaaagggctgagacatggcgggaccctcacacacgctgttccccgtgctgttccctcttcactggaccaagctccaagtctaccttcccagaggtgcggccctccagcaggtcttcatgggaccctggtcccatgctgtcatcacttaccagtgagatttcttgttgaagacccatcctggccagctggtgctcagtggctcagagcctggccaccctcccatcctggtggactcaacattggccccgtgccagcatgtcacaaactctcaggacaggtcgaatgaacaaatgcatgaggcaccgcttgaccatcttgtacaggaggggctgagggtccaccattcagggaggagacagcaggacatgggctgggggtgaagggggaaagggagcaaaacagggcctgggggctgggctgcccgctggaagccaggcacagttgggggctattttggggtttctcagggaaacctgatctcccttccactcagaacagcaaagctggctcccgagggggcctggtgcccaggctggtccgtatcaacatgccaccgtggagcacacgcctgcacacgtgtgttccctcctcagacccgcactgagccctccctgtctgggtctaattacccaccagactcccaaagccagggtccagctcctccctgccccacccaggcaagagtgtgaggattgcagtggcaggtcagggccctcagggtcacactcacacctgccccccgactggccccttgatggcatgaagagtctgagcaggtggggcactcagtgtcccccgccagcccaaccctctgcctgccagcaaacctgcagctacaggatggctcccgctgaaacccaggccagctgctgagactgcaagattgacgctgacgagggcaggccaatggcccagggcacctccagccaaacgggagccggggctggagggaagcggccctgggtctggtggggccaagggaggccctgaccttcatcctggctgctccctggcctcagctttcccctgggctggggcagggaacaattcacgcactgagcaccttcccccaggggcatagaatggagggagccgcagcacccaggccagggcccatcctgggttctggctcagggtctccaggtacaggccagctgggtacagagacacagagaactgcactggcctcgtggccctggacaagtccccaccccaacaactctcacagccagtggacagcaggctctgcctcctccgttcccaggcttccagcgtctgacattcctgggccacagccctgaaggttccagacatcctgatgggcttacgagtgaaactcaaagctgtgacccctggagcccaacttaaagcagagggcacaccccccgccccgcccgtaggaaggggcaacatggccacaaccaccatcaacctctctcctctccatctaggcttctacccatatccaagacccagtacaagcagcagaacaggtcctcgccctctaaccctctctcctcatgctgaccagcctctgtgtggccttcggacataccccgtatctctaggacctgagactcatccaatctttattttccttcttgtgtctcttctgatcaccgaagggctattctccataagaaaacagaaaaagaggctgggcacggtggctcacgcctgtaatcccagcactttgggaggctgaggcgggcagatcacgaggtcaggagatcgagaccatcctggctaacacagtgaaaccccgactgtactaaaaaaaatacaaaaaaattagccaggcgtggtggtagacacctgtagtcccagcttctccggaggctgaggcaggagaatggcgtgaacccaggaggcagaccttgcagtgaggcgagatcgcgccactgcactccagcctgggcaacagagcgagactccatctcaaaaaaaaaaaagaaaagaaaagaaaacagaaaaagagaaaaaccctgtaacaattagaatgctgcctcagccacgttcaggtgcaagtgcagttgtgttcatggccgtacccagttatgcagcagatctctagaacctttcaccttgcaaaacggacccccgcccccattaaacagcatctgccctcttccaccaccccccgccccccagcctatggcaatcactattctactttctgtttttaagaattcgactccgggggccgggtgtggtggctcacgcctgtaatcccagcactttgggaggccgaggtgggtggatcacaaggtcaggagttcaagaccagcctggccaagatggttacaccctgtttctactaaaaaaaataaaaaaataaaaaaattagccgggcgtggtggcaggtgcctgtaatcccagctactcaggaggctgaggcagagaattgcttgaacctgggaggtggaggatgcagtgagccgagattgcgccactgcaccccagcccgggtgacagagtgagactccatctccaaaaaaaaaaaaaagaattcgactttttttttttttttttttttgaggcagagtcccgctctatctccaggctggagtgcagtggcgcgatctcagctcactgcaacctctgcctcccaggtcaagcaattctcttgc

SEQ ID NO: 316 - DNA, 4001 bp, Homo sapiens
ctttttcacttccaggtagaatcgctcccaggctttatagtattcgctgccctggaccacgcacctgggtggggcaccgcgctaggcactttgcatgcattatcttgtttaatgccccacggccacctttccaggtaacctcattttacagctgaggtactgataagtagaaatgttcagaaaaatcccccacatcaaacagatagtgaatgatacaactgaattggattccaacgctagtcttctcgtcactgtaccacataacctgttgcctctttcctggtggcagttgctgggatgtcactcatctccaccttcatccttatgatgctgtaatgcaatcctaacgtctgactgattaccctgggaacacatggctcggacaatcttgaaagggctgaatccctaaagcactcagatttctcagcatggaggctggggacagcatgtctattgccccaagcctctcatggttccagctcaaaccatttctcactctaacctcaagcttctttcccaaagagtactttctgaagagtgctcttaataagcatccacacacacacacacaccagagcaatctgcagcatcgtggaaagttcactgaatttatcaatagatctgggttcagttgccaccaccatcaccagctttgcaaccccaggcaaaccctttaacttctaagcttcaatggtctcatctatactaaaggggaaataatacatgccacaccatctgatgggatcgtcctaaagatgattaattataaacacattataaactgtaaagtgtggtccccatatcaggtattactaagcactctgtgttacggcctgtttcagaggtgggtctcatctttggttctggttaagcttgggtcagcaggaatgacagggaccttgttctgtcttcagcttatgatctggaaaagatcatcttcttacctaaggcggaatctgcttgactctcttgacccttctcagaggctttcctcatgatcaatttatctgactccagagcaagaggctggccagacaagcactgcagccagaccagcgtgagccctggcagccatctccgggagcctcagggttaatgtttgtgcgtcaaagttacgtggagagaaggggccatggtgtggatgggggtggtggtggtggtgaatccagacctccttttaagatcttcacttgagaggtaaactagggaagtttaaaaacagaagggaggtagacgcgcccctggggaaggtgaaggaagctgtcttgtgactgacagcgatagctcggctgcgttctgcatcttaacgcggctgaggatagggagcctgaagcctgtccacagactcctccaggagggactgaggctgactcgtcttccttaggcttgcagagccacaggctgtttacaaatctttttgccattggttctgctaatcctcccaataacccaaagaggtcggcagagagggcatactttatttgatggatggggtcagagaggttaagagatgaaggttgagcaggagggaggggtgcaagagagttggaggtcctaacaccccagcagatggacggggtccctctaggcacagagccttgtccctagaatgcaggcattgcaggaggggcacatgaagatatttttctcccttttccctgcccagaagggcaaaatgcttccatgaaagccagcccaggagtgacggacagatagctccacccggaccccccattcagacttattttccaagacagctataactcacccttgatgccaaaagagtcagggaagactggaactggggctgaaataaatgcccaagttgcttacaaagtggctcttcaaatccactcactaggtgctgcacgcttcccattaagcaaggagaccctctaaagccaagaaaagaagcagggttgtcttacccagggactcgggaagaatcctgcttgagctcccactccagctcctacaggtctgtgaggattagctgctccagtgctttaacaataaacccaattaaaggggaggaatgcaggagttttctttcccaggaccgtaaccacgcagccttaaaggggagtaaaagtagctagggtggcttgcatctctctttcctttcctcggctctgctcaccctccctcccagcgtgcagtaatgagtcttatccagaaaaatgcttgtgcatttttgcctggtgtgtgtgtgtgtgagtctgtgtgcatgtgtatgtgaaattgtgtttgcattgatgtgtgtgatggaaagacagaacggaagaatgaaaaacaaaaacatcaaattataagttcccattatcctgaatgggtgatgacagaaaaaaatcagagaagctttctaggattgtctgcctcagtttcctttttaacccctcaggtgctggtgtatgttgtctaaaaacacctccctgaaaaacagaacatctacactggctgacatgtagggactgaagacagtgtccaccttgcttgttatctcttacagaactgggagaaagggccttggatgtcccaaaaggggcccctcagttggacggtctcactcagtatctttgatatgtctcttttcctccagaagctcagcattctggtccccaaacctgtctcagtcctaacctatgagaccccaggaaatcattcccctcctccggaaactctgtgctccctctgtttcctgtactcatctctccaacctggcccttgaccaaggcttcacagtctccatcttagcttctctggggcagtccctttagtgcagatttctttaaactctgtcatctgctctcttgttttctccttctctactctctccttaaggttaccatctactcacagagtctattaccatcttcataagaatctcctcagtcaacaccccacctgggttatcatgctcaacctcaacatccaaatgcccactgtcacctacaaacaaggctgaatgtgttatggccaccctcaaacccactctcctgttttccccaactaggctaatgagctaccatcttccaaacactcaactgagaaactccagggtttgctttgtttgtgttgcctgtttaatttgtcttccaaacccatccagctcttatgcacttccatttgttccttgaaattagcttttaacttgtaccatttcttttgtgtcatcttgttttttgaataaataacatattcatattggcaagaaaatgaccatattaaaaggcatacattgagatgtgttacccccttctactcgttatctgtcccttgaccctgacattgccctctataggtgaccacttttattatggtatttctttatgcaaatacaagcaaatattcacctctatgatctcagttcaggccttcaacctcccacccaggtagaactgtgataggatagggtgagatggtgcagtaggatagttaaaagtggctctggggaagacttctaggttggattcctgggtcttccattgacagatatgtggccttgggaaagtggcttaacctttctatgcctcagtttttccatctgtaaaatggcataattattaaacttatttcacacactagtagggtggagcgagacagaatgcagctgcttagaacagtggcttgcacatggtaagcacttaataaattttagctatgatcattctttatctgccatagtctgaatatttatgtccccatccaaattcatatgctgacagctaatcaccagtgtggtggtattaaaacatggggtttgggggaggtgatgaagtcatgagtgtggagcccttgtgaatggaatcagtgcccttataaaagagaccctagagagctgcactgccccttccactatatggggacacagagagaaggtgccttctacgaattaggaagtgaaccctcatcaggcattgaatttgctgggccttccagcctccagaatggtgagaaatatatttctgctgtttacaagttgccagtttatggtatttcgt

SEQ ID NO: 317 - DNA, 4001 bp, Homo sapiens
cccctcctgcgcgccctctcccagccgctggccgactgactcggccgccccgcgctccccgctgccgcagaggtcagagcctcccttcgctgcctgccagggacacatgccgtaacctcggcctctcttaccgtctcgacttagcctcgcctttctcagtccctccatcgtccctcggcgcgacggccggcagccgatcgaggtctctgtctctccctgtctaaggtgtcggtcgcccttattgtttcggcggcttctgcgtcctccccaaacgcgcgtcctcggctctgtctctcccgcttcagctcccctctcgggagctttgtctcggtctctgccaccctcggtctcccgcgtaccccctcccctccatccctgcgtctcagtctctctctgcagccgtcggtccccctcattgtccccgcgtctctggagctcctctcggagcctctctgcgtctccgcctctctggggcttttccagctctcgcgcggatcgcccaggcctggcaaaccccctcccaagccaagtaacaatgaaaagcccgtgcgacccgaacaccctagccttccccgcaggaatgggatcctccccacgcaggtccccacgccgtcccctgggggtccctgggaccccctccccacagggttatggagcgagtgcagctgtgactacactgcgcaaaaggcgggggtggggggcgcaaatcaaaaagcaaactttgccgcgcgggtggagacccccagctgctgctagaagccgccacgcccccagggtgacccagccggggatccggcttagggggacgcgttcctgcgacccgcttcagccggacccgcagtgcgggatcccccaattctgcaagaagggattccgtcaggtctgaacgggctccagcgggtgggagacctccgcaacccttgttcaggccgcggcgcgggaaaaagggggtgtcagacaagggggccgcgaactcaccccgcttgctccggccgatctggcccagcttgggcggccgcttgttctgcccggcgccgaagaagttgttggtgtcctgcaggcggcaggagaagatctggcccacgtcgccgccgtcgccgtaggggctcagcttctcgtcgccgtagggcagcacctccgacatggtcgcgtccgggggctccgccgcggcgcctcctccgcccgcgtccccgcccgcggcggacagggtcagcggcgctggggccgggggcggccggccggggacggcccgcgggctgctgcggcggtggcgccggcgagaggccgggggacgccgctagggcaagagcgcggcactcgcgcgagcggcccggagagcgcccgcggctgcgctgcgctgcgctccggctccgcgcgcgagtggctgctgctccgccagaggcgagcaggactcacatcctcggcgcgctggggctctgggcgggggccgggccgggcggggccgcgagccgggagggaggagacgtccctgcgagcccggagggcgcgggaccgaggagggcgcaccccgggagccgggcgggccggtcctgcggcgagtgcgggcggcggcgccggttcggggaggcagactgggagctgcgagcggcggggctgcgaggggcggagggggaggggagggagagaggagggagggcaccggggaggaaacccggagggagggtgggggagagaaaccgagagggagacggggctgaaaaacagggactgaaagacagggaggcaggggagacggtggaaggagacagaggagagggggagaggaaggagaggaggagaaagaagaaaaggtggggtgggggacgagctagaacggagagacaggggaaagatgagaggaggagggaaaggatcgggagggagaggaagagggtcggagagggaaggaagggagaaaaacagaggggggagagggaggcagggatagaggaggcagcgagctgcgaggagaaatgccggccgcggcgccgaggcgaggcgcggggaggagggcgggaggaggcggggaggaggggacccgcgggcctcggggagagatccctgcgagcggagcgacgtcacggggccgcgccggccggcccgggctgccgctagcttcctgcccccgcccccagcccccgccgtcccgctcacgggtgtttacggggcccggagctggtgcgcgcccgccccgcagccggctttgcctcccgaggggacctcggggggagtgggggttccgggagctggagagggagcggacagacgacgcacacgcggggaagggcggaagcatgctgacccccctggggggcagatgctgcggggcaaagatcggagggctccagggcgacccgcggacatagcctcccccgccatctgcaaaccggggagcccttcctccccaccacacttgctccccaattcagaccctgagggcccagccactggggcctcacactctcctcccgccccggctcagtccgacctggaaggcctcactcccccacgcccccgcccaactgcgctggactccggctcccgcagggcctccaggagggggagggggagagggaaggggcagccccgcctcccgcaggagaagggagcgcctcattacgccgggctcgcccgggatgcctggctcccggcgtccgctgcctccgctggggacgtcccgggtctgccgccctctgccctcgggggtctcccttccagcaacagccgtgcgccctgtggagagactatggcctctgagaggaggagcgggctcctcgatgccgggagggagactggggcagccccagaggcctgggaggcgcatctgccaagcagatggtaactccgagggggcaaggtgcatgaggagcgctcattatcctcgccggagccaacagcacctgccctccgctggagaccgtctttgcttagtagagccggcctgaccacagggaggggcaaccaccccaaggtcatgccagctgctggaggcagggctaggaaacacatccaggtggcccaggtgagtctcacctggctcatcctgctgccctgcaaggggtcccatcaacagtgaaaggagctctcccctcctatctagaactctggcgggtgggagctggaggcagaaggggaaggttttttcctggtataacatctggtggaggggggagtcagtccagccccctctccaaacggtgtaaaaggattggctggcctcgggaagccagaatccatggggggaggaggaagggagcagagaaaagggagactgaagcaatgtggcaggtggaataagcatgtcccttggatttaggtctgggtttgaatcccaaccccgtggtttgctgactgtgtgaccctgggtgggtcatctctcctctctgagcttccatggtctcagctgtcaaatgggtatatggctagccagtacctgtgtaccctgcaggacagttatgaaaacaaaaataaaatcaggctctgatgcctggctgagagtggatgtgcaatagacatttgagagatgacttaatgagtgagaaagaacggtagcacttcatttgtttccatttcaggaccacatgagctgggagaatccttagagatgagctgggcctatccctcatttccatatggggaaacagaagtccagagggccaggggctagccccaaatcccacagtttgtcgatggcagaagcctcaggtccccagactgaccttgttcctctccacaagccacctggctcattcattaggactttcccaagtgcctgctttgaggttagtgccaaagccaagtgctaagagagaaaacaagagcgtaacaagcaggatgataaagttccaagaagcgctgacatttgtcccctttcttattttcctccaacgcattttcacatctattattgaccttgcttctcaaaataaataccttttgaggtagaaagaggagacgttgcatccctgtttaactgacatagcagaaagaggataagtgac

SEQ ID NO: 318 - DNA, 4001 bp, Homo sapiens
atacatactacttttccacataggtgactatgtaaatttccctctttccatgttttctaagcacttaaatagccttgatttgccatccaaatagataccggcttcagtgtgctgcttaagttaaaaccaaaatacatctattattctcactgcttatatcagtggtgccagaatgtttttatataaaggcagtaacactttgtgtttcttcctatgagttacgctagacattcaatttcaaagagatgtttaaaatttaaataatttgaaaaggatttactatatttattcctgatgccagcttaatatcaaagcataaaaattcaagtaaaattaaggctgccataaacataaaatcacatcaatgtcaagtttccccaaaaacaaattcaaatcattttccaaacactgagattaatctgctatttaagtaggatgtgtaagtcctgaaaatactcagctgtgtaagtttaagcagtaaaactgaactaaaccatttaccaaaacattacatagtcctaaaattggaaattagtcaccctccccctgaaaaaccctatatttaacatgtggaaatttgtgagtactagggaacttttcaacaaatatttcatatatctaaacttcattaactagggaacagaaatcttgtaaaattactcttaaaagttaccaaattacagaagcatcttccaatgaaaagcagctctctaatttttttaacatttcacaacatgggctcctaaagcaacactaaagaatcataacgggaggcccttttcctgttattttgcaaagactgggttatggagggagtgtttaactgctactgtactatacaatttctgtgtcaacagcacacgccttcgaaaaactcatctattaaaaaacttcccaaagtagggagtttttgtttcttttaatttatgaagccaaaatacatttggaaaaaagaatatgcctcactgataatatgaaatgaaaactgcaccctacagtcagcaaactgaacgctggttttaaataactgatttaataagaacttaacatgcgtgcagaaggctgatacagccttaaagaatgacaacaaaaattaatactgcactcgacacaggccaccttacatccaacggagcctgaatagcagccatcattacaaatgtcaaaatcaatatagtactatgcaccatccaccttcttgcaataataaagaaaccaactcagatttcttggtggtgtaatcacaattatgactgaggcagaaatgtacgcaacacaatgaagaaaataccacaaatcaaaaccactctatgtaaaaacataaaattgctcactgggggatgggggggacattttgccatccaataaaaggaatctggccaaatcccacctgaccattcacgtgcccttcattgaagaccaaacctgctttccttatttctcctttctttctcttcctagcctcccatcatctcccttaacctgtacgagaagacaggcacggggagggagggattcgagaatcgggaacaaaaaccgagatgtggaccacatcaggaggaagaggggagggaaagggtgacaccactaacctgtcccaaaggctttggccaccagccaggccagattgcaggcgattttggccctggagaaatcatagtggtcaaaaggcttgatggctggaacaatgaacgtctttctcatctccctggggtctgcagcatcccccatctttcaccgcggctcctcgggatgtcccggccctaaccttcacatggcgtggcctcgccaccacgggggtcgggagggagggagaagcaagctcaaaccatcggggcccgggcgatgtccgcccgggcgccgacggaggagaagctcagctgtccgcgccgcgcgcctgccgcctcccgcgggagccgccgccgccgccgccgccgctcccgggcataggaatgtggcggcgccgtctccgtccgtccgtccgcgcgaggtccgccccgtgcccgcgcccctccgagccacccgccccgcgagcccgcgtgtgagcgaggccgcctcccctttgtctcggtttagtcacacgggcttgggggagggtggaggctggaagggcccggaattttaagggaggggggatggggggagccttcaacaatcacgttgtggaaaatgtccccgccatcgcgatgcccgcacgccctcgcctccctctccccttccctcggagcggggagacccctcaggccccgggtgggcggagggacgagcaggacgagggggaagcgcggggcgagctggcccacccagcgcagcccggcccctgcccgccggagacgcagcagcggaaaacgtcaaaatcactgcggctcacaggccgccgccggcccgtcccctcctctgtgctccctcccgtcgccgtctcctccttcccctgccgccgtcgccgctgccgtctcccgggtcttcctcccttgctgacggcgaaggtggtggccggggagaggccgcgaatcccaagctctcagttcctgtcttatcagtaatgtccttgtaattttttcctgcccccctttctgcagctcgctggatcgttccccctcagccgccgccgccgccgctgcggttttccggctgcggcactggatgaaggagcagatgcggagactgagcatgcgccttcgcgcggctccgacccaccccccccaacccccgcccccgcccccgccccctccccgcttccctcccgtctccggcccactgagcatgcccagcctcgctccccgcccgcgcccgggattcggggcggctgccttttaatcatcgctctggagtactcgcttcagtggacatcctccacgtccctggcttttggctgctgctgcctgcactgctgagagaggaaaaggaagggagggaggagggagaggcctggcaatagctttcgtattctacttacacagtgcttcatcgaaaagagttgatatttacttaaaatgttcattatgtgacacacactttgcagcgaacttgacctgcactatctcatttagccctcgcaataatcctgagaggtagatgtcattgctgattgtccacgaaagagaggtggagttgattaggtcatacatggaacttaaccaggattgaggatctgtgggggctccaaacctgtgttaatttcatgatatcgagatattttcttaactcagtgctctccacttaaattttatctctgagagggcacacgtccaacaatgcctccccattctctcagaaaagagcataaattctttcacaaaacaagctaatgccctttgtgatctggcatctacaggcctttatagcttcattttgtcagaactgctctctattttcttcaatgagcatgccttctcagatctctacctccttgctcagggtggttcctctgtccacccagcttactcctactgcaccttcaaactccacagtagtcacttcctccatgaagccttccctgacagctgctgacaactttccagtcagggctgtcacacaggtgcctcccctgttgttcccggagcaccctgttcttatttctgtcgtagcatctgtcacatcgtgtggcaataatcagttacttgtcggtttttcccattgatgacatgatgacagggtatatctccagcagctatacggtgcccagccccatagtataattgctcaattaatggactacatgtgaatattatcaaagttaacacatactgagcttacttaaatcactagctcctcacgtctcattttaatacattatctaattttatttttaagtgattgttgttgttattattattattattgagacggagtcttgttaagtcgcccaggctggagagtggtggcaagatctcagctcagtgcaatctccacctttagggctcaagcgattctcctgcctcagcctcctgagtagctgggactacaggcgcgcaccaccacgcccagctgattttttgtgt

SEQ ID NO: 319 - DNA, 4001 bp, Homo sapiens
aaggaaggttctagtacaacaaggagcacacaagcaacctcttccaggatggcatgtgggcgacacgggtgtctacactcccttttctgaatggaaaggcatatggcttctccttacccagccaacatgaatacaatttgagaaaattagaaaaagtcaaagtaacaggctcactaaatatggctgactgcgaagcagaagccacagaggaggatatgagttctctcaaaaaacaatcgggaagtttatatccaggaaaggttcaaggactcttgagtgtgggacggacaaagtctggttctcactgcacagaagacagtaatcaaaacatcaaaaaacaaggccacatgacccttttcccagtgaggtagtgtcaactgatgaaggttgccccctcctgagacacaagagtcaagtggaggcaaaaatataccccggtcttcctcagacacaggagcaactagtgtggccccttttcactcaagcactaggcacaatggaagccctgccctacatcttattggggcgcccactctcacccagacaaggaactccgagaagagagaacaagtcagtgtagacacacaaatggcgaaaggagcacggtgaacgtccagttgtctccataagaaaaggagggcaactcaaagggtatttaggaaatgagctcgccctaacccagcaaagtgtaagagtatgcatgatctggaagaagtgtctgctttcctatttagaaatgacttcagagctgcacaagcccccactatccactgggtgaggaaagaagaacatgggcagcctgagtccccttgtcctggcaaaaagggtcaacggagagtgtgcagaggccccaaaagaatccaaagaagatgagcagatcagacggacccctgtgccaaggaaggatcggggtcacggaaggtaaagggcaagggagtgtggagatcctcacttgccatagaaacggagaccccaccctcctggctgtgagggtgcaagggcaagagtaggatgtgaacgactgcgaggggcggggatgctgcgcaggcccccttcccttcccgggaagcgaagggggaggggtcacacgaggcccttcggccgagggacgctcggcaggacggggtccccctggcggggagaagctcggggaccccccgcccgctcagggaggtgtccacggggctgaagagggtgccggagagagtacatctggccctgcccgccggagagcagggggccggcgagggctgagcgccggccgctgccgcccgacggggaccggcccggagcagtggggcgcggggccaggaggacccgaggcggataaactttccgccccgcggcccccaccgtggacccagcgccgggggtgcgggggccgcgcagcgggctcgggagcggcggggatgcccggtccgggtgggggaggcgccggccctccgccggctcctcctcctcgctgggcccggtccccgccccgcgagccccccgccccctccggccccagcccgcccccgggggtggggtgtggggcgccgcgctccgccggccccgcgagtcacctcaggactcggccgcgctccgcccccccaccccgccggccccctccccggccgggtcgcccgcccgcccgcccgccgcgcccccgcgctcccgcccggcgccgccgatgcccgggatgtccggcggggccgggtcccgccgcccgccgcgccgccccccagcccctcgcgctccggctcttaccttccggcttgttttcggcagccatttcccctccgcgcgccacatcctcctcctcctcgcgaccgggaccccgagcgcgcgcctcgtaccgccgccgccgccggcccagccaccccgccgccgccgcgcacccgccctggccccgccccgcggcccacgcacagctcccgttgggccgtgcggctgccactcatcgctcccgccgccaatcgccccgcaccaggggtctcactactctccgggaggagcgtcctatccatccggcccattggctggtcaccacccaacggactgaaaggattggtcaagaatcaacgccccctccccacccactcccaggaaagcccgccttccggacctaaacaaagcttcctagtggccagaacccgaaagaactgtccaatcaggacgggcccgacacggaatatttcctcgaggccgagacgtggcgttttgattgggcgtcactacagtgtttcccaggccgtccagaccaatcaaagggggttcccggaactcgggagcggcgaagggaagccccgcccccgagcgtgaccgtcatgaggaaggcgctccctcattggcacgctggggcttttcccgcgtgctcccggggctgaaggacgttcccggggaagccgctgctggcgcgtggggtcccggtggctgtgggggacgcgccgggatctccgggatcccgcagcccgccgccgctgccggtggggagccggacgcggggggcctcggggctgaggtccgcaggggtgccgcgccctggagtccgactgcctaggagtccgggcgtcgctgccggccgtgggggaggggcgagcctcccgccaggccccgccccctcggcgccgcgtccccacggccccggcgccgcccgcctgcgcccgcctcctgtgcccgcccccggtgagctccgttgtccccttttctggcggcttaaaataccgaaactttattttggtcacgttgcccatgtgacccgcggagcggatgactcatggttgcctgtcccaggatgaggccgccggccgaaagcagagaagcgccagccccggccgcccgggtggagcgctgggcagccgagtttcccaccctcctcaatccggagagtccgcgcggggcttttcctaataaatagccaggcacccgctgccctcgcgctgcgtacgggagcacgtgccccccgggaggtgggcgcccgccaggtgccccgggaacgagcctaggaaccgggtccgccgagtgcggctctcggggcggctaggcgtgcgggtggctgggcagcgctcccagggaccggcctctctccggagaaagtaaggaattctgctcctgggcaggtaataccggaaacaaaaggagaggctgcaatcgcaaattgtttaaaaagaagaaaaaggaaagaaaagttgaatgtaagagctccagcccctcaatgtgatcttgtacggtttgcagtaagaacatttcattcttccgcattttatttttccttttgctactgttggtgacaactagcaaaataagtgaaaaatcctcgttcaagtgttctggcattaagattgactgtcacactgaattctgtgccaatcctaacaacatgtgttctttttctggtcttcacaagtaagaatgtcttaggttttccagaaataaagatgtcccaaaagaatgttttgtgttacacactcattcttcaagaaactttaattttatgagcctcaaaaattgcaaaattttaacaacggcgggacaatattttatcgattagcattcttaatagcacctatgttgacgatttgtgtggagaaacggattcttaaaagaagtgctggtggcattgtaaattagtatattcctttcgaaaagcaattttacagtatgtattaaaagccataaaaatgtctgcatcttttgacccagtgatcttacttctgggaatctgttctaaggaaataacactaaatgccagaaaagctgtatgtgtgaaggtattcttcacaggatcactgtacttaactacaacaaaaaattgggagcatcctacatgtgctaatattgggtatttagtaaattgtgttacatctacacagtggaacattatggtagttgtagacatcagaaacagaaaatcacccattgctagatagagggggcaatacccaaaattatggtgttcatttatgaggtgagatgataggctaaaaaaactgcattttaaaaaagaccgatacaggccg

SEQ ID NO: 320 - DNA, 4001 bp, Homo sapiens
tatgactgacctgaccacatctcacttcctccacttccccagccattactagaattccagtcacactgaactcgtcatggtctttcagctgtccggttctccaggtccttgcacctgtagtagtctctgcctggaaatcccttttccggattccctatgtagctaaataaatatttcaagagttagcctcccatttcctcctggaaccctgggcacctggctcaggtatttctccactgtgctcttgtagccctgtgctatgcactatgacactgtaagccatccctcatttacttgtctatttcctctcccactgtaaactccagaagaactgtattctttgccacaaaggctatctcattaaaatgtgcctcatacatattaaggtcttaataaacgtctggtggggccgggcacggtggatcatgcccgtaatcccagcactttgggaggccgaggtggggggatcacctgaggttaggagttcgagagcagcctggccttcacggcgaaaccccatctctactaaaaatacaaataaataaattaaataaaagtctggtaaatgataaatgtgctgatatgcccccggattttctcttgaagagagagccccacaaagagcttcaactgacacagttctgatgctaacctgtctcaaatgttctcattccactcttcgaacgcattcctatttatccttcaaaattcatcttaaaaactctgcttcttcagaagggcttttcctgaaccccctgttacatactttcagagcaccctgttctttcctaacactcatcaacatttataattacttcttaaacatccctgcaaacactgctagctccacgcgggcagggtctacattgttttgttttaaagctgcattccccgcatctgggaaaatgctggcacagaataaacacaatttgttacgctgaatttaatcttgtggggtcagcagagatctccacttaaaagatgaacaaaaggaggctgaaagaagtttaaggcacctatggccacagacactcagcactgaggccagaccaaacctgagccgtctgatttcaggtccagaagtacataccttcaatgttagcctggcttgtcaaagtaagagcagcagccgaggaggaaagggaggatatctgcctgtaaatacaaggatgtgcccgcctttcttttaaaaactccctaggcatttcaaacggctcaatttgggaggagagaaaaaaaaaagttccacgcagcgctggcctttaacctgcagcagcctgcggggcaacaccgaccggaagaccatcccaagttagagaggttccgagcaacacgggaagaactggggctggttatctaaggcaccaggatcatgattccgattcttttcctcactcgctatatatctcagactagcctcttctctagggatcaatttacctatcagtgcaatgggagcatcaacaggagacagggaagactctccgatctcggaggttccttccagtcagagcacctcaggaatcaggcctccgctgaagctgatgggcagcgctgcgaaatcgggcagaggggcctccccggggcacccggactcagctgctcaccccggccccacctcaagagaccgcgcccaagagtccgggtcggcctgagggcctcagccccggccctctcggcagggttcatgacacgcgcgtaggccagaagggccattaacaccaccaggggccgatgggccccggaagggaccccaatccctaccaagctgcacaccctcacctcagagttccgcctcacctccggactgcgatcagccgctctccgcttccggcaagaaccgcccagcaatctccgcgcgacccacttccgggccctcactgggcgcggcgcccccaccggaaatgagccgccggctgaagcgctaggctggcccgcgactgggcaggaagtctcaccgccccgctcgtgactccgcccctcttcgccacgccccggagagagcggcccggctctcacagagggcacttgggaaagagccccgccctcaaggcgggagcgacacggggagggcgggctcacaagagaggccacgccctcgttccgctttacctacccggaatcgcccccgaggcccgggcccaggaagggcagaagtccctggctaagctcctctctggaaagaacagaagagtgaccagttcctctgtcagtttggtctcaatggcagaggccggttcctttaagctgcagtccgtaaagggtcttggaacgactgggggccaggattctctgagggcgggaatccgggcggccgtcagctctcggtggtgatcgaggccacgctccgcctgtctctgggcgtgcatacctcggtttccccgtttgtgacgtgggaaggcaattagtctggacattgttgtgggaggacttgcggagactgggcgcagggcgtgggggtcagtgagggcgcggtgggtcagccccagcccggctggcagtcgcggggctgggaaggtagggaaccctccgctctcaccccacttcctgtttggtcggtgtgttctgtgaccatagatggtcaagtctggggccgcgcggaagcctccgccctgtggttttggagcccttcctcccggcgcgcagggtgtggtccccgagaataagatgagcagaattaaagcagatcctgcacccactctgctgaaatccggcttctgaggcagcctcgcccagggctgggtgggctcaggcggctgctactcggttcaggggaggttacgcacggtggctgccgcgcgcaggggaggcttcgcttccgtactccttgggccgggagatccgatctttgttccctcaagactcacactctccaaccggtcattatcctcccacaaagatttatttctagaaaaaattggcaagtgccacagttcccgccccttcagctgaacgactgtgacagctccgtgtttcaagttgaatgcaggcgttatgtgccagagtcaatcattcaacaaataaagttcttaaaataacagctaccatttactgcacgctgactacttgccaggcccatgctgagttcttcaagcgtattttcatttactcctaatagcaactctcggtggtaggtaccattatgccctctagttttcaaatgaggaagctgaataacttgccaaggtcagaaagtaactgttgaaactttgaaggaaacacatctgtctgactctaaatcccatgagcttaattagcccctgtgatagaccatactgcagacatttgaggcagatttgaggtggtgaatgcctctggatctggagacactgggttccagtgctggcataggccctctactaggggtcagactttggtcaggttactttggacgggttactgggcctcttcctaactttatggctcccagcatgtttaaaagaacatgacaacatgaaaaaatatggtataaaagtcatagtatattttaaatattgacatttaactaaaaacactgtctcacacacacacaaactctaactttatttggacataatctttgactctgcatttagttattctaaatctctttctggattagagacagaaggaacatagaccatacacgcattctagaggaagaggagagagaagaggaagcaggaaggagaatgaagaaagtttcctcatcaggtggggaatattaatggggctgtaatgagaaacggaagcagtaatgtatgtgaaaccactttgtaaaatgcttcattataaagaatgcacacacgacttaagttacaacccctgccctaaggaatgtccagtcttttaagaagtctagatccatgcatttgtaactccagtaggagatgggaagatagtttaagaatatccgtcacatgaagggctgggcgcggtggctcacacctgtaatcccagcattttgggaggccgaggcgggcagataacgaggtcaagagatcaagaccagcctggccaat

SEQ ID NO: 321 - DNA, 4001 bp, Homo sapiens
ctgcagtgccactctgagaaagccttggccaacccagtggggattctggggcaaagctgggccaatagaagtctgcattgggcagaaatggccagcccagtacctctactgtgttgtcattggctggagcagcctggagagaacacatcctcatctcaggtgctttgcaaatggccaggcacggcacaatgggaggcagaggtgagaggactacttgagcccaggggtttgagaccagcctgcacaacatagagagacccccatctaaaaaaaaaaaaaatcaaatgctttgcacatatttactcatttaatcctcagaatagccctataagataggtcttgtcattgtttccatgtttacagatgagaaaactgagacaccaagatactcaatgagtcacccagggttatacagtcagtgggtagtggagttggcatttgaatgcaaaactgcttttgggaacctctgtcctagacaggggcaatgtggtttgcagagcaaatgggggagaaaatgaacattctaagccttacttgtcagcaccctgcgaagtgcagtggtcacagtccccaatgacttccttgattcgaaatccagggaaaccttctcagttcttactctctgtgtccagcagctgccactgccactgttgccattcccttactttcttccctctgcttccatggacccctccttctcctggtttttcttccaccttcctggctgttctttctcaatctccttcaccagctccttcctctccttcctcttcttgtacctttgtggatttttttgcctcaaaatctacctaggtcaataactcctatgcttctaatttccagtcacaggggccacttggaaatgtagcagtgcttgggggaatatcaccaggacacttccactggccgggctgcttctctctctgggaggtgggttatgtcctatcctccccgttttgctctcttcttgatgtatatacagaggagacttttctatggacttagagatagtaattttttagcatattaatttcggttttcagggacagctagtggaagtttgatggtgtccaaataattctccatataatgtagtttattttccttcctttgtttcttcccatctttttctttcttttcctttccttttctttttttttgtttttttagacagggtctcactctgtcaaccaggctggagtgcagtggtgcgatctcagcttaccgcaacctctaccttccaggctcaagcaattctcctgccttagcctccctagtagctgggattacaggtgtgcaccattacggcccagctaatttttgtatttttagtagagacagggttttaccatgttagccaggctggtcttgaactcctgacctcaaatcatccacccacctcggcctcccaaagtgctgggattacaggcgtgagccacggcgcccagcctccttctttccttccttccttccttccttccttccttctttccttctttcctccctccctccctccctccctccctcccttccttccttccttcttccctccctccctcccttccttccctctctttttttttttttttttttgagacggagtctgttgcccagaatggagtgcagtgacacgatctcagctcactgcaacctccacctcctgggttcaagtgattctcctgtctctacctcctgagtagctgggattacaggtgtgcaccaccacacctggctaatttttgtatttttagtattgactcaccatgttggccaggctggtcttgaactcctgacctcaggtgatctgtctgcctcggcctcccaaagtgttgggattacaggcgtgaaccactgcacctggccttctttctttctttaaaaatatttttttctttgctttttttttgttttctccacatagtcgaacatcctggaaattcgttcctttgcgttagtctctgaggatgggccagttagctacagagccatcagagtctgagtgtctggcacctgagctcctccttggcccacagaaaggctctgcccaccagctccccagagagaatatggaaatgctgcctgggaccaaataagggaatataatgaaaggggcctcagggctgaggctgtgtttgagtcacattttagcaaagcggccacatagcttctgactcagagcacaaagattcttcaattcttcatggcaagaatgagactcacaagagcataagctcagaggtggaaaggagggcagagctgtctcctcctgtccagtctaaccaaggcagctaagaagctgaggccagagaagggagggtcccgcagccctagagagggccggagccagctggggcttccagactctcgggagaggtcccatcctgctgcccgctctgcaggctctgctcagtctgcttggatgctgcgtgtgtcgggaggccctgtcaccctgcccctgacccggctatgctggggagacctcagctttctgactcatactcagaagggagtgtcttagaggaatttctttccactcaagcagtctatggactgatcaaaagtgcaagtcatgtcaagacataagtgctctctaacatgtattctgcaatgtggacttgaatataaactgaaaagcacaatagtgaataattagagctgtcatcttggcacgttttatgtaacttctgtgagagcgcgtatcacctggtgatacaaatatttagtgtccatttccccgctagcccatccatttctgaatgagacaccatgtctttcttgttcacctttgtgatcctggcatagtgcctggcacctggtgggtgcttggtaaaggtttgttgaacgaagggtcataggcacaaagcgttcccagggaaaacttgttggcatctttgatgtcagaatcattgatttagggtgagggaaatgctccctgggccctgtgtcatgctaaaggagtccctgaattgagaactttgaggagcccagatttactatccactaggattgcttcaaatgtctgagtttagggtggggtggagtgtaccctcctttacaagagaaccagaagattcctcccccagggtttaatgcttgaattcctctaggagaaagataagaatgttgcagaacagagctgtgcaagcatttcttgttgctccctcctccctctctctctttctctctctctctggggctgactggtctgtccctaagttgtgggtgctggtgctggtgtggaggggggatgaagggcccaggacatctctatggggtctacttgggaccagactggccatcaacacacagcccagcctctccacttgattgccactcctgggggcatttcggtggactacaaagtgctagaaaccatgaagtccctggacgcccccttggcgccctgagcattctatgtagggatgggggtggttgagtgtgttctgggagtagggtcctgggggagggtggtggtagtaatgtgagattggtgtcaaagaaaagaaaaaattattcggtggcacttgttgaggtatgattaggaaggctttattcaggactgttgcaataggcataggggccactgcaatggggttttgcggggtggatagagattgggctcaactcggaatatggcacggccaggtgggaatgcatagccaagaagcagagtgggggtcagtgacagataattactaagagtaaacgtaaagaataagggggattctggctaaaccccctaaccgagtcttgctgaagacaggacagggtcattggacatcacctagatggtggaggatgaggagcacagttagatattggggatgatcagatagcaaggtgttgaggggttctagctaaactgacttagcagggtcctcgttaaaactgaatttttcaaggaagtgcacagatgggcctaggaaaggatcaggaggctcactaaagtttggtcaagcaaagaatctttgtcaagggccagaagaggccagaggtgaggc

SEQ ID NO: 322 - DNA, 4001 bp, Homo sapiens
tttgtgttcactggtgtatctcctgagctctcaggacagtgcctggcatgtaacaggtgctcaatcagtgttgtcaaatgagtgagtaaatgaatgaatgaatgaatgaatgaatactgtgaaaggcatggttatgtgtcaggcactggggatatactggtaaataatatacacatgattcctgcagttcagtaggaagaacaaatacatgtgattatattctaaactgtgacaatgctatgaaggaaatgagtggggtgacagagaaaaacaaggtggggaggtggctgctaagaagggtcagaaaagacctctttaggaagggaacatgtgactaagttgggaagaatgagagtgagccacactccaggtaacagcgtgccttgctggtgagaaggcctcatgcaggaaagaaccggctctttgagagactgaaaggaggccatgacggcagggcctagtgggccacaaaagagagaaaatatttaggcagcatgttttcttttagatgaagacatggaggcacagagaggttaaatggctcgttcaaggtcaccagcaggttagcaagaagaagaacccaagtgctctgagtctgggctagggcgcttcctgcagcccttgctacctatgggctggatttagggtaacagaaggtgacctgggaggctgctgggtgtggaagcagagctggaagccttgttctcacaacaggaatctagaagttggacttcagggcaggctttcctaggcgtggtaggggaagcctggggaagtgtcccaaaggaggaggagcctcaggggttccccaagaaacagaatggacaagtagattggggagcacaagttgtcccagggccgggaggtcagagaccctgggggacgggataagggggtctggagggctcccggaggtttcccgggtgattcccgccagggaaaccatgagacacctccgtgtcctgggttaattaccagtgtcaatgttatgaggaggtatcgctggctcccctttggaaaaataaatctaaccccagggctgcaggagactatccttagtcacaaaatgaccaggctatggcctgtccccctccatgaacagacagaaccccagttggagacggactttgtctggtagatgctgcctctcaccgtcccttccctgcagacccgattccccttcccttccagctccccgctagagtccaatcaaagtttcaccccggcctcctgcatcaccctgagtttttgtgaagtcctaaagtggcctgctagtgggatctgagggcagtgattcgcctcgacccgcccaggaaagcgtggtgggtggaagagagggaaggccccgggagtccccccacgctcgaacagagtcccgggctctggcggcgcggaggtgtcgcaggactgcgaggtcctggcttgcggcttccccactgcagcacccgggctgccccccgccccagcgcgccgcgggccggcctgcaccccgccctgcccggcaccccgccctgcccgcgtcctgccgcgcgcttcctaccgtggggcgcttccactcgatgccccgggttttgctggagtagggccccaactccttgaagcccagggccgaggggatggccgggaaggacgggtcctggaagagcgtcccggcctccaggcactcgttccgcagcgcctcgtagtcctggttgaggtacttgatggccctgtcgtgggagcccagcccctcggccgcctcccggtccttcgccagcttggccgcgatgcccgccatgctgcggtcccggcggccgtactgcgcagagaaaggtcggggcgactccgcgctgcgctcggctggggcgcggccagggcccggcgcgctgctgcggccactgcgggcgccgccgctgcgagcgatgattcaccggagggaagcggcccggcccgcggggtgtggcctcagccgctcccggcctgctgggctcccggcccgggaccaggccatcctgcggcctgccgagcgccgggaacgccgcgacccggggccggtgctgccatctgcggacagctcccgggatggcgcggcccggcgccggggaggctcgcgaatcgcggtccagagttggggctcccaccggaacccgaggccacctttgcagcccatagggaagaaggctaggatagttgtggccgtccggaaaacacccggggagttagcagagggtcaggtagtgaagtcgaggaaactaaaccagctgccctgaactttgtgccaaacagcgtcttaacggctctgcatacatcatctcatttaatcctcccagcgactctgaagaaggcgctgatattgtccccattttacagatgagaaaactgagcctcggagacgctaaatgacgtccccaatgtggcacaacagtcacaggcagaacagggactctaagccaccggaggcctattgcaatcacaatgctgcaattactactgctcagctgtttatttgattatagatagggttgtcagatttggccaataaggctgggtgcggtagttcacacctgtaatcccaacactttgggaggccggaggcaggcggatcacctggggtcaggagttcgagaccagcctggtcaacatggtgaaattccgtctctactaaaaatacgtcgtggcaggcacctgtgatctcagttactcgggaggctgagacaggagaaacgcttgaacccaggagggagaagttgcagtgagacgagatcgcgccactgcgctccagcctgggtgacaaagcgaaactccatatcaaaaataaaataaaataaaatgatttggccaataaaacaacaaccctcccaaatgtttaatttgaatttcagataaacaacagatacttttaaagtatatgtagggcccaaatattgcatgggcatacatacttattctaaaagaaaatatgattcattgtttacctgaaactcatatttaactggcaggattagttgggttactatagggagagagcatttagaatactgcctgtgttggctactgtgaccactctgttgtggagctagggtgtgattctcatctcacacacagagacatgggtgcgtgccaagaaatgcagatgggcagaaattacctcctcttcttctctacagtagtagggaagaatttgggtttcactggaaaactgtgcatggtctacagcagtggttctcaactgggggcagttttgtcccctacccaccccaggagacatttgggaatgtctggagatagtttttatggtcacagctaggagatgaggtgctactggcctttactaagtagaagccagggatgccgctgaacatcttccaatgtccaagatagctcttgtgaacccagaaaatctgaaacaggtctcatttaatttagaaagtttcttttgccatggttgaagatgcacacctgtgacacaggaagtcctgaggacatgtgcccgaggtggttggggtgcagcttggttttatacatgttagggaggcaagagccatcagtcaagtacatttaagaaatacattggtttggttcagaaaggcgggacaactcaaagtggcggggggtggtgggtgggtagtgggggtggcttccaggatataggtaaatatttaaacattttctggttgacaattggttgagtttgtctaaaggcccaggatcaatagaaaggaatgtttgggttgcgataagaggttgtggagacaaaagttttatcacatagatgaagcttttagctagcaggcttcagagtgaacaggcagtaaaatgtttcttatcagacctaaactctggttgatgttcacgctggagaggtataatgaagcatgtccgaccttgcctttccttcatggcctgaaaatttcaggttaaaattttaagagcctcggctaaggaggaaccatccatttagatggttggcgggggtaggggagggggaggcttagaattttatttttggtttacattctcca

SEQ ID NO: 323 - DNA, 4001 bp, Homo sapiens
agatgaaccacggtgggcgggagggcagcatggccaaggagttattctcagagatgaaaactgttaggcaaaatcagcaggatcaaagtaaaaagggtagaggtagctagctggagttaaatagtgattttgaccattttagaagaagtactctccctttgtcttcctgtttcaaccactgccaagaaaataggaaccctgacttaatttccctatcatggtttagaagacaaaaggtgcccaggtcatttcatagcccctctcctgagacgttgttatgagctctgttgaacagagcactttgtatggatgagctcaattctcacaaccactctgtatgggagaggttctcatccctgaggaatcacttgacaagggtcacatagtgataggtcatgggtctaggttttgggaggactgttctccatcccttgcccttgagctttgggtagtatcagtaaccgcatccaggagcctctgccttccgtctgcatccacagagccccagctcccacctctccactcaccagccctgatggaataatgtcaattcatgaccttgcgcaaccgtgcacctttcagcaatgatgttgtcacaatttacctgccagctgattgcatccagcactgagttgttccattgtgcactggcccagggaccatatgcagtaataacaactacgtattctgcatctattatgttctgggcactatgctctgagatttatctctaattctcataccaaccctgaaaaataaggtgccagtaaatgccattttacagatgagaaaactaaggttcacagagtttaccggcccaaaacaacacaggcagagctaggattcaaatctatcttacctagttccaaagctcatccatgctcttctctctatacctcaccatctctgaacaagagttcaggctgggtgtagtggctcacatctgtaatcctaacactttgggaggctgaggtgggcagatggcttaagcccaggagtccaagaccaccctgggcaacacagcacaaccctgtctctacaaaaatatgtaaacattagctgggtgtggtggcacgtgcctataatcccagctacttgggaggttaaggtaggaaaatcacctgagcccaggaaggttgaggttgcagtgcactgtgatcgcaccactgcactccagtctgggtgacagagtgagactctgcctcaaaaaaaataagagttcaaaaggtgatgggggggccagatgcagtggctcatgcctgctatcccagcactttggaaggctgaggcagatggatcacctgaggttgggagtttgagaccagcctgaccaacatggagaaaccccatctctactaaaaatacaaaattagccagacatggtggcacatgcctgtaatcccagctactcgggaggctgaggcaggagaatcactcaaacccaggaggtagaggttgcagtgagctgagatcatgccattgcactccagcctgggtgacagagcaagactccatctcaaaaaaataaaattaaaaaaggtggtggtggagggatctgaaatatgagatccagacacttagggtccacagcctcaacttctccctcagttcctcctgatcagatgtaaggcccctccaccttgtatgtcactcaacagcaagcccgcttccttaccgtgggccgcttccagatgatgccttgagtttgcggagagcctggtccaagatccttgtagcccaaagctgatggacatgctgggaactcagggtccttaaataggacccctgagtccaagcactgttgcctcagggtcttgaaatcctggcccaagtacttcaaagcgttttggttggagccaagaccttgagtggctgcccgctgcctagatacaccagctgcctgggctgccatggccgtgggctctgtagggtggacagaagggcagggctgcactgtactctcagacacctgctccactgggaggggagctataaggcactaaaggaggtggagcagacaaacatttcacctgaggccctgttccagaaggaagtgagtcatggccagggacaaatatgtacccaaggtccaggccaatctgccccaccttcttcttctgccttttgcaaataatttggggtctgggaactttccagggcccatcccaggccattagcctaagaaatccattaggatcttgaccccaccccggcattccctccacacacctctttgcaagacctgcttaccttgcttcaagcccattgactgagatgagaaggcttattgagcagcttgaagcaaatattcatcaaggaattggaggcatggctctgagcaggaagaaggcaagtagttacaggggcctcctttcctgccagaaatgttttggtgcatatttcctaggaaggcaaaaaataccagagagtagtgattcacaggccagatttggaataagcctgactggaggaggttccacctgtgagtgaacgctttggcctctgactgcctcggtttctatcccagctcccccggtaatttgctctgtcatgttgggcaagttgtttaacctcttttctcctaagtttttttatctataaactggaagagcataggagagcctaccacaaagggttgttcggaagagtgatgagatagtacatgtcatctgcttagaacagtatgaagtaacattcagtgaatgtcaggtatcactattccttgaagccaggattcccagaaaggccttggaatcaggagccttgattccaatctcagaagtgagttacaagctgtatgaccttggattagtcacttctctctgggctccagtttcctacatctggtctacccgaaggatgtcaaccacaccaatgctttttgaacttcagtgtttgtggcacactagaaaatggtcccccaaggataccaggtcctcatcttgagaacctgtaaatagtcccttatctgggaaaagggtttttgctgctatgactaagttaaggatctcgagatgggaagattatcctgaccctaaatacacaagtgtcctaagaggaaggcagaagaagatttgacaatagacaaaaaggagaggtgatgaaatgaggcaggcagaggttagcgagatcctgccccactccagggaacaccagcagccacaggagctggaaggggcaagaatggattctcccctagagccgctggagggatgtgggccttccaacacctcgatttcacagccttgggacttctggcctccagaacggtgacagaatacatgtatgttgttctaagccaccatatttgtggtcatttgttacagaagacgcaggaaacaaatatagtgtgcagaagaatcccctggagcactcgctcaaaatgctgattccctaataggtgctaccacaaatcctccacccccatccctcccaaaaaagagttctaattcaggaggtctgaagtaagacccaggaatctgcagtttttaaaccagtaccacagagatgatgctaatacaaggatccagggatgccctctgagaagctctggaccagccgacctctgaggcctccaactctgaccttctaagccaatgacagtccacgtgttaagcacttagctaggtgggtaggtctgagcaagtagaaagaagggttgctcccaggtgttcagaaaaacatgtggtttcccaggtttcatcagaaactcaaggccaggccaggcatggtggctcagatctgtaatctcagcactttgggaggctgaggcaggaggattgcatgagcccaggagttcaagaccagcctgggcaacataacaagacccagtctctaaaaaaaaaaaaagaaaaattagctgggcatggtggtgcatgcctgtagtcccagctactcaagaggctgaggtaggaggatcacttgagcccaggaggtcaggtcaaggctgcagtgagtcacccactccagcctgggtgacagagtgatgaaaccctgcctga

SEQ ID NO: 324 - DNA, 4001 bp, Homo sapiens
acctaatggtcgtgggcggtgcccctcagagggtcactcttttatgtcttgtaacttctgcttttttagtttggaaatgtcctttttcttacttagcagagcatgacctactaatcctgtctgtaaagtgcaaccccacgtgatctgccagtgccgtgacctcacactgcaattggccatatgcagagaaccaaaaacaatcacagcgtggcttcggtgaggaaggtgcctgggagctttcaccccaactccgatagggccactgaatgctcactgtgatttccccatgaacatggcaccttgtgggatcaattacctggcaggtgaagatcaaagcacctgtgtgcctatgcatgcagtcacccaccccccacatacacgcctatgcatatccacacacatgtgcacacagtcacacacatgcacatacacagtcaaattcctacacacacaagtgcgtgcacacacatacaccccacactgcctactgcaggaaatagcaataaaacccttaccacttcggaaacacccacttaggttcactttggccctgcccctgaagagcccagaagttttgtgaatgtgcgttaaaaaaaattgtttttaatcatcaacattattttaatgttgggagatagtgaggaggtagttatgatgagtcctttgctactcatatgtaagatgagactcagagctaataatcattgtaatgatgataataatagtatcagtaatagtaataatgtgacaatagctgtaatgtactggaaaccttctgtgtgctagacattggcctgcattagccattattgttcccattttacaggtgaggagactgaggctcagggaaatgaagtgatatgactatatgcatgagacaaattgtcaggataagacaggcactcaggatctcacttgtaggaccagcatcccttgtactgcccctccttgcccaaaagcaaccggaccccacaggagccactcccaggcccgtacccacctggagggaatggaagccagcccagctggcgccgggtcagaggtagagccctgactaatccagcaccgcaaatattgacatggcgtcccaggcacaagctagcacctcttgggacccagtgaccagctggtgcctcttgggacgacacctccagactgtcagaggtggggcactgttcaccctgatctctgggaatggggggtgcatggttctcgggagaagattcctgcttcccttgtattccatctgtcacccggttgctgagaccttgctgagccaaacatccatccacactgagcaccctcagctctgggccagaagccacagaacactgtgcataacgtgatctcagtgttaccacacacagggtgggggcctgtccttgtggataaggttttgattcgtgcctatcacctgctgacaagacccactctgactccaggtcctcagcctcggtgggagtcagacagcttggagccggggagcgggtacaaccagatgccccgggtccccaccgcagagcatcccaggcctgtacattattttctgcctccaaactgcaaagctttccacggtagactgggatgatgcacctcagttgcactgagcgtagccggcccctccccagcacccctgtttccacttcctgcgggggctgctgaacctcggcctcatctatgctccttcccctgctcgccccactcacccctggtcgtttccacacaaaggggatctgcggcctctcactgtagaacagggaggaattgctggctgggaagtctgcatcctcaaacagggtgcctctctgcaggcactcctgcctcatttgctcaaagctctggcctgaggagtgggtgatccgggcgtccttgggaaccgggtgtgcctgaggccctggggcccggtagaggtaaggcatggctgctccctggaaggctggcttgggtccggcagtggatggaaaagaaagtgaagaagcgagctgtgtgtgccggtcaagaaggaacagctcagagggccactgggctgagtggccctcacctccacctattttctgggcacctccctgttagactgagatgggacacgccctgatggaaaacagcagagagagccctctgcccactctgcactcctgcagactcagaggcagctctggggcctggcacattccactcagaggcggcacctctgcttagtgcgctcagggggcctcatgggagagagaggattgcttcagaaggaaaaggagcaagaaacccaactggtccaggaggtggctttacggagaagtgcacggtgtggtcttgagtcccatctcctgcatcagagaatggcagagttttgtagtcggaagggaggttggtgaatgaaagcaggatgcattatgtgaacacagctggcacagctcctgcacaggcaatcccatagtgattcagcactggggtcagcaaaccttttctgtaaaggcccagaccatgaatattttcagctttgtgggccacgcaaagtctgtgctgcaactactcaactttgctgttgtagtgacaaagcagccgtagatgtgacacagatgaatgggtgtggctgtgttccaataaaactttatttacaaaggcaggtgggggttagatttcatccaacctgacccctgatagaggagaactcacagaggacatcggctcttcctctagggcacatgtgcctctttcattctctagacatcatattaataaagttccttgttgttatagtcctacaaataggatctcacgtctgagaaaaaacaaatgttagaggatggaggtggtttgataaatgtgtttgcccatagaaatgattatacaggctgggtgtggtggctcacacctgtaatcccagcactttgggaggccgaggagggttgatcacccgaggtcaggagatcaagaccagtctggccaacatcatgaaaccctgtctctactaaaaatacaaaaaattagcccggtgtggtggcggatgcttgtaatcccagctacttgggaggctgaggcaggagaatcccttgaacctgggaggtggaggttgcagtgaactgaggtcgtgccactgccctctagcctgggtgacagagagagactctgtcaaaaaaaaaaaaaaaaaaaaaagaaaaaagagagagagagagaaagaaaagagagagagagaaggaaagaagaaaagaaatgataaatactggaggggatagatagcctaaataccccaactcgatatcacacattctgcacatgtaacaaaatagcacatgtaccccatcaatacgtacaaatattatgtatcaataaaaataagtcaataaaagtattagtcaccacgtgaaaactctgatgttctaagcactttataatgatttctgtgtgattctctaactagtcaaagttgaggtttggagacaaggggtcttgagttaatgggtacagttaaaaggccatgatgtgaatttttatataagctcacagttcccaggagtgtgcactcagtctgacacacgttctgtctagtagatcctgcatatggttttacaggggaggtctagacattagagttggggatatttgggttttactctgctatggcctgattgcttgtattccgcaccacccccccgaccccgccaaaatttgtatgttgaacccataccctgcaaggtaatggtattagaaagtggggcctctaaggggtgattaggtcagaagagtggagccctcatgaatgggattggtgtcattatgaaagattaggtcacagagggccccctcctcccttccaccatgtgaggacacaggaaccagaaagtagaccctcaccaggcatggaatctgccagtgccttgatcttggacttccagcttccagaactgtgagcaacacatttctgttgtttataagccaccctgtctgtgctgttttgttatagaagcctgaatgaactaagacaaattcccagttttccctggggt

SEQ ID NO: 325 - DNA, 4001 bp, Homo sapiens
ggtcactcttttatgtcttgtaacttctgcttttttagtttggaaatgtcctttttcttacttagcagagcatgacctactaatcctgtctgtaaagtgcaaccccacgtgatctgccagtgccgtgacctcacactgcaattggccatatgcagagaaccaaaaacaatcacagcgtggcttcggtgaggaaggtgcctgggagctttcaccccaactccgatagggccactgaatgctcactgtgatttccccatgaacatggcaccttgtgggatcaattacctggcaggtgaagatcaaagcacctgtgtgcctatgcatgcagtcacccaccccccacatacacgcctatgcatatccacacacatgtgcacacagtcacacacatgcacatacacagtcaaattcctacacacacaagtgcgtgcacacacatacaccccacactgcctactgcaggaaatagcaataaaacccttaccacttcggaaacacccacttaggttcactttggccctgcccctgaagagcccagaagttttgtgaatgtgcgttaaaaaaaattgtttttaatcatcaacattattttaatgttgggagatagtgaggaggtagttatgatgagtcctttgctactcatatgtaagatgagactcagagctaataatcattgtaatgatgataataatagtatcagtaatagtaataatgtgacaatagctgtaatgtactggaaaccttctgtgtgctagacattggcctgcattagccattattgttcccattttacaggtgaggagactgaggctcagggaaatgaagtgatatgactatatgcatgagacaaattgtcaggataagacaggcactcaggatctcacttgtaggaccagcatcccttgtactgcccctccttgcccaaaagcaaccggaccccacaggagccactcccaggcccgtacccacctggagggaatggaagccagcccagctggcgccgggtcagaggtagagccctgactaatccagcaccgcaaatattgacatggcgtcccaggcacaagctagcacctcttgggacccagtgaccagctggtgcctcttgggacgacacctccagactgtcagaggtggggcactgttcaccctgatctctgggaatggggggtgcatggttctcgggagaagattcctgcttcccttgtattccatctgtcacccggttgctgagaccttgctgagccaaacatccatccacactgagcaccctcagctctgggccagaagccacagaacactgtgcataacgtgatctcagtgttaccacacacagggtgggggcctgtccttgtggataaggttttgattcgtgcctatcacctgctgacaagacccactctgactccaggtcctcagcctcggtgggagtcagacagcttggagccggggagcgggtacaaccagatgccccgggtccccaccgcagagcatcccaggcctgtacattattttctgcctccaaactgcaaagctttccacggtagactgggatgatgcacctcagttgcactgagcgtagccggcccctccccagcacccctgtttccacttcctgcgggggctgctgaacctcggcctcatctatgctccttcccctgctcgccccactcacccctggtcgtttccacacaaaggggatctgcggcctctcactgtagaacagggaggaattgctggctgggaagtctgcatcctcaaacagggtgcctctctgcaggcactcctgcctcatttgctcaaagctctggcctgaggagtgggtgatccgggcgtccttgggaaccgggtgtgcctgaggccctggggcccggtagaggtaaggcatggctgctccctggaaggctggcttgggtccggcagtggatggaaaagaaagtgaagaagcgagctgtgtgtgccggtcaagaaggaacagctcagagggccactgggctgagtggccctcacctccacctattttctgggcacctccctgttagactgagatgggacacgccctgatggaaaacagcagagagagccctctgcccactctgcactcctgcagactcagaggcagctctggggcctggcacattccactcagaggcggcacctctgcttagtgcgctcagggggcctcatgggagagagaggattgcttcagaaggaaaaggagcaagaaacccaactggtccaggaggtggctttacggagaagtgcacggtgtggtcttgagtcccatctcctgcatcagagaatggcagagttttgtagtcggaagggaggttggtgaatgaaagcaggatgcattatgtgaacacagctggcacagctcctgcacaggcaatcccatagtgattcagcactggggtcagcaaaccttttctgtaaaggcccagaccatgaatattttcagctttgtgggccacgcaaagtctgtgctgcaactactcaactttgctgttgtagtgacaaagcagccgtagatgtgacacagatgaatgggtgtggctgtgttccaataaaactttatttacaaaggcaggtgggggttagatttcatccaacctgacccctgatagaggagaactcacagaggacatcggctcttcctctagggcacatgtgcctctttcattctctagacatcatattaataaagttccttgttgttatagtcctacaaataggatctcacgtctgagaaaaaacaaatgttagaggatggaggtggtttgataaatgtgtttgcccatagaaatgattatacaggctgggtgtggtggctcacacctgtaatcccagcactttgggaggccgaggagggttgatcacccgaggtcaggagatcaagaccagtctggccaacatcatgaaaccctgtctctactaaaaatacaaaaaattagcccggtgtggtggcggatgcttgtaatcccagctacttgggaggctgaggcaggagaatcccttgaacctgggaggtggaggttgcagtgaactgaggtcgtgccactgccctctagcctgggtgacagagagagactctgtcaaaaaaaaaaaaaaaaaaaaaagaaaaaagagagagagagagaaagaaaagagagagagagaaggaaagaagaaaagaaatgataaatactggaggggatagatagcctaaataccccaactcgatatcacacattctgcacatgtaacaaaatagcacatgtaccccatcaatacgtacaaatattatgtatcaataaaaataagtcaataaaagtattagtcaccacgtgaaaactctgatgttctaagcactttataatgatttctgtgtgattctctaactagtcaaagttgaggtttggagacaaggggtcttgagttaatgggtacagttaaaaggccatgatgtgaatttttatataagctcacagttcccaggagtgtgcactcagtctgacacacgttctgtctagtagatcctgcatatggttttacaggggaggtctagacattagagttggggatatttgggttttactctgctatggcctgattgcttgtattccgcaccacccccccgaccccgccaaaatttgtatgttgaacccataccctgcaaggtaatggtattagaaagtggggcctctaaggggtgattaggtcagaagagtggagccctcatgaatgggattggtgtcattatgaaagattaggtcacagagggccccctcctcccttccaccatgtgaggacacaggaaccagaaagtagaccctcaccaggcatggaatctgccagtgccttgatcttggacttccagcttccagaactgtgagcaacacatttctgttgtttataagccaccctgtctgtgctgttttgttatagaagcctgaatgaactaagacaaattcccagttttccctggggtgatcttgggcgagttatccatgctgtctgtc

SEQ ID NO: 326 - DNA, 4001 bp, Homo sapiens
aagacgaaacccactctctacaagaaatacaaaaattagctggacttggtggcgggtgcctgtaatcccagctactcgggaagctgaggcaggagaataatttgaaccagggaggcggaagttgcagtgagccgagcgagactccgtctcaaaaaaaaaaaaaaattgtttagttgtattgtaacaggatttttgcttaattttatttgaatagtaactatttgccttagaacaatttattatagatcgatttccagcataggcttatacataaatgtttttgtcctaaatcttaaacatgtatgaagatcagtttccaaataagagaaaatctaacgctgttgtcaatggcttgttaaacatttcaaaatggcatgccatatctacatatatcaagttattccgtacagaggacttatggatcataacagtccccttcccatcccaacttcttattgaaaaaaacacccaggtagatttacagagcactcaaggggacacattttctaatagccacagtgggagacaaatgtcataattcttgtccaataagttgccttgtgaggtcattctaagttctacgtgccctaaaaccatgtacttactgaaaagcctgacaaactgttatgaaactgtgcaactgtcagaagaaaagttattccaccttagaatgtgctcttgtatttaagacccttttcaagaaatgagcatacaaaatgcacactgacaaattcaactgatcaaagactccacagtggagcatcaaagaaggcaggatgctttgttcagtcttgaacgtgttaacataaggtttattatgtgttacagaaaacctttctggaggttaagaaaatccatcagctattctagatttgttaacaagaaacaaaattttcaaaaattatcgttaaaagggatgtgtctatagggaaagactggtgttcaaattctgaagcaaatgccctgaggctcacagatttattatagcgaatcagacaggcgacagtacaggagaaaagtagtgcatgtgtagggagatggacaacatttgggacctctccttgtcgaagagtcgtgacagcaaaatcacttcctgaggaaggaggagcaaaagggaagttaagaggccatcctgaccaggaagtgactcgccctaaactaaccccaattatatctacaaatggggggatggggtgagccccaactgctaaaggcggtaaaataactgctttttgatatgtcgcaacataaccaccaccctctcgcaaaattacagaaaaaagtccacagtcacgatccaataaaggaaacgtctgttcccttgcagggaggcccctgggctgtgcctcaggcctgagagaaaaggagagtcgaggaacgaggaactggggccaccgtgaggcagaggaaagccccctaagagggaagcgtcccgactgcggagagcgtatgtcagcatggaccaagaagcttctttttcctggggacactgctaggctcccaacgcagccgggccgggccccagttccctgtcgggggaggaggtaagagagagaggcggaccccttaccttctcctcatccgacacacgatcatcgaagtcggccatcttgggctgttctggcccagcccggctacgggcgcgaggcaggccgggaagaaagccgagtgatggaatcaccgcggcggccgtcggaaggacccgcccggaaacgccgaccaagagggccccatgtcagttatgcgcgggagtgacgtctcctaacgccagcgcccgcgcccgcgccccaggaagtagggtttgccttaggtgatttgaagtctaatatctttcccaatgagttacactcatttcccatccatctaatgggcgctggcagcgtgtttcgattattcttggcttctggcctccatccgaccaaatagctgttgctactcctacaagtttttctggtgcccgttatctccacgacagccgaatccaaagctttaagagctgctcggcagctggaacgatcggtggcttttccaaccccggggggggggcggtgtgaaaggtgaccctcatttcgtttggaagcggtaacacttcggggtcacatctcagtccagttcctccagaataggcgctgctgtccgccccttccctgccccacgaaagaacaggtagccccaatcttgagacacgctcctccaccttcgaaatcttctcggtcccggttccccaggactcagccttcacagaggccaacttcaggtccgccactatcccaggattcccgactcccggtttcctgtccttctcccctcccagctcctggcgcctgcgatagcggcaagatggcggaccgtggcggcgtgggtgaagccgcagctgttggagcgtctcctgcatctgtccctggcctaaacccgacgctaggctggagggagcgactgcgggccgggctggcggggactggggcctcgttgtggttcgtggcggggctggggctgctttacgccctgaggatccctttgaggctgtgtgagaatttggcagcgggtgagaggaccagacctcctggggcagggcggggggccaggagagatgtcgggggcaagagccaaagggcaagagattctcggtagtcctagagggcctctgaggagtcgatgatgagcgatcaagtgagttctttttcttttgggctgcaaccttgcagttgattgacaagcctgctgccgttaccggctcctccgtagaactcttaaggtccgccctctctcttatgtcctcgtttttccatggaaaagccacctgacaagctataagcttcaggtattaggacagaagagtgtctcagattaggatacgtaatttatattggctcccccacctctggtaggatcccttaaaagtcactactttgagtctcccgctgcccagctgaaagaactcatatccaggcaacaaagatgagcacatctgtaatttaaagatttcagagaaagaaaatggcatgattttaattgaggattctcttgttttaaaatagttctgttaagaaatcgttttcgtgatagttttgtctgttcttttaggcttatcttgagtaataaaatagtacaggaagtgagagcgccacaaacaacagtgggtttgctagttctttcgacgtctgtagaacacttgctacgtattctgtgctgacaatacgaacacatgtaagaagtgatgatcctgatggattctcatatactgtactattctttagctgtagacaggatgaagtgtttagggcccaggtccccttaccatgtgattatatttcactcaagatctgagcagcaacctcagaacaagatataagtatttccattacatgattcagtatggtggttgatttttctgaagcaaaaggcagcaaatgtcccctttcctgttcagagatgacatgaaagactgtgagttaatgttcggaaatattttggtttttttggaggataggtatcaagttcaaatataactagcactctaaaataagctaaactgaagagctaatttggcatctctgtaacaggtgaatgaagtgcttaacggtggtttctatgcacagtgttactgattgacttgtcatttatttttctacgttaaccatatgcaacatttagatgagaatagttgattactatagatttttcttttttacgtttcgtgtgtgtgtgtgtgtgtgtgtgtgtgtgtgtgtgtgtgagagagagaaagacagacagagtctccctttgtcacccaggctgaagtgtagtggcaagatcactgcagccttgaactcttctgcttaagcgatcctctggcctcagcctcccaagtagctgggactgcaggcgtgcaccaccacgactggctgagttttaaattttgcgtagagactgggtctattttatttgcccaggctggtcttgaacttctggctaccagtgatcctcctgccttggcctcccaaaactctgagattatg

SEQ ID NO: 327 - DNA, 4001 bp, Homo sapiens
aagtcactatttccctcaatggataacagagatctagctgtattctctaccatcaaatctactgaaaatgaaaaacatggtgatctgaattcatttacctacaatgcaacctcacaccaccacttctgtcctacgccaaccatctacaccggcttaatggtcagagtattcaaataggggataaacgtaacaataagcagtcagaaattacaaggctaagggatactaagaacaagtgactgagagaatgaatatgaaatccaagcaggtaagttcatggacacagacacatgccaaagagaacattccaagtggtttcttccaacgccaggtgctgttctaggccccacggatacagctgcggaaaacacaagacacaaatctctgccctccaagagctcattctggcccatgctaaatatgcctgtatcaccatacagctatttcactataaacatgatttcctatacaaaggatctaaaatacaatacatgggcaataaatactgctcctccccccttgccatgtttgaatatcccattttatgtttttcaaacggtatcattaaaccttctgacatacaagcagcttggtacaatgggaagaacagtttagagcctgccagatgggcttccactgaccaacagtggttcctccactggctgagcaacaccctgaataagtcactccacctcctgagcctcagctgcctcatctataaaatggggacagccccagaagggcttcctgtggatgaaaacagcttgtacaggtgaagcacaccacagtgactggcagacagttcctccaccctttccagccttttcagatgagagctgagtacaagactcctgagaagcttcaggtgtcatgtgctcctcctgggggactgaggcactttcccatcacctggcgagaatcgctgcttcctgccttatactttgtcctgagtgcacactcaggaaacttcagcccactttcaaagtcctcacccaccactgccctggagaagtcgttctccatcaaggcctggggccaggcccacctccccaaacaaggagttttcagccaaagttactggacaaatccgaaggccttaaaagtggcattgcccatgtttttaatcagcatacaggaaggcatcaaaagaaagcttaacccatctcaactactcaccctcgttcagcagcaacatcccttgactaaacaaggaaccatggtcctcaaaacactttgaggcccaaagtccacatacaaacatgctccaaaaatcccttgatcctgtcaggaagaagttctctggcccttccaacctaagtgctgggcctgtcctgcagaagggtcaagtggcaggagggcaggtctatctgtgggggcctatgtgaaaccccaggttcctcaaaagtctggatagcatctgccttctttaccaaaacaaacaccacgagcggagccagcactctccctaggcgttctgctcacctgatccgagggacttccataatcagcagttccaacccttgcaagctgacagttcagagggaaggggaggctgcgcctgcttgggtgcatcgtgtccaggccatatgctggatccagggcctggtggccccccaaggccacggcctcacaagggcgattgtgcgttcatccttgtcctgtgggccacccatcctcgcccctcggctcccactcaggcccgggcgccgtggaccccggcctgccctgcagaatgcttcgcacgcacagcacccacggcggcagcctcgagaagggcccgcagagcagcgcgctgccttctgggcacaccgatgcccgcccttccctcgctggctcctaggcggcctccctagaagcggcaactgagaaggcacagcaccgggaccaccccatccctgatggagagctcccctcgctccccaaaggctgcaaagaaggcgcgccccaggtacagggaaggggaccctgggtcgtgcaccaggcagggggcaggaccctgatgagaggctcagggcggggaccgagcggggctgacgcaggttacgctaggagtggcgaaaagtccagggaaggggatcatggtggggagggggcagtgaggtccagacgggggccatgggcggagaagaggaggtccagatttaagttcacagagagaagaggagattcaggctgaggccacggagaagaggggaagcaaacctaggccgctgcagaaggggctgaccggggtccagcctgaggccatggagaaggcaaagggggagggacagagggaggcagcggcctagcctgggccatggcagggagaaacgacggcctagcctgggccggagagacgggggaaagcagacctagccctagaccgggggaggaagggggcccacgccagggtcaccgagggggtgcctggctggggacacggttcgggagggagggtctagcctgggctatgggagagaccagcctgaacacagaggtagtgagtgggactccagcttgcgccaagggcgggggctgggagcgggggcagggtcactgccacccaagtcgtccgcgccggcggcaccctcctgggcggggagggaccgggtccacccagggtccgggaccccgcccctcccccaccccgggaagccacccgtcccaggccagggatgggcagggggagggggacgcgagctccggaggggcccccgggccggggagggggccgtgcggcctttaccatggtggcggcggcggcggcggtcccggtcccggcgtcagtggctctcccccccgcagcagggcccggcgcttccacttccccgggtgcccaggagtgaacatccgggtcagcacccccctccccccgcgccgggccgccgccaccttccttccccgccccggcccggcccgggcccgccccccacgccgccagctcgcggccaatgagcgcgcggggctgcggcgatcgccaagtatggagagcggcgcgagaggcgggcgccgacggggtgcgggggcggggcctgcgaggcggggcggggcgcggcgctgcgcggcgcggctgccgggagtccccggcacgggttgcgggccggggcggaaaggtctcctggctgtctgaggtccagtccccgactctgggcctgcagcagcgagtggcggcgagggaaccgcaccccacagtccccgcgggcggggatgcggaaggcaccgcggctgggaggggaccggccctccgcgccccaccccgtgcacgcgctcactcctgcggcgcacccggaactgccgccgagcgcggaccggcccggcccagcccaacccagcccaacccagcactgggggagcgcgccgggagcggggcaggagcccagcgctgccgctcgctacggcaggatctggagcgccgcgctgcacctgagcccgggcacgaattgaggagcctcgggctgacgccatttattcagcacctactatgtgccaggccttgtttaggcaccggaagataacagataagacataaagatccctgccggtatagctgcagacagaatatctgtgaggatgacacaggtagagattagaaaattaagttcaacaggtcggccgcggtggctcacgcctgtaatcccagcactttggaaggccgaggcgggccaaggtcaagagatcgagaccatcctggccaacatggtgaaaccccgtttctactaaaaatacaaaaattagctgggcgtggtggttcgctcctatagtcccagctactcgggaggctgaggcaggagaatcgtttgaacccgggggcagaggttgcagtgagccaagatcgcgccactgcaccccagcctggcgacagagcaagactctgtctcaaaagaaaaaaaattaagttcaacaaatgctagctgttatgagtactgttgaatgtgctacagagaaccattccattagcccagaagggcttcctcgctccacaaagtgactcaagtttctctctcccaatctctctctct

SEQ ID NO: 328 - DNA, 4001 bp, Homo sapiens
ttatactttgtcctgagtgcacactcaggaaacttcagcccactttcaaagtcctcacccaccactgccctggagaagtcgttctccatcaaggcctggggccaggcccacctccccaaacaaggagttttcagccaaagttactggacaaatccgaaggccttaaaagtggcattgcccatgtttttaatcagcatacaggaaggcatcaaaagaaagcttaacccatctcaactactcaccctcgttcagcagcaacatcccttgactaaacaaggaaccatggtcctcaaaacactttgaggcccaaagtccacatacaaacatgctccaaaaatcccttgatcctgtcaggaagaagttctctggcccttccaacctaagtgctgggcctgtcctgcagaagggtcaagtggcaggagggcaggtctatctgtgggggcctatgtgaaaccccaggttcctcaaaagtctggatagcatctgccttctttaccaaaacaaacaccacgagcggagccagcactctccctaggcgttctgctcacctgatccgagggacttccataatcagcagttccaacccttgcaagctgacagttcagagggaaggggaggctgcgcctgcttgggtgcatcgtgtccaggccatatgctggatccagggcctggtggccccccaaggccacggcctcacaagggcgattgtgcgttcatccttgtcctgtgggccacccatcctcgcccctcggctcccactcaggcccgggcgccgtggaccccggcctgccctgcagaatgcttcgcacgcacagcacccacggcggcagcctcgagaagggcccgcagagcagcgcgctgccttctgggcacaccgatgcccgcccttccctcgctggctcctaggcggcctccctagaagcggcaactgagaaggcacagcaccgggaccaccccatccctgatggagagctcccctcgctccccaaaggctgcaaagaaggcgcgccccaggtacagggaaggggaccctgggtcgtgcaccaggcagggggcaggaccctgatgagaggctcagggcggggaccgagcggggctgacgcaggttacgctaggagtggcgaaaagtccagggaaggggatcatggtggggagggggcagtgaggtccagacgggggccatgggcggagaagaggaggtccagatttaagttcacagagagaagaggagattcaggctgaggccacggagaagaggggaagcaaacctaggccgctgcagaaggggctgaccggggtccagcctgaggccatggagaaggcaaagggggagggacagagggaggcagcggcctagcctgggccatggcagggagaaacgacggcctagcctgggccggagagacgggggaaagcagacctagccctagaccgggggaggaagggggcccacgccagggtcaccgagggggtgcctggctggggacacggttcgggagggagggtctagcctgggctatgggagagaccagcctgaacacagaggtagtgagtgggactccagcttgcgccaagggcgggggctgggagcgggggcagggtcactgccacccaagtcgtccgcgccggcggcaccctcctgggcggggagggaccgggtccacccagggtccgggaccccgcccctcccccaccccgggaagccacccgtcccaggccagggatgggcagggggagggggacgcgagctccggaggggcccccgggccggggagggggccgtgcggcctttaccatggtggcggcggcggcggcggtcccggtcccggcgtcagtggctctcccccccgcagcagggcccggcgcttccacttccccgggtgcccaggagtgaacatccgggtcagcacccccctccccccgcgccgggccgccgccaccttccttccccgccccggcccggcccgggcccgccccccacgccgccagctcgcggccaatgagcgcgcggggctgcggcgatcgccaagtatggagagcggcgcgagaggcgggcgccgacggggtgcgggggcggggcctgcgaggcggggcggggcgcggcgctgcgcggcgcggctgccgggagtccccggcacgggttgcgggccggggcggaaaggtctcctggctgtctgaggtccagtccccgactctgggcctgcagcagcgagtggcggcgagggaaccgcaccccacagtccccgcgggcggggatgcggaaggcaccgcggctgggaggggaccggccctccgcgccccaccccgtgcacgcgctcactcctgcggcgcacccggaactgccgccgagcgcggaccggcccggcccagcccaacccagcccaacccagcactgggggagcgcgccgggagcggggcaggagcccagcgctgccgctcgctacggcaggatctggagcgccgcgctgcacctgagcccgggcacgaattgaggagcctcgggctgacgccatttattcagcacctactatgtgccaggccttgtttaggcaccggaagataacagataagacataaagatccctgccggtatagctgcagacagaatatctgtgaggatgacacaggtagagattagaaaattaagttcaacaggtcggccgcggtggctcacgcctgtaatcccagcactttggaaggccgaggcgggccaaggtcaagagatcgagaccatcctggccaacatggtgaaaccccgtttctactaaaaatacaaaaattagctgggcgtggtggttcgctcctatagtcccagctactcgggaggctgaggcaggagaatcgtttgaacccgggggcagaggttgcagtgagccaagatcgcgccactgcaccccagcctggcgacagagcaagactctgtctcaaaagaaaaaaaattaagttcaacaaatgctagctgttatgagtactgttgaatgtgctacagagaaccattccattagcccagaagggcttcctcgctccacaaagtgactcaagtttctctctcccaatctctctctctctctctcaatcaaatatttgttaagcttagtctaggtagcaggagagatctggattgctaacaatatctgcctccgtggcctgtttgctttggttaaatcaaattaggcgatctgtgaggggatggtaaactgcacagatgacaggaattgtttccctgagccaggccctgtcctcagggagctcatagacaagtcgaagctttcacaggtagccactggcagaaaaagcatacgggtaagtctcgcaagaatggtattggatgagtattacagaaattcaaggaagagaatggcacacgcagtagatacttattgagcatctgctatgtgccaagcactgtgctaggctctggaaatagagcaatgagcaaaataacccacatggttgtggagcttgagtgttgtcagggagacagtcggccaccaggcaaatacagtgtccaaggccaggcacagtggctcacgcctgtaatctcagcactttgggaggccgaggtgggcaatcgcttgaagtcaggagttccagatcagcctggctaacatggcgaaaccccgtctactaaaaatacacaaagttagccgaggccgggcgcagtggctcacgcctgtaatcctagcactttgggaggccgaggtgggcggatcacggggtcaggagatcgagaccatcttggctaacacggtgaaactccgtctctactaaaaataaaaaaattagctgggcgggatgacgggcgcctgtagtcccagctactcgggaggctgaggcaggagaatggcgtgaacccgggaggcggagcttgcagtgagccgagatcgcgccactgcactccagcctgggcgacagagagagacttcgtctcaaaaataaaatagtaataataataatacagtgtcgggtagtgattagagataatgagaaaaattcaagca

SEQ ID NO: 329 - DNA, 4001 bp, Homo sapiens
aggctatccactatgacgcccatccattggtcctccatgggcatttgagtttgtgatccccgtgaacattcctgaaggcaaggactgtggcctcaaaccattactgttccccagtaggggccacacagaaggcacaaaacttattttattattaatgaataattactcatatgatactcaattatttaaagactctttccctgggccagggcactggccagggatatccagccagccactcacacctactgcacctcatggtaggaaatatctcctgcatcctcacaggcctgtgatgagggtcaaatgagacaaagatgggaaagtgcttttaaacaaaacctcaaatgtttgacttcattattctccattctgcatcaggtcccctcatttccaaaacctcttaacaaaacataaactgaacacagaaggggctggccaaagagggcagggtacgctgatcccccgctctgtgcctagcactacagtttcacatccgttatttcatttagtccttatgacagtattattcttattcccatttcacagcccagaaactgtggctcaaagagggtaagtgactggcccaagaacacgctgccaggcagcctgatgccaaagtgggttcccgaaacctctatgctagaaaagtaaaaacgcacacgcctccttcctcgcaagtattaacgtaaattaaaatggagaccaaccatgaagaattcctgagcagacaaaaccaatcaggtatcctaagtgacctaaatcttgcttaaactgcaaacataagcaaaatttaacttgggtcatatctgataaatgcttatgttagagagaaataaaacttaagaccagccaaaagcagtcaattaacagaccttaaaaaaaaaaggcaattttgtaactgcaaaccaatcaaataatttctttattttgcttccacattttcccaataaatacttgcctctgacgttttgtcattgcaacactaaagctctttcagtctgatgttctccaattcatgaattgtttcttattcaaagttctcaagatgtgtctcacatttttcctttacacaagaaacacaagcactaacagtgtacgctgactgagtatggcatggaatcgctttagcgaacacccgactaagaggtgtttgggattctttggctccgctgaggggtttgaagccacagggaaggctaggctcccgcacaacgcctcctcgaggggcgtggggacccggccgtgcagcgcggggacagggggccgggggcgcacctggatgtcctcgatcatatggggcctgaacagctcgcggctcagcagggcgtcccagagctggtccacctgcagctcttccaccagccgcagccggcaccgccgcaggagccgccgatccgcttcgtccatggcgagtagccaactaagactccaggccgcctcagtccgcttccgggcctcggccgcccgccccagtccccaggacccgcccccgccccagggcctgcccccgcgtcacggccccgggtcagtcttcgctccccaccgcctccggacgcatctccaaggcctcgccccgcccccaggagtcgctcttgcgtcaccgccccgccctcaggacgcacctctgcgcctcgccccgcccccagggccaagcctcccatcaccgcgccgccccagaacacgctccgcgtcaccgccccgccccagaacccgccccacgtcaccgccccgctccagaatccaccactgcgtccccgccccagaacccgccccgtatccccgcactgacctcacgtcaccgccccgcccccgcgttaccgtcccgcccgcaggacgcatctccaacgcctcgccccgccccaaggattcgctcttgcgtcaccgcctcgccttcaggacgcctccgcgcctcgccctgtccccagggtcaattctggggtcaccgcctgtccccagaacctgccaccgcgtcaccgcccactccccgggacgcatctagaaggtctcgccccgcccccaggattcgctctgcgtcatcgccccgccctcaggacgcacctcagcgcctcgcgccgaccccagaatccattccgcgccaccgccccgcccccaggattcaacccacgcccccaccccgcccccaaggtcaatcttgcgccaccgccccgcccccaagggctagcctcgtgccaccgccccgcctccaagagccaatcccctcccctcgctccaccctcagaatcgtccttgcgtcaccgctcagcctcagactccagttcgcactctcgccccgcccccaaagtcaatcctcacccccaggatccatccttctgtcaccgccccgccccaaggcggcacctccgcgactcgccccgcccccagggccccgccccgcccccgcatcacctccccactccgggcgcaggtgcccttttgcaattctggcaccagttcctggtccaccgcgggcccttcgccagaattcactatagccccgcttttacagagatccggagggagtcgtcacacttccagcaagagggaaaccatgagtggagccgtgatctgtcccgcccattcaacctcctccggggcatggcttccccttagccccctcctccaccccaagtaaaaccataagctcccctcaccgcccttgtgcccagatcgcagttgactgttccaaactcgagtgtctgatccaaccaagcccaccttacacagtcttccattccctcttccctccctcccaccctaacacctcccacacagaaaaaaaaaaaaacggcagaaatctagtcctgtaaactcccatcgttctgaacggttcattttcacatttcaaaaataatcgtttctgtttactgagcatttgctaagtcccaggcatcgtgctagccacttttcatgcttatttcacttatccttaactacaatcctgccaggaaagtattcccaccccccgccggttttacagatgtagaccctagggttcagggaaacgaatgtttaaggtcacttgggtactaagtggccgaggcaggcaggattgaaacccgaacctgactctgtaagccacactcttaagaatccaccttagaatataatctcttgagcaccaaaacctcagccccattcgttcacttctacgaatatttattgagcctgtagtcaaacactaagaacatgaaggtgaacaaaacaaaatccctgcttttagagtttacattccagtggaaggatcaggtgataaactatatcaataaataagacatactatgttagatagtgataaatgcaaagagaaaaaaataaaaacaagacagggagatatgaaagctctttatatccgcaagggatctatctcattggctcaaagaaagtttccttcacttacctgtgccttatccctctctccacccccaccgccctttccccgtgcttaaggcacagactggtacattcttgggtggagctcggttttcggtaaacgggattaaaagtcctggattctctcaaaaaaaaaaaagataagtaaacaaaaataaaaggaatgctggattctaggccttgggcaaatctctgcccctctctggacctcggtctccctatcaatattgcaggagttggagagttaaagaatccctaaggtcacttccaatctgacgctctaaggttctacgaatagggttaaagagaatagggaccagagagtgcgtccccatcctagcaactgttgctagacgagggccatctcccggtaggagcggaaacaccttcctggatcgaggaggtccttctggtatcccatcatgcatagcgacttcgcctcgctaggaggcacgttttggcctctttggtcacgatcagccttttggctgcaaccaaagagcgcgcctcgtttctatagcaaccaccccaggtccacgcctagacggcgagtggcaagggtcaaaatagattcgcccagtagacgccctcgacctgttcggtcctcg

SEQ ID NO: 330 - DNA, 4001 bp, Homo sapiens
agtggctcacacctgtaatcccaacactgaggcaggagaatcacttgaggccaagagtttgagactcatctaggcaacatagcaagactcctatctgtacaaaaaaaaaattttttttaattagccaggcatggtggcatgtgcctaaagtcccagctgctctaaaggctgaggcaggaagaccacttaagcccaggaggtcaaggtcgcagtgagccatgatctcatccctgcactccaggctgggcaagagtgagaccctgcctcaaaataagtgtaagatgtggcaatactgggccatttgttgatatggccatactcagctggagacggagggcagtgcaaaggctatccactatgacgcccatccattggtcctccatgggcatttgagtttgtgatccccgtgaacattcctgaaggcaaggactgtggcctcaaaccattactgttccccagtaggggccacacagaaggcacaaaacttattttattattaatgaataattactcatatgatactcaattatttaaagactctttccctgggccagggcactggccagggatatccagccagccactcacacctactgcacctcatggtaggaaatatctcctgcatcctcacaggcctgtgatgagggtcaaatgagacaaagatgggaaagtgcttttaaacaaaacctcaaatgtttgacttcattattctccattctgcatcaggtcccctcatttccaaaacctcttaacaaaacataaactgaacacagaaggggctggccaaagagggcagggtacgctgatcccccgctctgtgcctagcactacagtttcacatccgttatttcatttagtccttatgacagtattattcttattcccatttcacagcccagaaactgtggctcaaagagggtaagtgactggcccaagaacacgctgccaggcagcctgatgccaaagtgggttcccgaaacctctatgctagaaaagtaaaaacgcacacgcctccttcctcgcaagtattaacgtaaattaaaatggagaccaaccatgaagaattcctgagcagacaaaaccaatcaggtatcctaagtgacctaaatcttgcttaaactgcaaacataagcaaaatttaacttgggtcatatctgataaatgcttatgttagagagaaataaaacttaagaccagccaaaagcagtcaattaacagaccttaaaaaaaaaaggcaattttgtaactgcaaaccaatcaaataatttctttattttgcttccacattttcccaataaatacttgcctctgacgttttgtcattgcaacactaaagctctttcagtctgatgttctccaattcatgaattgtttcttattcaaagttctcaagatgtgtctcacatttttcctttacacaagaaacacaagcactaacagtgtacgctgactgagtatggcatggaatcgctttagcgaacacccgactaagaggtgtttgggattctttggctccgctgaggggtttgaagccacagggaaggctaggctcccgcacaacgcctcctcgaggggcgtggggacccggccgtgcagcgcggggacagggggccgggggcgcacctggatgtcctcgatcatatggggcctgaacagctcgcggctcagcagggcgtcccagagctggtccacctgcagctcttccaccagccgcagccggcaccgccgcaggagccgccgatccgcttcgtccatggcgagtagccaactaagactccaggccgcctcagtccgcttccgggcctcggccgcccgccccagtccccaggacccgcccccgccccagggcctgcccccgcgtcacggccccgggtcagtcttcgctccccaccgcctccggacgcatctccaaggcctcgccccgcccccaggagtcgctcttgcgtcaccgccccgccctcaggacgcacctctgcgcctcgccccgcccccagggccaagcctcccatcaccgcgccgccccagaacacgctccgcgtcaccgccccgccccagaacccgccccacgtcaccgccccgctccagaatccaccactgcgtccccgccccagaacccgccccgtatccccgcactgacctcacgtcaccgccccgcccccgcgttaccgtcccgcccgcaggacgcatctccaacgcctcgccccgccccaaggattcgctcttgcgtcaccgcctcgccttcaggacgcctccgcgcctcgccctgtccccagggtcaattctggggtcaccgcctgtccccagaacctgccaccgcgtcaccgcccactccccgggacgcatctagaaggtctcgccccgcccccaggattcgctctgcgtcatcgccccgccctcaggacgcacctcagcgcctcgcgccgaccccagaatccattccgcgccaccgccccgcccccaggattcaacccacgcccccaccccgcccccaaggtcaatcttgcgccaccgccccgcccccaagggctagcctcgtgccaccgccccgcctccaagagccaatcccctcccctcgctccaccctcagaatcgtccttgcgtcaccgctcagcctcagactccagttcgcactctcgccccgcccccaaagtcaatcctcacccccaggatccatccttctgtcaccgccccgccccaaggcggcacctccgcgactcgccccgcccccagggccccgccccgcccccgcatcacctccccactccgggcgcaggtgcccttttgcaattctggcaccagttcctggtccaccgcgggcccttcgccagaattcactatagccccgcttttacagagatccggagggagtcgtcacacttccagcaagagggaaaccatgagtggagccgtgatctgtcccgcccattcaacctcctccggggcatggcttccccttagccccctcctccaccccaagtaaaaccataagctcccctcaccgcccttgtgcccagatcgcagttgactgttccaaactcgagtgtctgatccaaccaagcccaccttacacagtcttccattccctcttccctccctcccaccctaacacctcccacacagaaaaaaaaaaaaacggcagaaatctagtcctgtaaactcccatcgttctgaacggttcattttcacatttcaaaaataatcgtttctgtttactgagcatttgctaagtcccaggcatcgtgctagccacttttcatgcttatttcacttatccttaactacaatcctgccaggaaagtattcccaccccccgccggttttacagatgtagaccctagggttcagggaaacgaatgtttaaggtcacttgggtactaagtggccgaggcaggcaggattgaaacccgaacctgactctgtaagccacactcttaagaatccaccttagaatataatctcttgagcaccaaaacctcagccccattcgttcacttctacgaatatttattgagcctgtagtcaaacactaagaacatgaaggtgaacaaaacaaaatccctgcttttagagtttacattccagtggaaggatcaggtgataaactatatcaataaataagacatactatgttagatagtgataaatgcaaagagaaaaaaataaaaacaagacagggagatatgaaagctctttatatccgcaagggatctatctcattggctcaaagaaagtttccttcacttacctgtgccttatccctctctccacccccaccgccctttccccgtgcttaaggcacagactggtacattcttgggtggagctcggttttcggtaaacgggattaaaagtcctggattctctcaaaaaaaaaaaagataagtaaacaaaaataaaaggaatgctggattctaggccttgggcaaatctctgcccctctctggacctcggtctccctatcaatattgcaggagttggagagttaaagaatccctaaggtc

SEQ ID NO: 331 - DNA, 4001 bp, Homo sapiens
gggccccttccctccttcagggttgagtcctgcattccatcctgctcaagtcacacctggaggtccctgtccctggtcaagggccaagctcagtgtggggttgatcttggaagtccctgagattcttcagagtgactcccaatgggaagaattttggagggtgggagggtagtggtgggtctggtcatgttgttgaggagttggggaaggccagagagctgagataagaggtcaccatttgttaccccccagagggagagagactgacagcgaccggacagttctccccatcagggcccaactttcccctttcgcactctacttcagcctgtccttaggctgtggacagtcacacctggaggtccctgcccccataagccttccagcttagcgttcaaccctgattttctctgctgtgggcacagcttgcagctctacccccactcagcacagactcaggtactgtgattctcagaggggtggggaagggaggcggttggcaggtggatggccagggatactgagcactcaggataaaaatactcggctcattaatcagatggcaggttctagcacccagcaggggtgcacaaaatgagagcctgtggttctggtgtctcaccctgaaatgctccaagctctggacaagctgaggccagagaaggggccacaggagcttggacaagaaaactcacatcccatttcctaaaggtgtgtgtgtatgaacacattcccaaacataggttttttttcttttcttatgataacttctttctcctttgggcctgaagtcattttggaggtgaggagacttttcccacaaaaagaagattggggaagacattctgacacctcctgcaaccataagaattttccagtgagggcatccagcttatccaatggagacaaatggggaattagggagggggaaggaagagagaggggactgggagtccaatgggaggcatgatctctaggagatatttaaacatggcatgcaagtatcataacatttacatttacactcagtttggatctctttggggtgcagcccctgaagtatgtggagaggacgtgttctggctaagcagatgggtggggtaggggagtgcaatatacactgctgttctcccctggccctccaagtacctccctttttcaccctcagtgtcctagccaaacctaagtcaaatactaccagcctcctatagcagggaggggagctcttcctgcagcacccctgctaaaggtttcctgacgctgatagtacttttgggttcctgagactctgtttctcatttgactaaagccacatgccacttgcatcctgttggtcaggacagggttcctaccacactgcccctcacccccagatcccatcctcaaagagctacatgggtgtaggataggggattccggagaggggctagacatgctctgcaggcctgcagtgcccccaactcacctccaggatcagctcctccatctcaaattgtctttgtgaggccttgtcatcctcggggggttcatggtagaggagtgccagcacctcatacttcttgaacacattcttgtagttctttgcattgacattgatcacacggtccacaccatcgtactcagggaagtccagcccttcctgcccctgtacccctgacttgggtgtccctagcaccagcagcaacagcagtgccagccgcagacccggcacagctctgggccccatcctgtctgtagcactcatggaggtagtgggatctgggttggctctcctggtccagaagaggttagctggggtagggaggggcccctgggtcccagattctgagttaggggctcaagtgggaggggggattggggaatggcccagagcagtggacagagggcactgctgggtcctggagaaactgccgacagagccaagggaaaaagggtcaggtggaggaataggagcagggggcggggagggaaccggagctgccccctgaaattggcacccctcagtccccacctggtcctgtctaaatatgtctccatggttggcaggagagacggataaccttctgaggccaggacagctccatgcgggccggaatcctcccacctcctacacttctaccccaggctcccaggggctccttccctccccctcctccagtgtccagggcacctcagccccggtccccacactggcctaagagctcatcgccatattaagaaaggaaaaggagagatgccggagctaaaaataagaccagatgagtcggaggtaaatgaagctggggctgggggaggggaggtataagggtaattagggtgggccgagggtggggcaagggtaattagaagttaaatgcagtggagaggaggagctaactgggtcagaggctaaattgataatataggacaaaagggggacaaatgtggtattggctctatgtcctaaagcctgggaatcttctgtaggtgaagtctgattctgattctttgatactatgtaggagagtggggcgataaaagtgcaagccaggctgcaggaaagagaccccctccactttcttttaaagaaccaggaccaaggatgaggtcattctctgaataaaagatggagccgcgtccaagactggcaacctggctcagctccagccagtttcctttgcttcactcagcactcctaacttgggaatgcagggaaggacagggctggcccagatcctgtcctgtagagatgtgggtttggggtttctctgcctataaagcccacaatgagaaggggtctgtcctttggttgccacctgtgtgtgcactccctaccctgatcctatgggactcggttttctggggcacagtgggaagggaggttttcccaggctgcatgcttccaaggagagtgaatagctactatttattcccatgtctttgacaagacaaagaggatcaggtattgacaccagggcaaaaaaaaattaacattaggcaagcatgaagaggtgaaccctgtgccctgaaccaagactgatgattaattctgtgcacccgagatccaaagcagagatgggcgggtaggggcttaaacttctggatccagcttggggggtgaggacagagtagtgagtttaactctggatacgtaggaaggaaggatcctcttcatggccctccagggttcttactatgcacaggtaaactgaggcatgagggagaccatagagggtcagatcaaagtcacatgctgccactgcaccctgaggtatctctgattctagagggacagtggtgttttttttgttttgttttgcatccagggagggtcatgtaattatgttagcagaataacttttccacatgtctgtgtggtggaccttacacagctgaacacggaaggccacagaaaatctcaaaagcatggcaggagtgaggccaagagggacagctgtcactgtagcaggagaggttggagctagcctaagcacagcacgttggagctgaagagacctcagaagcccatatcctggtctccctgaagagtggctaacgtgggaaagccccaaggccagagcaaaggcagccaggtgagatggggaggcctgcccagaagcagatgatctaggtgatgtccagccctgatttctcacttctgcattccaggggaggcgggagacactgggacagagacgctggagcataaaacttgttccatcttgaatctgaccttttgtacccccaagagtatgagatgggactctggtggcgagtctgttccatctcctggtcctttcctacagctaccggacattgccatccatcccgttccctctcgttgccctctctggctccagtcccacccttcccctttccagcgcccgcccccactgctctctcttgatgcttcactctgtctactttctactcagtctccttcccttcaggcccttggacttgagaagcctcagccactggtatcaaatgaccgtgagttggggcctctgtatttttaaccc

SEQ ID NO: 332 - DNA, 4001 bp, Homo sapiens
gtttctgttcatgattttgcatagtctttggggacagatatacttgggggagctagagatgatagatagatagatagatagatagatagatagatagatagatagatagatagaaggatgatagaaagatatttcttttttaaaaaaaattagaatcagaaatgaatgtccttgcctgtactggccacccaaaggcattcttttggagttctaggctaactggacagcgatgagcatataggggagaatccttatgccttcaattaagttttcataacaatgtctcttgataactgagtatggcagtttgagatggagatataatgtaagtgttggtttcatgtgctaagcagcagctaagttctatgtctcgttcttttccagcctgtgatttgctcatttctataaaataaagtcttaataactatccctgctttctcttttcttgcaacccacagagagaactgaaattccacattcagcacccaaggttggagatatacttttgatgtatttgggatagttttgctggattttattacagtcaatttttcaatttgaaaaaattcaaatccacatgggttttatatgataatcctattaaactatttcatcaacctgagttctctgattgtgctggttaataaactgtaattctcaaatatccctttcacaggtttgcgcctgggctaggcgtggagactgatgaggcatcttggtgcccactagcattcttggcaccctcaggccctcttaaagtgtaagccatcttaagctgtccaggaggagctgcaggaatagtttctggggcactcgcaaaggattagaaaatgggccccagtgccaggttacaaacaggcaggccatgtaatgcggataaaataagaactgacttcagctctgccctaaagtcacaccaagaactttctgagaaaaaaaatcacataaatgaatatgctgctcagaagatctgcacacaactacattctgtaatgctgactgacgcaaaacaagagagaggaaagtcatttagtgatattctccgtctgacccccagagagacgcaaggtcaagtaactctggtctctccaggatcatggggagatttgagggagcaaagtgggcacactgaatgaaatccacaagtagtccctggatttcatttcagccaacagttttaacaatagtttctacattctatctgggaaacaatggctgggacaagggcccttgaaaagtcaagggggccataaagactttacatcagacccatcgtagtgtagcacgtttggtcctcttcatttgaagagttaggacccacccctcattgttcacacatcccagctgtgtgacaagggcatctgattcacgtgaggccaaaataaagcagagttcagtatatattctctgcatcctcgttcccatatcccaacccctggccaaaggcattccctcggcacctcactgaggcagcgcagacagcatgccctttggttacttacctcaagcacgatttctttcagttggaactgtttttgcgtgaccttatctgaagacaccggctcatggtagtagaggcaaagcaagtcatatttctttaaaacctgcttgaagttcttctcggaaagacttaccactcggtccttcccatcatatgtggggaaattaagcccctcttctgccctgcaagaggacagaaaataaatccccacaataaacaagtgagttctcttcatttgggaaaacttttgtttctcgttcccaaatatgctgtgtgcagaatagaggacagaagactgttagaggccttgttgagccaaggagagagcagacaggctgattttctctcttctttgcccttcctggggctgaaaagtgactcttcacctccttgggtccagccagctctggaatcgtgggctcaggacaaagagcagaggcacacacacacacacacgcacgcacgcacgcacgcatgagagtagaaaaacagccaagctagggaggctgggaggccaagccccagataccttacatagctctgctcagcctctgtctcattaggaactccatttttaggatgcagttgtttcaggctaaaaataaatcatgcaatgaataaaaaagttagatacgacactgtagagggattcgctgatacagtctgtccgactggtgaagagggaagaggcagaaggaaaaagacaagaatgtacacgcatgaaataaggaggctagaaaggtcaaagaagagaaagaaactcgagagggagagagataagggactatggtgccaataagcaaatggagagttcaaacatacggaatgacactcatacattactgaattgttaaatcaccccagggtggtaactcagcctgtcccctcacggtggttgttcatcctctgttcctcactgcaacatggaacaaaatggagccccgaggtagacttcttcatgttctactcctgtctttttctgccttccctcctctcttcttaaaaatcctctgccagccactgggcgaggggtgcagggacaccctgctgaacccagctgacaccagaagaacctgtcctcattaaactaaaatgaaacaaggttcacagttcaaatccctactctgccttttaacagctaatgaactttggagggtcacttgccctctctgattctcagttcccctctatgtaaagtggggctgataataaccataaagtttcaaacacatagatgaaaaagcatggcacaaaataggtgctcaaaaatagtagctattatacttacttctcattggagctggtggaacattggttatataatggatatttgtctgtttctaatatgaatggtttgtgaaccctttcttgtccattttctccttgaatccagtaggcaattggggcaaaagggatcagggctcatcctaccgctgagctaacagcaacttgtctgagtttgcagcatttctaactgccggagcaagaatccaaccctgcctcaaagctgctgctcctggctgttttgcctctgactctgggtgattcccttgcagacaccccttttcttaagtaccttcttgaccatctcttccagtccaaccctagtccagtcatgtctctccactcttcaaaggcatctagggcattcatgattctgaccaagtttttgttctccttcagttataaatcagctttggaaagacagagtactctgtcatgcacagcttctgcaggggctagaaggcaaagagaagatccgtggcctctctgagtaaagcaaggctcccctgcagtcagacggccttacactgagagtcaggctgataaggggttgtcttgatgctacactctcatgtgcagaaagttggggccttgaagaacccatcactaaaacccttgacggtattccgttctttctaatggtgtagtctctaagttttcaaaagatggagccaagaatatccattctaaggtgcacttagctttccaagtcagtggcaagcatgcaagatctctgctttctttaggaaatttaaggggaaaaagatttccgagtgaaacaatgtgtgtcttgtctttttgaggtcagcctccccagactgttcccagttgtctcgatctcactgggttacctttatttagaatttgctccacttttcttaatatgtaagtaggttttttttaactgttactgaaaaattggaagctatttaaagtcagagtcttttaatttccttctgacttataattgacaaaactataagggaaaagaaataattttttaaactttagtttagccttcaactctggtttactacaaaaagcccgagctgtggaaagttcctgcccctagatcatggactcgatttgggccaggcagcccagccctgaggacatgcagccactgacatatgctgtggtgatcaggtttcccccaagcatccatggtagatatgaggtctacattcatgccccactctcagcaaaaggtaggttt

SEQ ID NO: 333 - DNA, 4001 bp, Homo sapiens
ccaactccggacccgggtcggggatgacttggaagaagaatctgcgcccaccccttagagaaaaatctattattattatcttaatctacgcccccaaagtgtccctccagccgtgattgacggcgcatacacctgttcccttcgcggaggagcttccagcgccggggacagacattcgcccaaacgctccgcagcggcccagcaaccgcccgcccgcccgcgcccggccagcccccgccagcggccccagcgcgcctctgcccgcacctcgccaccccggcggccgccccctccccttccagacccggctgcccggcccgccagctcccggcagtgctggcttcggaaagagagagaaagaacagaaagcaaaacttcctggcggccgacggccatcagctgcacattctgcaaatgccaccgagtaaaaataaaccggccgccgctccgcccgtccggctcaccccgggcgcacgaatcggccccctgccccgggagatccctgactcggtctggcccgatcccccattcccgcgcgccccctggatccccgctccccgacgctcctccgtcagtcaccacgctctcctttgccgttaagccggaccctaagtgaccgggaaaccggctctctccctttggtgttccctgcgcccccacaaactacttttttctctgtccttcaccaggtgcctatttcagccctgtgcccttggattcagggctcctcctccccaattgttgagctccgaggtcaccctcagcccaccctgggggaacagaccccgaccgaccctctcccacgctgcagagcccccccggagcgcaccactctaccagcccgctagcccgccagcccagcgtcccacgtccccgggcgcaacttctcttctggcgcacacaacagccggcaacaactcgcccgaactttccccgggacccaggcgggctccagccgacagccgggcagctctgggccgatgccccggctccccgtgccctgtgttgccagcccttcagctggggaggcagggggtggggtggggaagggagtgaggaacgccacttgccgcgcctggagcagcgcacttgagataaacttcccaggcacagatgaaaaagggggcgccgctccccccatctaagaaatctcttgccttcgatttcctatgggggataccctttggcaccccgcgcctaagcgaacactgcctacctctgctggcagcacctacacccggtatccgggcacaagagccggctggaggggttccccacccaccccttcccatgggcaaagtcttgcaaagtcaccccaggcacccctcaccccgcctccttctctgccctggagagcgcacgacccctctgctgctggggggtggggtggggtgggggtttaaggggaaggagtgattacccggtattggagatcacctgcccccccgggagcccacagcgcgtggggcgcccccaccctatttgcaaagtcctgtgctcgcgcctggcacctccctctcttctcccctaccccgccaccccctcagttggagtaagcgacccccaggaggagcagccctcccctcccccggagccgcgcgccgggcattcccctggccacggcaggcaacgcgccgccccgcgcccgggtgccagccctccgtgccccctgcctccgcacggccggagttgggtggcagccgccgatcgcaggctggctggctggctcgctcgctcgctcgctcgcccgctccctgctgcaagcggcagccccgggggtggggggggtgcaccgggacagggggagagacggggaggcgccccgggaggcccgcggagctgggggacgtgggggggccgcggcggagggagcgccgagtctcttacctgcacttggggcggctttgggtgactttccaagtccgggggaaaaatgtgtgtgtgtttgggatggagcgccgcgggcgcgcatgcgctgcccaaagttgccggatcccggatttttcgctcccagtctccgctctcgcccgctgtgattatggaattctccgcggccgggcgggcgagtgggtggcatgcaaaacccgggccggatcgcggggccgggctccgctccaccctcacacccccagacctgcccctcccggatccttcccacccaccgcccgggctgagctcagcgtgtgcgcgcggcgagtcgcacggcctgcggaggagcatctgagcgctcggcccccttttgcaggtccagaggcttctacacccccccccagctgagttgagttgaggctaggggaaaagagagaagggatgggggggggggttactttccacctgttctgaaccccgagagagcccgagttcggttcccactttcgacagaagaactggctcttttttgcaagttagaatgttagaactgtggaacccaaaggaacgaaatgttctcactgtttgatatctgctttgcacttattctttgcaagggagtttttcattcaatctattgtgcaagaaataaatccttaagtgagcaagataggccgtgcagaatgaaccttacatggaggggctggggggggggcagataatacacattaaaacaagtggataatgttatttcagagagtgaaagtatccatgaagaaaataaaccaaggcaataggctaaaaagtgtcttgggggccggcatggtggtttacgcctgtaatcccagcactttgggaggccgaggcaggagcatcggttgagcccaggagttcgagaccagcttgggcaacatagctagacctcatttctgacaaaacaaaacaaagcagtgtcttgcgagagataatccccttgcccccagatgggggggaagggccttttgaggggcactttcatactttattgaagaaacccccttttctcccatacccagacttcccatttcccagttggtttgaggtggccacaccagctgagcctagtagtcagcttcagtgctgaggccctgtagctctggtcttgcctttctcagcaagcgcacccctcattccaggcctgagctgcttttcccttcagcataagcgtgggatggaaatatcgagaggcatgaaagaaactgaaaacacccagatgatgagataagtgagaaactgaccataacagtaaacgaaatagatcaatgatttgtggaataaatgaatataaattcaaagtatgacccacagcttcaagccctgctcaacagaatgcattaaactaagaggcaatgccacaggctggtaaacattgttgcaggctggtagtatttggagcctaatctgcaaggtgtcaggaaagcctctcaggaccagagaaacgacccaaaaccctgtatgatgattgtctaagacaagcatcttccgggatgcattcccatgtcctgccttaaactggaagttaattgtccagaagcatatggacacagactggagacatgatggccctctggccctgaggaggccaggatttgccctgtgccctaataaagccaacaaatttgggagaggaagctgagccatcccacactccttagatactcagtgatatttgcttgtgttagatggactggggaagaaaccagctcaaaaaaccagctcctcacttcctggaatagttctgggggtccattcaggatctgtccacacaggaaagccagatttagacattagacacatgtttcgggttcattttgttttcccccctccttatcccaataattgactggaagcagcaacacaacgataattaacatccctcaaagaccactgattggttactctccattgccgcccccaccatccaaggcattctcagctctcaggggttgagggctcacccaccatctctaagacccttgtgcctggtgacttagcaggatgcacagccccagagatctcaagcccaatcttgtcatcctacagaaggagaaactgaggcacagtgaggggcagtaacctgagaagtggcaagg

SEQ ID NO: 334 - DNA, 4001 bp, Homo sapiens
agagcgagaacctgtctctacaaaaaaaattttttttttgagatagagtctcgctctgtcgcccaggctggagtgcagtggcacaaactcggctcaccgcaacctccgcctccctgcttcaagcgattatcctgcctcagcctctcaagtggctgggattataggcgcccaccaccatgcctggctaatttttgtatttttaatagagacggggtttcaccatgttggccaggctggtcttgaactcctgacctcaggtgatccacccactttggcctgccaaagtgttgggattacaggcatgaaccactgcgcctggctcaaaaacatttttttaattaggcatggtagctcgtgcctgtagtcctagctacttgggaggctgaggcaggaggatcacttgagtccaggagttcaaggctgcattgagccaagatggcgccactgcacaccagcctgggtgacagagtgagaccttgtctctaaaaaaaaaaaaaaagaaattaaaacatcaaggataagtcacactaaacttcaagttggacacagagaagtctctcacatgctgtttcttttccccaaaaagtctcccccacctctctttgcctggccaactcctacgtgctctttttttctgtttctttgttgtggtgactgagatcacatcctacttctttactctcagctccagtgtcactttctccaggaagccagctctgacccctgagattaggttcgagtgccttcgttgagcctccatgtactctgggtgctacttgagcacttgtaatgacagtttctgtgtgtctgagacaggacccagttgtgcttattatccctgggaccctggcagtctgcacagtcagtgcctggcactgagtgattctcccttagtgactgctggttagaattggataccccttctccacaaggcacccatttgcctccctctgctcacaccattcttctcctgtccctcctgtacaaatccaatgcattcctcaaagccaggctgcagagccctctccatcatgaagtcttccttgatctccagattcctagaaggtcagagctgacagacccttgaagagcatccaatccaaccatcatagacagatgaggagcctgaggccggaagagttcttgccccaggccccccattagggttagtggggcagaggtcatgctggcatcccacctggtccaggtaggagttggtacggagagcgatggtgatggcattgatcaccagcagcagggccagcagcagttggaaggcggggtgtcggagcagctgcttgatgtacatgtgagtgatgaactcctgcatgtcccaggcgtcctggaagagggcaggaccttccttcaggcaggtgtcaccataggaagcctctgcctgggggtttgctcttagagaatgggggttcctggggcccactctagaggggggaaatcatctgagagtggatcatggaatggagacatcagtgtagagatcactatctaaatggccactaaaagtgggttactatcgggggattttgtggaagtcattgccagagaatctctttgggctctctgatagtgaagatgatcgttatataagggttcctatggggggcattgccagagagttactaacatatcatgggcagtcactcagggatcagtgctagggagggtcttctgggggcgtttagagggtagaggggcagagttaccatgagggcctgctgcccatgagcacagctgcagaaggggccactgtggggcgagagctatccttaccgctttgttcgtgatttcctggcggttgatgagcacttgctcctctggccgaccgtaggactcgtgaatggtactctgcaggggagaggggcggcccctcagtgcagctactgcccctccaaaccccatacggtcctcctgagtcccgccccacccctcgaggcctgtatgggaggtccattgctgccaccaggccttttcattatccctcatgtttgctcagtctcttccttctcctcaaagaatcttcactccaagtggtctcactccccctcgtggtgatatcacagaggcctctgtgacctccagccgtctgcattctactgaggaattccaacctggagagaagctcctcccattggccctcctccgcatcccacagaggaagtctggggatgctgtggggatgctgggctggggttggaagtcagaggctgatgggagcaggtcagatttcccgtgcagcctgaatggagtcacagggacatgtccctgccttggatccaggaggtggaggtgaggctggaatgaggagtgaaggagagaagtgttttccccagggccttcccagggcagacctcaacctgcacccttccccaccagctgccctgtcctaccagcccagtctccaggactgtccccaccacctttccgtgcaaagtgcatttccccatctacaaagtggaagtttctcattgtgtgccccccgggaatggggtaggagatcaccattagccttcaaagagctggggagaggtggacatgagtcggagccctcattagccatgggtcatcccccaccatcctggcaggcttggagctcgggtacagagcccaggccaacgggctgcacgaagggtctgccacccaccctctggccaagagcactcaccccagtccccacaggggggcagatttccaattcgaatatggaagtaaagttacatgtagactcattcttagaaaaattgactttatttggttggaaagtagccctcatgtaaaataaagaacacctgtacagacctggtttgggggagaactgccaaggaactggaggggcagggctgtggccccagaggttggaggatttggggggagagtttcttctttggcaagggagagggtggcacaaagcccaggcagaggggtcagctcggggtgagaccatgactagcagtactacttcccaccctgaacagaatccagggatgctctgtcctggacacgtcagaagctggggttgaggtggccctcgggtcaaaggtcaggagctagagtgctggccagggtcagaggtcaggaggtcggaggctgctctctgaggtcagggggcagagatgggagtgctcttcagggtcagagggcagggagtggggggactgttctgtggagtcagaggtcaagatgtgggagctgccttcagcctgtgccactccccaggcccccaggccctctgagtacagctcccggttctgctccttccactggcggaacttctctcctgtcagctcagggtcacccagcacttcttctaggacctgcagctcctgcagctttgcctgtgtggagaggaggggctaagggaccatgatcacccagggaagtgggcagagcccgaggccagacttcactccggaggtccggtgcctggaagccagcacctggccagcgtggcacgaggagcctaggtgagactcaaatccccactcggaacccagagcctggcccagtccacagctgagcccgctgtcagctgctaagcccagggtccggagctgagtctggagtctggagtctggtgcccagggtggaggtgacagccgcaaaccaaagcctgaagcccagagcctagtcccttgctgtgcccagagccccccagctgaccttgagtgtgctctgtagcgcccgcacacggtgcactcgctcattgagctgagggtctcggttgcgccgcatgaaagagctccgccactgttcctgggtcaggggctgtggctggcctaggagggacacgccaccctgcctcagcccccgtaccattccttccagtgcctcttcactgctgtctgtgggagggaagagcaggatgaggatgtgcccaccccagcccccagcccagctcccaactccagcccagcacctgtcagagagccaaaggaggtccgtgggctgcgctgtgtgggggtggctgcaggtgatgtgtctccatg

SEQ ID NO: 335 - DNA, 4001 bp, Homo sapiens
ggggcacagccatctgtccctaggcagtgaagtcctcccactgactacagccctcatgccctggcatccctggctaacaagcaaagttgtgaccctatctaaggaacctttgagagcactgaggtcccatcagaacatcctaaactttggtgattcctgaaccctctccccacttgtatgtggaagagactagtaggagggtgtctaagggctctgccacctccaggaggcactgctccaagtctctgaactaatgggggaactacatgtgatccagtttgcctaagttgtctagggacccccatccccaaaccgacccagtagcctagaaggctaagttccatacctgcttggcagcggccaccccttggcctctggcctgagggcccttccgaggtcttggccctggcatcatggcagcctagatacctatggaagagttacagagattcaggctggagtagcccataagccacgcccccaacagtgctacccgtggtaaggtgtggatagtaaactcccaaagaaggcaatgctgaacaccaaagtatgggttacctttaattaaagcactgaagcagcacaggccatgggagggatggggatcacctgttaatgggtttactgaggaatgttctgaacggactcaaatttaaaaagcacattcagggaagtactctaggttcagggtgggtggaaggctgggtagaattcagaaaggctctaaagctgtgcttatggaagccacagctggctatttaattttaaatttcaatgaattaaaatgaaataaagctaaaaatccagtccatcagccacaacagacacattccaagtgcttaacagccatatgtggtgaggggctatgaccagacagcacacacacagaacattttcatcatccaaggacatgtcatcaaagttccatctcacagctgagctctggagaaagctggctcagcattctgattcccataaagatctcacagttattcacaggacctcctgtgtcagaccttgcgctgggcactgggagcgcagaaatgaacctaagacggtctcagccttcaatgaccatttacagggtggaggtggactacacggggttgccccaggggccatgggtgccctgaggtgaccccttcttcagccctgggagaaaaggctcctccttcgaggcggtgacgcctgagctgagtcacgcaaagaagttgggggaaagagggaaataggattccaagacgagggaacacttgacggctctgaagtggggagcagcttggcctgtacaatggaacctgaggcctggtatgactggggcataagcggtgaggcctgaatgcacaagccgaggtggaaatgtgagcaagcggcagaatatgaaaacctctaagccgaaaagcgtttgggcattattctgagggcgctgggaaagaagtggcgggatcgtatcggtgtttcagaaaccccattctggcaccaaaggggaggtgcacagaaggtagggggaaaaggcaggaagccggcgcatctcgccacagcgctggcggggagaccagctgacgggcgtggaggcggcggggagcgggcggaggagctggcgggcgctccgggggactctgagtgtcagatttcgggagtgactccggctcaggtgaaagcgaggccagacactccaaggctgcggccccgatgacacagccaggcctcacggaaggtgggcaacggagtccgtagggggaggcgacacgggacccccactcccgcgctgcgggacgcgccgccctgccccgcccgcgccgcctccatctacccccgcggtccccagaactccccacgccgaggggcggggacgcggcatacctcgcggtgaatccgagccaaaccccggccttgtctcacccggcaccgccctgggctcccgcgggccctgggccgcagcggtagcgacaggaagcgccagcaggggaggtggctcgcgcgcaacacgtgaccccactggccggcggccggcagtgcgcatgtgcacggctacgcgggcggggggctccaacaggtgacaccggggcggggttcgcagcgcgcaggcgcgttcgggtaggtagcgcaggacaggaactctgggcggttccgccggggcgtccaccggccggctccaatgaggtcgctgcgcccagccctcgcccacttgcagcctctccaccgaacctcctccctcactcagcccgaggcgctgggcgctcgctcgctcgctggacctaccccgcctccagccctcgccccgccccaccgagcaagagggcggggcctacccaagctccgccctggaagagagacaggggcggggctcacctgcttgtccatgtcctttaagcctggggaaatggaaatggggcccaccatatgtttcttaataattcagcacctgaaagtatccttttccggtccgttgaaaacttcagacaggcagagctcgctgcacatcttaaatactttacagagtctaacactaagttctcactcgcctaccctgctgtgcaatcaaatggcatggaggatattaaggagagaaacggagtatacccgttttctgccaagcttgtgtcagtcacttttcataatggagcttataccagttctcaatcctgcaagatggacatcatctctagaagaaacggaggctcagagagaattatttgcccagggaaatacaaaaccaacctctttagcatcagtaaatatgctctagtctagttttctaaggaaagcacgtttctccctgcggcttgcagagtccagttaacaagagattgagctcaggagtccgagaccagcctgggcaacatggcgaaaccctgtctctacaaaaaattacaaatattagccgggtgtggtggtgcgtgcctgtagtcctacctactgagaggccgaggcaggagaatcgctgtggccccggaggtccaagctgcaatgagctgtcaactgcactccaacccgggtgacaaggtgagaccctgtctcaaactaaaacaaacaaaaaaaccgagagcggagtaatggggaagtggccagattcccatctaaagtaaccacttcgattttggggggaaagagaacggcttaaaaggaaaatttgatatgggaagcatgcaagaattgtacagagtacaacgtctgtgtgtcttgttctggtggctatcttgggtcccagcctacctggagcgtgggctggtctcatctccacaatggccccgctgttgactagccaccttgaagtaatctttggaattttgcagctgtgtctccaggcttggtttgtctgtctcaagattagcccttggaacttctcagaaggcagataattaaatactagcatacagtaagataaatgtgaagggagtatatacagtgagaaagggagggatatggggtctattttacagctaagggaaaaggcttttgcagtttgcttcaaggttgtatcttgaaacccaagagaaaggaaaaaaagttttaaaatgtattttaaagttaaactgctggattagtttcttctgtctaaaacattgccatctcctctcctgcctatgccttgaacttttaaattatgttttctagttagcgatctcccagtttacttggacaaagggcttttccatctcctgattgcttactttttttcttttttttttttttgagacaggatctcattctgtcacccaggctagagtgcagtggtgcgatctccactcactgcaacctgcacctcccaggctcaagcaatcctctcacctcagcctcttgagtagctgggaccacaggcacgtgccaccatgcccagcatttttttttttttttttgtagaaacatgtttttgctatgtgcccaggctgatctcaaactcctgagctcaggggatcaacccacatcagcctcccaaagtgctgggattacaggcgtgagccaccatgccctgcccattaccatatttaaattgagat

SEQ ID NO: 336 - DNA, 4001 bp, Homo sapiens
gtatttttctagtttctccctaaaaacaatttctgtgaagaaaacctggcaacttatgaatcaggatgatctacgtgatctaattatagcatattatgcataaagtccatattccaaaacgcatgatctatagaaatgaaactgtcgatttattatcaacggtttagactgtttaaaatgaagattcagaaagtatgcttggcagatttgggggtggcccgaagctgagaaagctggtgaattttggggggccgaatataaagctaaaaggcagacaagcccgtcaaaataaatcctaagaaacttaaagctctagacttaaatccaaatgatcaatttatacttcacacatggggaggagaggtagtaagagatttaatttgacaaagtccagaacatctgggttaactgcaagttcaagcaagattaacatgaggcaaaaagggctacagctaataatgcgccgcccacactgttacaagagtccgaccactgtaaagatgattttcctttcacactctaccttgttagtttgcttctagaatgtttataaggttcaccgatacaacagagggtatctagacggtgaacaaagtcctggacgggggagtacagtggaaggatgcgcttcaaagccacgtctttagaacaagagcggaaagaattagccaaagttgggcagcatatgctttaaggagacacgagcctgaaattgctgaaaaactgttctatgaaaatggattcgtgtaactataaacttctccagaaggaaagcagtgcggctgcctggctgatagcaggaattcggttttggctcccgaagtcagacttgctaagggctgacctgcagccccagtccccctcaggtggccgccaaggagccacgcgtgggcgaagcgaaggaaggatttctgcgccactcgactccaaaagcaacagactgcctttctgttttaactacaaatgttggattctgctaagcttcatttataaggcaacgtaacagccttggtattcttttggtttttttttttttgagacggagtcttgctctgtcgcccaggctggagtgcagtggcccgatctcggctcactgcaagctccgcctcccgggttcacgccattttcctgcctcagcctcccgagtagctgggactacaggcgcccgccaccacgcccggctaattttttgtatttttagtacagacggggtttcaccgtgttagccaggatggtctcgatctcctgacctcgtgatccgcccgcctcggcctcccaaagtgctgcgattacaggggtgagcctctttcgtatttttaaattaagagtcccaaagtcattcttctcagactgccttctaaaagcccaaacagcgaaatcaagagtaaaagcgccaagacggtgacccgggtctaggggattcccccctggaggccagtcacctcggcgccttcccctcaaactgctaatctagggccgactccctgcagccacccccgcaggcggccccgcagcgactccggcaagaggagcccgacctccgttccctcgccccgtacgccgggacggccctagtcagtccgcacggaagcgccgcgccgcgccgcgcgcccgccccactcacctatccggtgcgggaacctcgcctccctaggctcgagtcccgactgggcttgagggcccggctgggcgggattcggacgcggggggcggagccgggacagggattgactctggggtttgcactcagtgcgcgctttggcggaggggtaggccaggatctctaggctggaagagactggatgaggggtgtttttttgggaggggaggggcgggatttgggcagttccgggcttgcgggaacaagggggcggggcgggggcgagcccggatgtggccagggattggctgtggagtgtgactcacggcgcgcgatgacggtggggtccgccgcgatcgcggaatggatggaaatggaggagggaaggggtgggggccacgggttgggcttgagtgaggaaggggacaagatggaggatggcctggacgtggccggggattggctatgggtgtggactcagggaactccattggctgtggagtcggccgggatcacatgctggttcaggcatgcgtaggtgcgggctcgagttagtggggcggggacttggatatgggtatggaatttggccccagggctcgaatcggatgtatgcgactgatcgggttggggcaggttataggacgaggactggtttgcaaggatgggcaagctgtggggccgctgggcttgtacaagtggagggatcgggttggaataactttggaaggtgcctgagagagggcagggctagagagagtgtgaaaaggggttcctagatgcatttgtcatttgagatgggggtgtggggttaaaaagcgtaaaggaacttcactttcctggatatgagtttgatcagcaaactaagaatgaaagggacatgtgagactgaagaaggaagaaaaatgacactaaaaagcgaaaaagaaaattctctaggaaaacaaggaaaccactggtgacttctttggggagggcagtgtcagcgaaaggagagtttttgttaaaaattgaattttatgtttggatatttttcctcttctattttaagaggatgagaggctagagggagtgggagaggcgttagcattgttattcagttctaaaggagggaacaaaagtatacattgattaaaggaatatactcttcaactaggtacaggaagtttcagaagacggttaggtgcatggagaaattattgtgtacaggtaggggcgagcctggatgtggcctgggattggctgtggagtgtgactcagcgcgcactggctgtggggtcccccgcgattggtgatcatactacatctcacctttaggagggaggaaaagtgcagggctaaagctgtaatcggcaaagaagcaacaatcatattagctgggggaggaggaaaggtgtagggctaaagctgtaatcggcaaagaagcaacaatcatattagctgggggaggaggatagtttggtatttttgtagtttgcacagtgacctttttaaaaatctggttaggcaaaaatagtgtgatcttgtttgttgtctcacttcattatgatcacagaatgacctggtatgatgttagtgttttatgagagtgttatgttttaacaggggaacaccgcagtcaattcctaacaacactaaagtgtcagttctgttcgtgacaccaagggctgtttttctttttctcatataatgttgaggcaactgggaagaatgaggtagagaaaacatgtgtcttaaaccttacattctggtagggagagacaagcaatagacaagtaagtataaaaaatgactttagagggtggtaagtgctatgaaagaagcagtgatgggtggagatagctgcaaatttaaataggatggtcaggaagtcttttttgaggaggtgacattagaactcagaattgaatggtaaggaagcagccttgcaaaaatgattctggaaagggaaataggagttgaaaaggccctgaatgtacaaaaaggccgtgtaagtgagtccttgaaattactagctaataggccgggtatggtggctcacgcctgtaatcccagcactttgggaggccaaggtgggtgggtggatcatcaggtcaggagttcgagaccagcctgaccaacatggtgaaaccctgtctctactaaaaatacaaaaaaattagccaggggtggtggtgcatgcctgtaatcctagctactcaggagactgaggcaggagaactgcttcgacccgggaggcagaggttgcagtgagccgagattgtgccaccgtacttcagcctgggtgacagagtgagactccatctcaaaaaaaaaaaaaaaaaaaaaagaaaaagaaattactagctaataggtatattgccctttacccttttatcttgttttctgaatacaaaaatta

SEQ ID NO: 337 - DNA, 4001 bp, Homo sapiens
tcccccaagagttgggcccacaaatgggttggcggagccctgtggatacagggatacacacgtgcagacatgaactaggggagtcacaaacacgggtcttgttccccatgcactgtctgcctgagccaggcctgctggggagagataagtgggatgggatagggttggggtgctcactgacccaagggtgcccgacccctctgcatttgcaaggccaagatttctgcctccaagcgccggttttcagcctccactactggaagctcccctgaggtggcacctgcccttcctgcgatgaacaagtgtgacctgtcacctttgacctctggtgactggccgcgtccggctgtgagcagctctccagcgctaaggctcttcggataaggctggacttgtcagctcacatgccatccacagccacaggccctccctcgagttcttttctcctcccaggactgaccaccgctggcgagaggccctcctgttcacctctgcgggtctgcgaccgctgcagctccagtgcagacgcctccacctgcaactgccatatctggcccagcacgccggggtcccggcccccgtctcgaatgtaggcctcccgcagcgccctagggagtggggaacaggaaggccgtctttccagaactgctcagcgcttcgccctatgcccatctccggccccggctctcaccggatttcggcagccagagttcccgggttggccttttgcactggagaataaagttctgcctctcgccgggagctcagcgggttcctggggtggcaggcgacgcgcagggagacggtaacgcatcagaggccccggggctgcagccagcccgcccctcccaccccggagccgcatgttccggggatccgcttagtcgggtctcaccctggctccgcctgcagctcctgaatgcgggcccccaacacctctagagctccccgcgtcctcccggcctcagcttgtagttctcgaatctcctgctccaggccgaagaggcgggacatcccgccccgcgtacaggccacaacttggaggcgtcggctcagttctgagggaatgcgggccgagtcagaaccggcccgagcaagcttaagccaaacggcgagggcagaggaggtccttggtccccgtcccccatctccttcaccctcgccgcgtagctgcagggcccggctctgcgcttccatctccgccacgcgcctcgcgcgagtcctgaacagcgcccgcagccgctcgctggggcttcccaccgcctcggacatgggactctgaggccgcgcctcggaacgtgtccagggccccgcgaacaccctggggacctctgttatccagggccgcatttcctgtagggatagccgcagccactgcacctggaggtaacagcgatccgcgatctctgcgtgggcagaatctgtcccaagtatgatctacaggtttggggaagacgctcaacgttttgagccctgggggaaggtaggtagctctacctcctctgttaacctctttagagcagatctactggcctgctggtctgggaggccctggggttcttgtggcacgccctggtgttcttgtggcacaacctggggatagggtgtagtaggatgaggaatcataaaggtcctggctcctttgaatccccacccatggccatggaggcccttaccgcggcccgctggggttcagtggcaactgatgcctgtgctccaaatgtcatctcttgggtcgggtggccaatgcagaagcgctgagtatgggtggctaacagagctgaggagcggaaaaccatgtcacaggtcccacagggcaggagcgcaggctccccagagtgggagtccatgggatgggacccgtttcctgaaaccagccaagacctgcagaagggatcaagggcaggggaaaggcagaggaggatgaaagagacataaagccagaggcagagaggaaaggccgtgtctattaggtctgtgagatcttcaagtttgtttggggagagccttagctccctggacagcaaccacagggctgggcaggtcaggagaatgggtggggaaacctcggccgtttgggaggagccactggcttgaaaaagtgttacaaagtctgaacgtgggcaagtctctaattgtagcttggtttccctgactattaataaagaggaaaaagcagctgcctcctagactaggctgggcccttatcacttactacatcattggtcatttaatagcctctaaaaggcaagtgtcatctttttcattgctgtactcccaagtggatgtaacagtttgtaccattctccaatccagagaactacctggcaaaggaggcactctgacctttccagcattctgcctggaaaccatgtcgcaccagggatagcagtctccctaactcccattccctgattcctcatttttcagctgtagacgaagataatcagcacagcccaagaaatgaaagctgtgggcgaacagaatgaatctatcagatgagggaatcaagtccagaaaaaaaccccttctctctcccaagattggccagaagccagaaagaccctgaactgttggtgaaattcttcactccactcccactcccaaaatatatggaggagctctgaggtgaccgcatatttcttaagaaaccctctttacttttttttttttctttttgagatggagtctcgctgtcgcccaggccgaagtgcagtggcgcgatctcagctcactgcaatgagctctgcctcctgggttcacgccattctcctgcctcagcctcccaagtagctgagactacaggtgcccaccaccacgcttggctcattttttgtattttttagtagagacggggtttcaccatgttagccaggatggtcttgatctcctgacctcgtgatctgcccgccttggcctcccaaagtgctgggattacaggcgtaaggcactgcgcccggccaagaaacacccttttctcttctttttttgagacagtctcgctctgttgcccaggctacagtgcaatggcacgatctcggctcactgcaagctctgcctcccaggttgacaccattctcctgcctcagcctccccagtagctgggactacaggcacctgccaccacacccggcttttttttttttttttttttagacggagtctcgctctttcgcccaggccgaagtgcagtggcactatctgggctcactgcaagctccgccttccgggttcaagccattctcctgcctcagcctcccgagtagctgagactacaggtgcccaccactgtgcccggctaattttttttgtatttttagtagagatggggtttcaccgtgtcagccaggatggtcttgatctcctgaccttgtgatccgcccgcctcggcgtgccaaagtgctgagattacaggcgtgagccactgcgcccagccttatgcctggctaattttttgtatttttagtagagacggggtttcacagtgttagccaggatggtctcgatctcctgacctcgtgattcccccgcctcggcctcccaaagtgctgggattacaggtgtgagccaccatgcctggccgaaactcccttttctaaacaagacagggacttaagacatttccctactcagtacctaaagccaaggtatgacccaccagcagcaagttacaaagtgttcaaagtatgtcatctcagttcagcttaattccaactgacataaagagtacatttttagaaatatgttctcagaaaacaagtaaatggcaaagcccaaatcaaaacctccttttcaacaactaagtttgtcccaattttcaatggttaagacttttgactggttgactttacaatggtgcaacagtgataggcattcagtagaaatactactaccattttttttttttttccctcaagagacagcttgtagttctctaatctcctgctctaggccgaagaggcgggagcaggactgtcatccaggctggattgtagtggtgc

SEQ ID NO: 338 - DNA, 4001 bp, Homo sapiens
ataacatttggcaggtcaactcatagaaatgaagaaaagcttttgtttcttcagtggatgagtatctctagggttgtgaaactactaaatttctttgcatataaaaatcacaataaagcatcacattttattattgtaattaatacaataaaaaactaaagctttataatctccactactacagagctttctgcgcaatcttaaaattacattcctctttcagatcccatttacctttttcactgtagcatctccttcaacgcccttcttagcattctgatcccatcccaagttccaaaaggttaaaagtcctgtgcattacgttcaggaccgcaatgtacttagagaagctcaatattttgaatgaattaacgaatactaaactgtccttccttccctcatccagttagaatggtatgttacatttattccccactcaaaaattctcagatgtagggaggaagattaaaaagaaaactcccaccttatggaaagaaagtggcaggaaattaaatgagatactatgtaatcttaatagacaaactggttctatcctctttcccttttttgtttccacaaatttgcttctgcttaagtgacaagactctcgcagacaagtcaataaatcaggtccccatcctgctttacctattcaacatctctagctctctgtaggatggtgaaggagaaaagggtagagaaaattgggcaaattctataataccatttggtactatatatttcatcttaaatcaggttttagttcaacatctgtgtattgccatgcaagaaataactcccagtccgggcgcggtggctcacgccggtaatcccagcactttgggaggtcaaggcgggtggatcacgaggtcaaaagttaaagaccaacctggccaagatggtgaaaccccgtatctactaaaaatacaaaaaaattagccgggggtggtggcgagcgcctgtaatctcagctactcgggaggctgaggcagagaattgcttgaacctgggaggcggaggttgcagtgagccgagatcgcgccactgcactccagcctgggcgacagagtgagactcggtctcaaaaaaaaaagaaagaactccctaactcttctgcagtagcaatgaatatatttgatactaaaatgttttcattttcctagtgggacatttactgtcaaatgaatgtccttaacttcaatttacagtagttacccaaaaaaggctatcttcactgactatgcatacctagaaaagcacatcatcctactcaccgaccttaacaacatcatctttcggccctaattaacaatgtgtttgtaggtttgcacacgcacacccatcaaacgaaggacaagtgttcttttataccctatgtatgtgatacaatgggctgtagtcgaaaaagattcctcattttggaaagaagtcataactttatgtagtagtctcctgtctcaagatcgcttgacacagctaatcttacatccgtctgaaagaagcgggggcgggggtgggggacggaagtgacagtttcctctttttttttttttttttaattttatagagacagtggctcgccatattgccaaggctggcctcgaactcctgggctcaagcaatccttccgcctcgacatcccaaagtgctgaggtaacaggcgtaagccactgcgcccggcctcctatttttcatcaaataaaatacaaccgttcagagcagcatgctcagcaaccacgaggaccagtcccagcgcatccaaggtgccgggagggaaaggaacagaactcccccaggtaagccggtttccccacgccaaggcgcagtcgctcaccacccaaatcgtcgctggggagagacccacccggcgactgcgcgcttcgcactcgagtctgcgttaggaagcctctgaccctttcccgggcccctgcgcgtggaagcctcggacacaactcggagaaccagcgaaccccggcagcacagaattcgaaccgccgcgggagccgttgggacgcgcctacccggtcactgccccgccccggcgcagactgcgtgaggcgccgccgaaggcgcggggcttgccggggatcgtggtcggcgagcgcgcccgagcccactagcggagcccgcccgggactacatttcccacaattaccgccatgatgcccattggtgggggaagccatgggaaccggaggccgtcagggggagaggcgggcggcgctcacgcctggcctgagggggccgagactgaggcggttgcggaataggactgctagccccgcccagagtccctaccctttggagaactgcgcttctctttcggagggagtgttcgccgccgccgcggccgccacctggagtttcttcagactccagatttccctgtcaaccacgaggagtccagagaggaaacgcggagcggagacaacagtacctgacgcctctttcagcccgggatcgccccagcagggatgggcgacaagatctggctgcccttccccgtgctccttctggccgctctgcctccggtgctgctgcctggggcggccggcttcacaccttccctcgatagcgacttcacctttacccttcccgccggccagaaggagtgcttctaccagcccatgcccctgaaggcctcgctggagatcgagtaccaagtaagtgcggaggataaaccagcctccttcctttaacccagctgcactgcgttgtcgcctctcacccgtttagaaacttctggtggacggccctggtggtgaagaggcgagggccgttcaggaagccagcccgctccgcgcaggcgcgcgaggcgaggcgaggctctcgctggggccggggacccagaacttaggctggacctggaattgatgactacccgccttctcccctttcctccggtgggaaggaggccagaactggtgatgtcgctggcttttctctttgtttcctaattcgcccactgcttttcttagccactacacgctctcatactgagaatttcacaatgcagaactgatacacgttctccttcatcattggacaaggtgatgacacttgtttgaatcacccccacccctttcacacagttcagatgttacaaatcactgtctttgcttcagttaagggtttttggattatgatcgtgtaattggcattaagcccgattttgaaattttttggaagacgctgttgctatatttaatgatacatttccgtttaagttatatatccattattttcaaaagatcaaatcgtatattaaaactttataacctttcttttcattttttcattgagcattgtaagcatttccctcgtgtcattgttttttttttttttttttgagacggagtctcgctttgttgctcaagctagagttggagtgcagtggcgctatctcggctcattgcaacctccgcctcccgggttcaagcgattctcctgcctcagccttccgagtagctgagattacagacgtgcgccaccatgcccagctaatttttgtatttttagtagagacggggtttcaccatgttggccaggctggtctcgaactcccgacctcaggcgatccacccgcctcggcctcccaaagtgctgggattacaggcgtgagccaccatgcctagcatgttttctttttagtatctgcataatattcttgctgggaattaccttattttatgtagtcatggtggtagggggtaatttcttagaagaaatcttgttcgttccacagcaaattccgatgttttcaggtagcagtacaggggggaaagaaaaggcattgatgtgtttcatctttcagttttttagaagttaattataatcatcaaatgttaattttttaagttgatgtagagaattgtttttaaataccaggtactgtcacatacagagcaaaataaaaagttgtagaattttttatacgatggaactttaggattaagttgtatatagatacacacgataagcacagagaataaaatatctaa

SEQ ID NO: 339 - DNA, 4001 bp, Homo sapiens
atttgctaaaggactcaaaagtaagcccttcaataatttctaaatcaggttgagcacaaattttgaagtgatctggagaaatcaagtcaacacttcagagtgagtttcacttcctaactgcaagacaagctaaattgcttaagctattatatctaactacctaccaattaaaagcaagggcaccatgaatgatacagaataaaactcactgtaatccgaaatacttacagtaaaaatagtacttttcacagtcacaatgccttggaataatcagttttcttttcagagcagggatcttgaaatttattattttaagatgtttgagttacataaatattataagaatatttctttggaactcttcagtgctttcccttattttatgataaacatagttctgaacttataaataaatggttgcctgaagactttagtagatatgttttattgtttacagagaatcacacacacatgaaaactaaaatttaaaatgaaaacataaaatctgtataataaaagcacagtaattaaaaatttaacaggttaggggtctttaagtcatactattatgccataattcaaaggaaaaaaaagccatagttaaggtaactctgagaagtaaattaagtcacatcaaatctgaagtgcaattcttttgttgtaacttaaaaacaaaaaaacaccctcatggccggttctcaagtaaacaaagaacataaattacaaactctggttatcaaatcccttaagcctttttcaaatgcgtcacaggatattcaaccccttcaattcttttaatcttcatcaccagggtactgtccatatggtacagaatcaacaagctagaacaaaaatacatcttatacaaacaaaatcacttaacacttcctactttatgcttgtgagtttcacacatttaaatttcaacatttatcatcagtaaaaatctaggtaaacggcttagaccagctctaccctcttaatacggaactgtagtaagagacggaaataaattccttcctccctgagtgtctggtaaatcccatgtggataggtgaactgccgatctttcagtaggagtcttaaaccaagtccacatgtatacataattttgataactttcttccagaattcaggatattcaaaaatagtttaaataattgggtcccatcttacagcgttttaaacatatgcttgcttaaaaatctaagaactgaaagcatgtcaaagagaatgccttttaatataaagtaagtacttaagcaaaaactaatccatacatcatgaaaccatctggcccattattcctgtgtatcctgccaagactgtgatcctataagtaagtttttaaaaaatcataaactgtcacaaagtatgatgataaatattttatggactttaggtgataattttaatctgtattcaggatcccaaggtaccaccaacgaaatgaataccattgcctcctcatggaagctacaatttcgggagtgactttttctcccagggacaaaattattactttccacgttcaagaactttgagaggggaaagaatatgacaaaaatttagtctaagctactctcagacgagtatccttcatacatagtgaagaaaggtgttaccagacttccccaccagtgccagactcggtggacctcggactccagaggataaggcgccaccagaaagcttcttccctcactacctaccctccctcccagctataccagacgtttatacctttaccctctatcccaccattaacatctccgcatcgtccttcccttctctccctctatatccctcttgcctgtgtaaaatgcggcggctgggatcacagagatggccgggggagttctcctctcctcctctttctaagctcttcacattgaggcaaaggagaccccggcacctgcctccgcggcagccaggaccacactgccatggcaacagcgtgcctctgcgtcctccatccgggcctctctaactacgagagcgacaaaaatctgcgcaggcgcatgcaatatcctcagaccaccgacccctcccggcacccatcccggtgcttgcgaagggccagtgaagctgaggtttctaaggggacgactaaggaatccacgcatcactaacgttatagagactcgcgaagtgccgctgtgttggttgtgaaatttccctcttgtagctgtctctcgtcagatttagaatttcttaggacaacttctaaaactatatttctatatgttatgtgcttcacagttaacgtagaaaagtagtttttagttttcattagtagataagcaaattgctaatgagttaccatatttttgaccctcagcttctttttttcctaatcaaaaccaaaactttacccaagagagttgccaaagaaaataggatttttgctctagctttgaggcatgtcaaaatggtcaactagaattttctcaaattctgcttatctttatgtataaaggcaaagcaagatgaatttagattgtggtgaaagttgagatgattttaacaactatccattcccagccagaaataaataagaactgggagaagtaaaaatatttcctcagtacaatccagtgtgttcggattatttttaaattgtttattattaggatttctatcacttgatgtgatggagagcaccttttctccaagagaggcaatgtaaaattaaatttttagatattcttcaagttatagacttaaggtcttttaaaatggaaggttaaaatgaattgtaatattgagtgcacttcctagatgtggtgtagttgtaatgacctaatgttgctactgcttcagcgcttgaaaaaagacgctcccaaaaaaggttattcactgctaaaggttgaaggaattttagtcaaatctcctttaatggatgtagagttgtagagttacttaccaaagctggaagtagaccctaggtttcagaactcctaggttaatagttttttcctctgaccatcctcctaaatttgtatttttcaaataatgggtgatagcagctttttttttaagtatcaggttttgggggaacaggtggtgtttggttacatggataagttctttagcggtgatttctgagattttggtgcacccatcacctgagcagtgtacactgtacccaatatgtagagtttttttgtttgtttctttgtttgtttgttttgtttttgagacagagtctcgctctgtcacccaggctggagtgaagtggcacgatctgggctcacttcaacctccatctcccgggttcaagcgattcttgtgccttagcccccagagtagctgaaactacaggcacgccaccacacctggctaagtttttgtatttttagtagagatgggttttcaccatgttgcccaagctgttctccaacaactgagctcaggcagtctgcccacctgggcctcttaaccaatatgtagtttttttatgcctcatcctgctcccaccctttctcccaagtccccaaagtccactgtatcatctttacgcctttgcatcctcatagcttagctcccacttacaagtgagaacatatgatgtttggttttccattcctgagttacttcacttagaataatgatgaaataacctccatttccatccaggtagctacgatgccacaatttcattccttcatatgactgagtagtattccatggtatgtatatgtaccacattttctttatccactcgttggttgatgggcatttggtttggttctttatttttgtaattgcgaattgtgctgcgataaacatgtgcaagtgtctttttcacataatgacttcttttcctctgggtagatacacggtagtgggattgctgcatcaaatggtagatctacttttagttctttaaagaatctccacactgttttccatagtgattgtactagtttacattcccatcaccagtataaaagtgttccctgttcaccacatccatgccaacatctgttgtttttttt

SEQ ID NO: 340 - DNA, 4001 bp, Homo sapiens
ttctgtgatttcatcttttgtatctaaattttatacatatttattttatactgtatatctcttataattccaatatctgaaatcattagactcttaatctgtttgttgttctgctgactcttacttgcagttgcttatttatttatgtctttggtgatttttaatagtctttaatttttaataattaatttctaatagtaaatattttacatatttatttgatctgagagtaatagtccaccaaacgtcctattaacttcttatactctactgtggtttcttgggggttgtaagaggataaaaatcatgcatatgggattgcagttgacaaatattaaaataattattcattctcgtttgtacagcagtgagtaaaaaataaaataaaataaaaagggcaataattatttattatgcttttttatttctccaaatttcctaccataaacacataatgcttttaaaactatgaaataataaaataatcatggaaccagaatatttgccaaacacaaaatcaagtagcaaaattttatttgcattatgaaataggattttaggtcacttcctaagaggctagttattcaaaattaaggtgtccccttctttgtgctttcctattccacactgtggataactctatcaatgcagaggcttaagaggaaatgatttctcgagatgatttttgaaatattgcttctgatagaagctagaatttctacccatctgggagcaccttagccccggtccagaatccctggctcaatgctggaatcccttcatcattagacataaccatgtcttgttattaaaatggatatagagacatgacttacgggtaagcatatttaggtatggtatttatacctaaggaaaggagcccaaaatgcagagaaaatagcagggtgaggagcacagaataaaaaagaaaaaactataactgggagttaattacaagggttggagataaaaacagaccttgaggcctattgttggttacttggataatttcccactatggctattctctgggatacggccttttacttagtcaagcataagacacaagcaagaatttccaggtagctgttttctccaagtgctcgatcctagagattagtactgacctagaatttaaggtccatctttgtcaaccctcccagaacatcagaagtcttccatggtttttggcatcctgtggggaataatggtcaagttacgcagtttgaaattaggaaaaaaaaaaaaaaaaaaaaaaaaggaggaggcggaggggaagcaggagcagatagaactatatcaaacagatgagcaaacttagaggttttaaatatttaaatattaaatagtttttgttaacatttcagcatttgggacagcacttgggcctgtgattcctctgaaagacttttctggagggtaagattttcctttggaaagggttgttacccccttttatttacttattttaaaggaagacaattcgataataaactatttcagtgggtgatttgtagcggtcagtaccgtttactgaagacgtttaaaacgtcacagaccgcagccaacgcccttcccaatacctgatgtgtgaatttccttcatcttgtggtttggcgtgggttttggaggaggagtttcagaaaacggtcaacatcggcacagttagggctttataaacaggctatccagagttcgactcctcctcctgcactggctagtcttgagagcctcttcccgggaaaaactcgggtggaaagaccatccgaggggagtgagccgcagaatcacgtaggggctgcagcgcccgccgccggctagccggtaatgcgcaggcacagggaggggcgcacgcggagaaggggtaggtacggcgggcttgcagcaggcaaggcaacctgcttccagtcttcagccgcacacccagaaggagggagtcgctggccgggagatcgggctccaggttttctgtctcactccacgcgcacaaattggaccccaagacacctcactccgttgccacttacccacccatcgtgggacatactcagcacacccatctgacggctgctcttgccctgcctggcattgttttctgagctctgctttctgagcaaggcctactcccccaacccttccccactgcggttaatatcttacaaacttgacagtggaactggggccaaagtgaccattaatttgccgggtagggtgggaatcagaatcctggtttatccgcttcatagatgtgtaatcttggcaggttatttaaactttctaagctactttttgaaacgtaaacacacattgtagaatgttaatttagcaacctcagatcagtcctgttttcgttttttccactgccttaagtcataaaagggcttccttacctactacacccagccaattgcaatggcaatccagctagcaattttaggtagtatcttcccatacaattcatcatatccatctttgccagattaaatttcttaaaaataagcttagtcattactccccatccccatctccagttaataatcattacaaaatgactcacgctgtcttcccaactctatctcatcctactcttctacacatattccttgttgactgtacccatctcctgcactttctggcattcatatcttcacttgtggccctttctccactacacagttcccctttccacatttctgttaaaatcctacccatcctgcatggtcaacttaaatgccatcttcaggaagccactcctgattttcccagtgtcctcattctctcttccagaccgaagccttttgttatgatacctatcttgtattgcagttgtgtacctctgttatcctttctacttatcttttccaattatacatcttagggtccttgagggaaagaaccacgactttttcatctctgtatcctcacaggtgctttccaaaatatgaactaaaaataaggggaggatttagaaagcttctgatcattttcatttcgattgaaacattcaaagtttcttttgagagtgcaatgttgaaattggtagctacaaattagttgtaaatggagagcaaggggaaggaaactcatttcttaaatccctgctcagtacttgcaatgtgacaggtgctttcacttatgtttgctcatttcttcacaattctgtgaggtatcataccatttacagatgagaaaactgaggctcaatagagtgactctgctaacgtatcacagctttgagtggcaaacctaacattttgaacccccttctgtagtattacttactgaaaaaagtagaggaactagtatttctacaaggtccttttcaagaatcaaaggagatgatgttaataaatgcccttcctaaagtatgttaaatataaggtattaattatggggaatatgacataataggtaaaacaaatagatatcataccatttctatcatttaagcacaacagtaccttgaataaggcatccagtggactagagatcaacaggcattttaatcttaatattttacactgatgtgcttttttttttctgagacagtctctctatcccacgcaggagtgcagtggtatgatatcagcacactgcaacctccgcctcccaggttcaagcgattcagcctcccaaatagctgggctaatttttgtattttttctagagacggggttttgccttgttggccaggctgatctcgatctcccgccctcaggtgacccacccgccttggcctcccaaagtgctgagattccgtgagccaccgcagtctgatgtgctttttaaaaatgacaactccaattttgtaggctgcatttaaaaatacagtaagaataaggctgggcaaggtggctcatgcctgtaatcccaataatttgggagacaaaggtaggaggatcgcttgaggtcaggagttcaagaccagcctggacaacatagtgagaccccatctctacaaaataacaattcactgggtgtgttggtacccgcctgtgatt

SEQ ID NO: 341 - DNA, 4001 bp, Homo sapiens
cactgtaagccaggcgtccttggttctcagtaacccctgttctgctgacaggcacggagctgggcctctagtaccatctgatcaagggagctgttgggaggcgctctctcctctctcctggaggcctgagggagcttctggaactcctggaagtttgggtctttcccttgggaaatgtgctgcaccctctgctcctttttcttaatggcctccttgatgccctcaatgtgacacttttcctccttctcggctttcagtttcaggatgtggtggtttttctccctcaggtggttgagctcccggaggtgctgcaccttgtccctagtggtcttgtgcacgtgactcctggcctgtcggatcttctcatccgccagctccaccagaattcttttgcgcatcttcctctgttcctctgactcccctgcgcgccacctggcctgctgcaactgctcttcctccttctgggccttctccctcagctcgcgttgccgctccttcctcaggccctggtgtatctcctgggaccgctggaaactttgttccagggacagctgcctaaggagctcctcagccttggcctggcagtccatgaggaccttccgggcctggtaattgatgagggagctcaggttggtgtcctggaccttcttctggccctccacggcatgtaggtgcctcttgcgacaggcttccaccagcctcctctgcagctgcaggctgtgctgctcccggaggttccgtagcatcttctcctgctcccgcaggcgccgcacctggcactgttttcggtgctctgcctgggcgcgcgccttctccagcttctcctggcgcgggctctcctggtcctctggttgctccttccaccggctttcccccgggggcacgttcttcctctggctgtcccgccgcaggccgcgctgctcagggctctggagggtcttgcgctgctccttctcctgccactgctcctggctctgccgcagcagcagccggcgctcccgctccagggtcatctggaccttctgatccgagcgcttcagctcctcccaggccttagccgcctgctgctgcagctcccgtatcctctgggccttcttgagacgggtcagcaccagggccacaatctgctggtcctgggaggacaccaccacctcttccagcttgctcttcaggacctgggtgtgcgggctccgcatctctttgctggaggccaagggctgggagtcccggctggctaatgactcaacctggtcgctgctgtctctcttctgggcgcacacgcaggctgagtgcctcttgaacttttgcgagggcacagaagaccgctccgagggaactgaggaaggggaccagcgacctagatgtctgccgagtggcactgcccactggtctccaccctgtgccttttctaccctgaatgtgccactcaggggagtgccagctcctccggggcaaggcgggggcgagtctccctgggccagagggtaatgcgggcagggctgcggccgctggggtggcagctgggtctgcggctgccaagccgggcggggcttggttcctgtctctccccaggcatcttccaggcgcctgctgcggggccggtgcttcctggaacgttccaggggcctgcgggccacatcgctcaggcttcggctgccccgcagtgaatctgagcacccgcgcctgcgaggccgcggggtgaacgaacagtgcgggtgcagccagcacgccccagcttcgctctccgcacccggagtcccggcccgggagcacgcggtggagtcggctccggacctctgcccgcccagccgctgcgtggactctcgttctccgccgggccgcgggggttcccagagatcccggtagggcggctgggagaagtggctgaagcctgccatccctccctctgggcacgcgcagcgtctgcccaaggggcctgagacctcccgaggacgctgcagacacccgccctgccccccggtcccgaggtccgggtcgcctgtgacgctcgggccacttcacaatgcgcctggcagctgggtcctcgcagtcttcagaccttgcccggcgccgcccaccccagctttgctagcacccggagcacctggaatgggaaggacaggaggctggggatgggggtggtgggggtcgggtgggggagagaggggttgtatgttggaggagggaatatgtaggaaatcagggtgacatttaaagctgagggtgcatagtgtcccccaccagtgtttcagggagaaatttgaactcgcatttgcacacaaacagcaggattttaagagagcccaggtgaaggcgtcaccctcagaatggaaggggtggggagaagggccggggtgcagtctcagggaggaggtacccttagctgcagaatcaccgtcctgcacgtgtgtacctctgcaatgtggtcaaatagaacggctgtggacgcgacaccacccatttgccttttaagttagcaagcccaaagtatgctttaatgtttactttttaagatttttagaaaaggtagaagacgactctatttcctaatatggtaattactgcttttgtcaaaatgtgaatgctgcgtgcacatttctgcaatagcattagtgaacaccatgttgaaatcacatttttttttcccttttcctccaattttgtgggattctcgttccttgttgaggcacccttggctaatgggaaaagcactggatctggtagagaaaaagaatttgaatctcctctaccactcttcactcatgggctcttgggcaaattccctaagtttccctgacctccagttccagcaaggtggaatgggaagtggggcctcatcatatgggcattgcaggactgttgtgagggtcagatgaaattatgcatccagaggttggcaccagaatacattcaataaatattattttggtgccatgctaagcgtcagttaaaagttttaagggttgggctgggtggtggctcatgcctgtaatcctagcatgttgggaaggcaaggcaggaggattccttgagcccaggacttagaccagtctgggcaacatagagagatcctgcttctatataaaaattttaaaaattagctggacatggtgggtgcatttgtagtgccagctactctggaagctgaggtagaaggattgcttgagcccaggaatttgaggctgcagtgagccatgattgtgtcactgcaccccagcctgggcaagagtgagactttgtctcaaaaacaaagtgttaagacttaaagtaatatatgaatttacaaatatttctgcagattcctagcttaagaaaagaatgaaattaatgtaatcctaaaatagtttaagtaaaggatagagtgctagaaaggggagactccaagctctgtcgtgtccacatcatactgtggatcttggctaagtcatttctcttctctggggttgctgtggtctgaaggtttgtgtttcccccaaattcatatgttaaaattctaaccctcaaggtgatagtattaggaggtgattaggtcatatgggtggagccctcatcaatgggattagtgcccttataaaaggagccccagagtaatccctcatcccttctgtcacgcgaggacacagtgaaaagatggccatctctgaaccagggagaggatcctcaccagacaccaaatctgatgtcttgatcttggacttcttagccttcaaaatggtgagaaataaatttcattcatttatatgccacccaatctgtggtattttgttaatagcatctggaagagactaaggcagggttgcaatgaggaaacagttctggatagcattctccaagtatgaccattccttaaagaagaaaaatgagtatttacccacaccagtcctcttcattcacgtctccttgaagcatcacagcaaccccagctaggaaggaccaatagccttgataatattttccactggacaaatctgggacttggccatattaactgatttccccag

SEQ ID NO: 342 - DNA, 4001 bp, Homo sapiens
agagactccatctcaaaaaaaaaaagcaatgtggcaatgtctagtaaaattgagaatgtacccagtaatttttctagttaaataacctacagaaattctaaggcaggtgccaaaggagacacctaaaagcttttcactacagcaatgtttgtaatagcaaaaaatactataaataatttaaatgtgcatctctgtaagaatgaataaatatactaagtaaaatggatgcataaaatagactattataaaaattaatgagaataaactaaattcttatattggcatgaatagttctaaaaaacaatgtaagcaaaatgcaaaataaaatgcaggaattttattaatgtaaaaatttaaaatactactgtatattgttcaaggatatctattaatatatttgaatgtaaaagtataaaaaaaagtagttgtccatggagaagtaaaaggatgtaagacaggaaatgaacaaagcagacagataaacaaaacaaagagggaaaaagagaccagcaagattttccctgacattaaatactaaaataaaatacttatgtctgtatgtggctcaatattggcagggtaaagtttaaagctttttattctcaagttgattgtaatcgttgagagaacaaaggaacacactggtgagtttaaagcttgggcctctacctggcatgagtagctgctttccgcaccaaatccagaacatctgtactgggggtgtctgacacttgcgtgctctctctcattctgaccccttctttccccttacatatcattttttttcctttcttccttcccttgggtctcttaccacaaaagctccgcaccagactggggttctgacactaacttggcatgtgattctgggctgccacctcaccattctgaacctcagtgttgtcccctctaaacctgggagaacacccatcctgcctggaggcaagtatggctcgctgtcagttctcctttctgctgtttctctattccagcatcatctccagcagactacaggcatacagagcctccgccttaatctcacctctgctctttgtctctgcttcagctcctgctgggctgatttctgtttggccttctcaactctgctgacagattctttaactttggttttttctttacgtgcaggtggatccatggcttgacttctggatatttcttaggaggctctgatctgggtggtacagaaagaggcagatcttcaaaacaaaacaaaacaaaaaataccctgccagttactcctctaatcctttagctccgccccatcctttgccaggtgaggcagagtggtctggtggcaagggcgctggatgtgggggagtaggaaccgagtcccaaggccacaacctcgctgggtgtccctgggcaagtctcctccccactttgagccttagttttctgtctgcaaaatgggttaagtgttttcctggcctccctccaggagctgctgtgtgcgggtgaaatgcaaagacccctgtgaaagcgttgcccactgtgcggcgtgcggcacccagcgcggaaccgtcctaatgggacgctgagacccagagggcgcccagggttttcccactgcggccggcctaactccgccgcagcagccgctcctggggccagggggccgggccccatagccagccgggcccgccccccaccgcccggccccccgaccccgccccggcccgcccggccccaggggacggcccccgcctcctgccctcttccctctcctggaggaaaatggcggtcgctggagccgccgaccaagaggcttgggagtctgtacctttcccgaccgggccactggaagttggagcctccgccgagtcgcagacaacgcctccgggagggtaatcctcgccttcccccgaccactggacccagcgctgcctgcccaccgcccctcgtcctgggcggggccgcgcgccggggggaggggcgcagggccgagcgccaggaggcttccgcccgcaggagcggccgcgcgtgcgcagagaggatggctggaaacccgcgtagagggcggggcggggcaagccggtgccggggcggggcaggggcggagccacaccggggtgggtggtggttacggctaaccaaagctttttcccgttatattttctgcaacagctactaggttttagagggtgagatccgaatcctggaattggaattgctcagaattcgaattccgaggctcaatttcttaattcgaaaagtggggattgatgattgccaccttcttcattcatgagtttattgggaggatcaagtgagatcccgtttgccacagtgctttgaaaaaggaaatcttgacagaagtaccaatagccagtataaatacagagaacattcacgttcaactgattaccgaggagatgtaaattaaaatagctggctgtaattttccaggtattacattagcaaggattgacaaaaatgataatagctaccttacatttgggcttactatattccaggcactgttcttacagcttcacatttattaactaattcctcataataagtgtgtataatgtatacgtgtatattattatccccatttacacataagggaacagaagcattgaaaagttaagtgagttgtcccgggtcacacagcttctaagtgctggagcaaatatttcagccaggattcataggacaatggccttatccaaagtaaaaccctgtttgggtccactatttgttcctctatcaaactggcaagaattgaaacaactgatagatgctaagcaagcaatgaactcagcccagatggacacacgcttccagtcaaactgtaaatcgttaacagcctttctggaggtcagtttagtactaggtatcaaaagccttaaaagtgagcacaatgccccaaaaagacaaatactgcatgtttccattcatatgaagtatctaaagcaatcaaagtctaagaaacagaaagtagaatggtgactgccagtggctaggagagagggaaaagaggaattgtttaaagggtatagaattttaggtttgtaaggtgaaaaagttctagagatctactgcacaatgtttattttttatttatttaatttttaaaaaatagatggggtcttgctctgtcacccaggctggagtgcagtggtgtgatcataactcactgtaacctgggctcaagcaatcctcccacctcagcctccaaagtatctgggactacaggcacacaccatcatgcctggctaattttttaaaatttttttgtagagatggagtctcactgtgtttcccagggtgatctggaaatcctgggctcaagtgatcctcctgcctcagtctcccagagtgctgggattacagatgtgagcaattgcgcccagcttttccaaaatttctacagtaaacgtttatactttagcaatcagaggaaagtacattaaatgtctttttaaaaaccctatacaaatgctgattcgattattattaataaaagtaaccaagtcagagtctatttcagaaatcttgatgtagtactggtattttacatttgtgtcacatggtatggtttataacgttcatataagctatgaactagattacagctgaagacacggcaggacctttagaagccagctaaaaacaaaccagctatagggaatggaggagtggaaaagccacatggaagactggaaaagtagtggtgccactgagccactgttgaaagtggagaaggtgtgatgagttggtttgggaaacggtgaggaagaggataagttaggagcgtgtgtgtgtgtgtgtgtgtgtgtgtgtgtgtgtgtgcgcgcgcgcaagagagggaccgagagagagaaagagctagattacgcttcaagtggcaataggcaagaagaattgtccagtgagcaattagaagatttcagaaaagaacggaactggagataccagtttgggattctacattctttattgggaaggtgaaggttggagccaggagggagtga

SEQ ID NO: 343 - DNA, 4001 bp, Homo sapiens
gtagcaccatcttggctcactgcagccttgacatcccgggctcaagtgctcttcccacatcagcctcctgagtagctgggactacaggtgcgtgccaccacgcctgttcaatttttttgcacagatggggtctcactatgttgcccaggcttcttttttttttttcttagagacagggtctttgtcacccaggttggagtgcacaggtgcaatcatagctcactgcagccccgaattcctgagctcaagcaattatcccacctcagcctcccaagtagctgggaatacaggcatgcgccacctcacctgactattttttttttcactttttgtaaagatggggtctccctgtattgcccaggctgatctcaaactcctggcctcaagccatcctcccgcctcagcctcccaaagtgctgggattacaggcatgagccactatgcccggcctttaatttcctcttgtgcaaaatggagattttgcccacctcctcaggctgtgtgaggattagaataagaagttgctgccatccacttatgaatattttatctcattcagtcccagctgtaaataccatttgtgaccatcctcttcagctctccctgcctccctagcccagccctcactcctgttctctaggccagaggaacaaccgcctgctggacatggcttcctttcttccctcttcctacaaagctcttctctttcatctccctgaaaactgctcctcatactacaacacgcagatcaaaccactttctccaggaagctttgcctgtccccaggctaggcaggtgtttcctctgggtttcagtagccctcatgggctgataatctctatcacaagtggcggtggaagtgcccagcccgtgactggaatctcctgcatggagccaggtgcaacccaccagtgggctagggccctctgccaagcagggacagatccctctctcctaccatcaccttacctgggcccaccacctctcatctggaatatctcctgttctggcaaatcacacctgggctcctccaaggcaaagtgcaggaccctggggctatactggacccaagcttgggcctggtccctgcagaaggtgcacaggaaggaagctgagaggctcctttctggaaaccacagaaaaggcaaccctggctccttgttaggggcagcgctagcccacctggtatctagggaaagggcccaggcctgaggctcccacctgccctcacagatggctttgtggcggagaccctggagcaactgccggagctcctggcgcaagaggtcctttaggagaggcggtggtgccagaagagaagaggggtcagagatggggcgggagctgggggcttgagaggatcgagcctcttggagcagtgcccgtaacatcgccacctgcaaggagagctgggataccttgcgactggggaggggagtgtccggaatggtgggggctgggggagtgagggagagggcggagtcaaaggggagaccaggataggatctcgggagttacccggcagggccagggacccgcagaggtgggaaatcacccgagtcgtggggcaggccaggggcgtggcccaccttccctctccccacctccgcccgcagctccaggctcaggtccaccgccgcctcccccagaatcctcttcacttcgcgtcgctcccggagcggaacgtgctcctccaccagctcccacagcgagggggagtgccggagcatgacccaccgacgccgccgtccccggctcggacctacgggccgcaggtcagagtgcgggaggtaccgcgggcccgccggcaacgctcaccaaaccccgcccctctatgggccccgccctctcccaagccccacccgtgctctgccgctggtcccctcggctgggattgcccgttccggaactgccagtccttggcgctctcttctgcccggcttttggccgactcggatgccgggggcccagaaaccaggcagtgggaaccagggccctagccccacctcttccgcgtggccatcacccgggaaaccacgccgcgactctagggccccgccccctcccgtgtttggtccggcgggcggcgcgtgccggctgggagttcagactcacctcggcgctccaccgagccctgacccaagcactttgggctcggccctgggcacctttaggcctcagggaacgtgttaagacctgagaaatctgggtccacgggtttattacttcgtcgcctccactgtcccggaagcagtgcaaggacaaacttccccttaaggccagtgaaagcctagggagtggcagcgcttggagaaccaggatggcccgggtcaggtttacttgttgggccaggttccccaagtgcccttccaccacaacacactcagggtaaccacgttcagggacccgacccccacccccaaacagacaagggagctgctccattcacgttttttactaaagcacccacacaagtttctgtgcaatgtacaaacacaagccggccctggggctcctgcctcctctctcagacagggaggcgggaaccagacttactgatccaagccccacctgcctcccatgcaaaggccaaccccaagatcccaggcagcgacacagcatcccctctggtcccctcctggggctgctcctcagcagggggcgcaccaaagcttgccccctacaatgttgaatgaaaaaggtttcccctcccctgggagcaagggggttcccaagagctgagaattccccctggaagagacactgccccctagacatacctcccacccttccaggccctaggggactcaagggggggaaactgaggcacagagaggtggagtgacctagcccaggccactctgcgaggcagtgcaggggctggcccgaccctgacagtgactggggctgggctagggggagggggtcgggaaggagggttgactccaaagagggccacacttgaagagcctgcccaggcaggaggccccccaaagtgggttctgaaacttccaggtgtagctagggggcctagtgaagacccttggaaaacagagcccagtctcagtcctggaggtcctccacagagcagctgccagccaggctgtggtcagtcctctggcaggcaatcttcggcaccgagagcctctgtccattagtgtcagccccgagggggccacgacggaggccgcccaatgtccactgtgatattggtgaagagtggttgccgagacacctccaagacctggtaccgcactgacccaatgccgtcccgcttcatggtcagcttcgtgttttgaatcttggtaaacctagataggatggaaatggtccacatcagggctaacaactgtaaactaaaaataaaatcctacaccccccaaccaactaaatggacccccttttggccaaggggaccccagggaaccttaaaaacagggtttccagctatgatgggaagggacgtcaaacatgccatgttatgcccacgcccttttgcagcttagacacaacaaatgaccagcattaacgtcaaagcagagatcacaagactgacagaatgcattgtttgtgtcaataagatacctaattataaataggatctaaggccatgccaggcaagggttaagtcttgcacctctgcacttaaagaagagactatgctctaactgccgcgaggattttctttttctgtagcagctaaacaagtacaggacttgagataaccaatattaaaacaatttgtataatgtggtaatataaataatagaaaaaaatttgcagctcacccactgccagatgctgacccctacgcccctgttccacaagccataattatagctttggtgggacaagagactgatctcagtaactttctcctgataagaccatcggccatggactggttctagccagcttacagaggctgcgcacttgagtgcttttgtctttttgacgtatggggcctaactgcgatatatttaaatattaagtctccaccc

SEQ ID NO: 344 - DNA, 4001 bp, Homo sapiens
ggctccctgagcacagagcggatttcaaaagcagcagctggggccactgtggaggccaactctggcggctgctcgcaggctgaagggtgcaggaaggcctcccccggcccctcgactctgacaggcagtttcacaggcggtcctggtggggggctcttaccacagtgggacatggatgtggccctggtgctgaactgggggcagtcaggatgcgtggggaagacccttcgaagttccattttggacatgaagccggtgaggctggcggcatccttgggttcactctggcagagcggggaaagtaagacagacaaggaaggcccctgactgtaggccagcccatccaagggcagaccctgtttccctaaaccatcacaaatcgccccaatggcaggtgcctatgagtcgtatgtagatgcagaccccacacccaggacaccgtgtggcccctcaggcctccccagagacctgcccacaacaaccccctggttctggagcactggctgcccaccgagagcttcttaggcatcctgaagcctagacagacgggggccctgcttctgcctgactgtcggctgagattcacagacaggccccccgaccccacccacacatgctgctggtcacaggcactaagccactctcccactggggttgaaagggcctgcgtgtgtgcaggctgcagcagtgtgtcccctctgtcccctctccagcacactggatgctcagcaagagccacgcagacccactttggaaaccatagtccagccgggcatggtggctcatgcctgtaatcccagcactttgggaggccaaggcgggcagatcacatgaggttgggagtttgagaccagcctgaccaacatggagaaaccccatctctattaaaaatacaaacaaacaaacaaataaaattagccgggcaaggtggcacattgtaatcccagctactctggaggctgaggctggagaatcacttgaacccaggaggtggaggttgcggtgagccaagatcgcgccattgcactccagcccgggtgacaagagtgaaactccgtctcaaaaaaaaaaaaaaaaaaaagaaaaagaaaaaaagaaaccatagtccactaggtccaggcaatgcattcacccaggaagctgccaggagccggggtgaccatctcgggctcccccagtacacggtggcacagcgtacctgactggctgaggtcccctttcacattttctccccttcactctccttttcaagatgcaccttgggagtcttggggcaaactgtacatcttctccccttggccaaccagagacaccgggagccaaggtctgcaagaggggaggaccaacccaaagcagctaacccagaagaagccggtggcatgtggggactaaggcaccaggcccttcagaaagggagaggaccgcagggctctttccacccctagcgctcaattcgttgcctgcctggaatccccctttggtaacccatcaccagaaggcctgtggaatgctttgtgggctgacagctctatgggcctttggggaggagaagaaacaggtcacctcaaggctcgtggcagccctcctcccgggaccccataccgtcttcctgtagtagcggctgatggtctggaccgacttgctgagcgtgcgtggcttttggtgcggtttccattctgggcaccgggcgtcccggctggccatgctctggaggagcaccagggccctggccatcgagctggacatcgaactgtgcctctgagatgggctggcctccttaggtaacatgaggcgtgggatgcaaagaccaagtgagctttgttgcctgaatgtggacctgaatgaggacaggcccggcttttcccgtggatctctcttcagcctggcttggggtgtggaggggaagatggcctcgaacatgaacctgctggctggtgcagtgggaggagatcagcttccagagctccaggtcctgtgggctcctgggagcagtggtggcatcacagatgtctccatagaaaccgttattgagcaaaaggggcccgcggctggatgcgctggaggccagtgctgtgacaccaggtttttgagaagagcaaagctcaatattgaaggttgccttctgggctgggtgtggtggctcacacctgtaatcccagcactttgggatgcccaggtgggaggcatgcttgagcccaggagttaaacattttaattagccaggcatggtggcgtgcacctgtagtcccagctcctcaggaggctgagatgagaggatcacctgagcctggggaggtcgaggttgcagtgagctgtgttcacgtcactgcactccagcctggactacagagtgagaccctatctccaaaagaaaaaagaaaaaaagaaaaaaaaaaagaaagaaaagaaaaaaagaaaagtcagctcccaaggacacaggagtccagctcaaatgtctccatgtgctggcttgaagacagtaattgtattagaaaaggttaggctgggtgcggtggctcatgcctgtaatcccagcactttgggaggccgaggtgggcggatcacgaggtcaggagatcgagaccatcctggctaacacagtgaaatcccgtctctactaaaagtacaaaaaatgagccgggcgtggtggcgggcgcctgtagtcccagctacttgggaggctgaggcaggagaatggcgtgaacccaggaggcggagcttgcagtgagcagagatcgcaccagagcactccagcctgggcaacagagtgagactccatctcaaaaaaaaaaggtttagggggtgggctctgggattagaaacatttggccaagaaatacctagaagagtagataagagtagcctgactccctgggaatgattttccaggcttcaaatgcctacctcaagacatcttttaaggagagaaagacaaaacccctaccttcagaagccttgattagggtctgaatgggaagaaaggcttctctgcttgctgactgaaggaaatttgaagggggcctgccccatccacacctgtgggtatttctcttcaggtggagatgagagactgagaaaagaaacaagacgcagagacaaagtatagagaaagaacagtcagcccaggggaccggcacactcagcatgcaaggacctgcatcggcgctggtctctgagttccctcagtatttatggatcactgtttttactaccttggtgaggggagtgtggcagggcaacagggtgatggtggggagaaggtcagaagggaaacgtgagcaaaggaatctgtatcatgaataagtttaaggaaaagtactgtgcctggatgtgcacgtaggctagatttatgtttcactttacacaaacatctcagtgtagcaaagaggaacagagcagtattgctgccagcatatctcgcctccagccacaggctggttttctcctatctaagagtagaacgaatggtcggctttacaccaagacattctgttccgaaggatgagcaggagatagaaatcttcctcttatctcaactgctgcaaagaggcctccctctttaactactcctcctcagcacagacccttcatgggtatcaggctgggggatgtaaggtctttcctttcccacaaggccacatctcaggctgtctcagtggggggaaaccttggacaggctttcttgggcagaggtccctgcagctttcctcagtgtattgtgtccctggttaatagagaatggaggatggcggtgacttttaccaggcatgctgcctgcaaacggatggttaacaaggcataccctgcacagccctaaatccattaaaccttgattcaatacagcacatgcttctgtgacacagggtttcggctaaagttacagattaacagcatctcaaagcagaacaatttttcttcatacagatcgaaatggagtttcttatgtcttccttttctacatagacacagttacaatctgatctctctttcttttccccaca

SEQ ID NO: 345 - DNA, 4001 bp, Homo sapiens
accaggtaagcctctcagcgtggaacattcactttcttgcagagttgctcactccctcctctgaggcgaatcctcacgctatgtgatcccagtgacccacctggcctttttgccacacagttgagggtagggactgggtctgagtgagctctgagttctcaggggtctgctccagaaaggcatcaattattgcttaggaactaaaggcggaggccccccttgccttcctctctacagtgcaacccagagttggggtccctcctcctttccttcccttctgtacccacctcttgaacttggcccgctgcttgggggatggcagatgaggaagtcctagggccaaggagccgctgtggctggtaggcacagggaccctccgtagtgtgcctggggcctgggctggctgggccaggcagggcttgggactccgtttcttctttttgtcatccattgggcgctggctgggcctcaggcctaggagggaagcaaccccacaaagatagccaggggcaaagttagcccttcacccagaaatccctgagagctgcaccaaggaagggccctgggaccttccagcttgtcacctcatctatacggtaggggcagagccagatgccagtgtctgctgctgggatcgtggatgtacacttgaaggaccttctaaggcccaacctaattccccttctgcctgaaaacctaggcccctcctgaaagggtgggaccagtcacaactatcttggcgctactggggcttcctgtcacggtggctggggggcggggctggcagaggaaatgtagtgggagacaagacggaggtgagctgcagaagcccagccgaagattagggatgtcttaactaaaccctattctatttatcaggggcctaagcagatgctaacaaaccctgtcagcatgggagggggacaaggtgcaggtaggggcgcctgggaaagccccagcgtgtgggtaattgtaggagaagccgcagcatacagggcagggttcattgtgggtttcccccacatagacaccggcatccctccacttccacccacccccaaccgaaaatattagggactccctataggtcccgcgggtgtgctttcagctgcttcatttttcccagtcggaaagtccctgctgggcttcagctgcagccagggtggactgggtggttggccgctggctgcctgggcctccgacaaaggctgcgcctgtggctgggctgctccgaggtccccggtccagcagcgccccccaagcctccggtcggctggggttccctcctctgggggtctcattccaggctgctgctaccgagcctaacttcgaattctgggactgggggggttgggggggtgggtggcgcttaagcatttacactgacacatagctggctgccactgacggggtctgcgggtgtggggaggggagataggagcgcatcctctgcctctccgtgcagcagcttgacccaattagggacctgatagaagaactggagccggagcctgtgctccccaggagcggctggggcgaccggggatctatttcccaagcccgggctccaaagccatgtgccaaactcatcgctcagctccgcagccgcgctcgaagacagagcgtcagacccgcgtcattccgcccccgccctcactccctcagggggctactgacctggaggtttggggtctcgagtgatgcttcggtgcaagttccctccgccctccgccctctcctcccgggaacaccaccgggtgaaagctaagctggagggagttcatttgcatttaaagagaaagtgaccttctccttagcgcggtggggtgagatgggaggagcatccccgcgtatgctaagcagttcctctcactcgacctcacctccccgcctgaacctaggggaccctgttggttgtgtgatgtctattttaaaaagattttccctttcccggcagtttcagagagaagctacagttccttacaaaatggtggtggctttgtcagaaagggggtggggcgggggagaggagagacagagtgagtgagtgagagagagagaatgtaagcacagaagaagcacaagcagcaacagcagcagcatcaggaagacacttcgagcaaagacagccatcaatggagtgagtccagtgccctattgagcactttacatacatttcatccccataacaacccttaaggaagataccagtgtcattccccattctactgaaagtaagcaacagtcttttgagggcaaaacccctctctctacaatgccagacagttttctctggtaagtggtgggggctgtattttgccgcagatgaagtgacaggagtcctccccaccccccaggcctaggagacaggtgtggggagcaccaggtcataaggtagaccacgcgattccctggcacctgactccagtcctcagggaaacctgagcacctgatggaggctgacccagtgtgactgctgctgcctgcagccagatcaatgggggcagctatttaaagccctggcagaggctcctggcgcaggtccccagaacagcatctgatacaacaggagagaggctcatgtttggccaggcggctcagcaggctcaagtgagctggcccagggcagtgcacacagccacccagcccaccttccccatccccgggcaggagtggcttcctggggttgggcctcttggctgatgtggggagccatgggcactgctcctgagggcacctgctcagggcttcttcctgggtacttccaacactcagaacactccacaagggtaaagagtaattccgaactttttcaataaccaggggcccagactggggacaacagaaatccctctccttccccaccggagctgctagagtagacagtggtaatgctgctgacagagggagcacccctgtggttcccatcctcagctgcttcactggggggtcagaaacctcattattctcagagctgctttgcttggaatctccaagagttggggcggcaccccccccacaccctccagaggatctgcgactagaaataacatggccagcatggaaaacatgtatcaggacccagctagaagggtcagaggctctgctgggactgtcacagtcattgtgggcacatctatttgtggaggcctggagggaagggcaggtgggttgtctctgccatttcctgggcattcagcacatatcatcctttgtgcctgaccaacccaggacccagagagaacagggtgctgggtgaggccaccagcagcatgtctcccatataggagtcccatgcttgaggtgggtaaatggggggtgtaaaaactgaacagagaatgtgctctccttaaggaatgcatacaattagaggcccctgtgaattcccttgggcaggccagggctataggagcctacccacagctcagacccaaatagcagtgatgagtgtccacccctcttaacctgggcctcaaatggcctatgcctggctccatgccttttgccttactgctggagcctatcaatttcctattgaaacaccttcagttgccccccctgccctctggatctagcccacattccttaacctggtacccagactctgggcccagcctcaccccctctcccagtcccatggacctgcttcccagctgtaccatttaatcactaaatgacgttcatcttctacctgccctgtggttcagaaggccattccaggtatcaccccctcaccttgctgaagggggcaggggcctcctctctgctctcagcaccattgacctgtctatagctaaaagtaccttttcccttcactagcctgtgagcccccaggtcagggaaaacttttttgtgtgtgtgtgatcctctctgaggcaagggtcttgccaactttgccaagggctccactcaggcagctcaagtgaatatgccagcatcctgaggctgtggcgactgctcaaagacactgtggaatatgtaagataccagggaaccaccat

SEQ ID NO: 346 - DNA, 4001 bp, Homo sapiens
agagcttgctcactctgtcatgtgaggacacagcaagaaggtggccatctgcaagccaggaagagaaccctcaccaggaactgacttggctggcaccttgatcttggacttcccctcctccataactgtgagaaaataaaattctgttctttgagccacctagtctgtggtgtttggttatggcagcccaagctgagacacatagttatactttatttaaaaatgataacatgaaatccctaaattagaactacaagaagaagaaaacagcttcctgaatggtaatacctcactttcaactttcaaggccttctctgcagtgtcaagaccagatgccaactgcttctctctctctctctcttttgaccactcactttcaaacatttcatttttttcttggctcattttcaggatctgtaaaaagcattttacataattaattttatatataatagcagtgtttcctacaaattctgataataacaactttctaactcaataatgaaatcatccaggggatttatgaacctaggaaaactagtttatagctcataagatacatttttctctctaagccttaatttacacaatggtaaaatgtagtaacacttgttctacctacattatagccatcacagtaggaataaaatgtgattttgaaagtattttataaaatttaatcacttatcaaatataaggcagtattgaaatctttccaaattatttgaaaataataaaaattggactcataatgataacagctactttatattgaggacttaccacatgtcagagactatggtaagtatgttagatgcattatttcattttgttttcctaggacccctatgagattggaattattattacattatttttacagaggagacaggtgaggctcagatatgttacataatttgtccaagttcacacagtcagtactggaattctaagtcaagtctaacttaaatctcttacttttaatatctactctattcagccttgccaaagtgaattttctgttatgtaaaaaaacctattaggagataaaattgagatcaaaatacaacttaggaacacaacaaaaactgagccaatttctttgatgagcacactatcaccaagcagcagacccctctccattgtttatttttttaattttttaaaatttatatatataatatatatatatagtagtgatgggatttcaccatgttgcccagcctgttctcaaactcctgggctcaagcgatccactcacctcggcctcccaaagtgctgggattacaggtgtgagccaccgtgcccggccgacccctctccattgtaaaagccaacctgtcaaatgaactaattgcacatttggtttggccagtcaggaagcagctgaaattggcacatctatattttgtaacttgggaaatgcagagtggtatgtaggaacagccctcccagtcctgttctactggtttccaacaatggcatcccgagctagttacctcacttttcttagccttagttcctcatattaaaaatacagataatgatgcctggacatatatgggctcctcacttatagaaaatgctctgtaagtggcagtttatattattattggattgttccaaatttttacattcattcgttagtaaggcaatacctttaaaccatccttataatttcaacataccagtttatcctaaatacattagtaaatgggctccttactgattgagtactcctggcaaggttttctgtaaccactggtcacaatcataggatgtacattcctagaagtgtgctttctccttttgcctattttcagtgattcttgagcatccttatggtgtctgccttacctctattagaaaacgtaactgaaaattatcccttttttcttacctcattcaaatcttgtactttgtctcttgatcttttgtactggtttctcttctatcttcctatgttactgataattcaggctctaacatggaagcctcaatctaaataaatcaccagttacaaaatgtcattttaaaaaatactgaaaaaaagcgacatttcttaagcatcttcttctgaggtagtagccctgaaatcgcttcctagcaacaagtttcacctcctatctggtcttggatccttaagagatttgctttattatggatttgagactttgctgttgtttggtagctgagccaaagggaacaagtattagaaaaatacactacagaatcctgattgttctgaattaatcaaactactaatttacctttcttatgtttaatgtcaataaaacagaaataacaatccaaagctgatgagttagaaagaatggggaatgctattagaaaaatggatactaaaatcctagtgtaacttttataattcctcctgtccagtggtatggacaaaagatgtagtcaagaatcatgtcagcttagcagcactgcacaaggaaatggagaagaataaatgtttttttcccagagtaccttctcccatcagccaccatctgcactggtgaatattttttcagattcacacatgacatgctgatgcattcaacactcaaggcaagaattcctttagccccacccttatggcacctgagatgcttcagtacaaagtagaagaaacatctcaactcttaaatatgaaccccccccctcattttctttgtcttttcctagagtaagaatgtcatgtatttcaatgctataatttttaaaagatagctttcccaaagaatatatatttaaaatttaccataatacgtggcacattgaatatagttatgcctttaggcaatttatatacttaatgagcccagtaaccaaagtttaaagcagaaaaacacaagaaaggggcaataaataatgtgagagatgagcaataggatacagagatctctgagtagcttgagggagcctacctcacctgccagccagcagtaagcaaagaggactaatgacttagcatgggtagccaccaacgactctggagatggtgtaacagctcagaattttccactttcaatgttctactctctgaaaggtggggatcacctaatgctctgaactaaactgtgcctccctgcatagtatgacaagttttattgtcgtcccactgtgtgcttgcgttgtgctgcgccctctcacaggcacagtcaaatgaaaagatgaatgcaggcactgtagaaaataaaatactgcctggtcatcacctgtaggtggaagcggtttatgtgctcagtgctgggtatgctgtagccctcatgagttataataagtcccctatataaatctcctctgtaagttgccccaagagttgttatggtgtagaaaatgagccctggggccagataaacctggatcagctcctggctgcaactattactttggtcaagttcccttaagttctcacaaatatgtaatgggaatactcctgcttactctggggagggctgtgtaaaatatgacaaggtttctcttcaaccaacctaattaatcctttattctttaattctcaatacccctccacctctctttcttcttctttctttctgcttttactacatgcccaggcatgccacaacaccagtgacgttatcaacaccagctcacattcctttccttattttttaaaaaactgactctctaacttgccacagacaaccccttccctctctctcctctctcccttacgtgcccaccttatctaaaaaaaagtttaaatgtttatccaatcaagtctagtttaaattatacagtccaaccccacccagtggggaaagggcacagggacaagatttacgtcaaaactaaaagcttttggccgggcaaggtggctcacgcctgtaatcccagcactttgggaggccgaggcgggtggatcacgaggtcaggagatcgataccacagtgaaacgccgtctctactaaaaatacaaaaacaaaattagccgggcgcggtggcgggcgcctgtagtcccagctacttgg

SEQ ID NO: 347 - DNA, 4001 bp, Homo sapiens
ggctggagtgcagtggtgacatcacagctcactgcagcctcaatctcctggcctcaagcaaacctcctttttcagtctcccaagtgctgagatgacaggtgtgagctcccacatctggtatgagagaatttctggctgtcacatctaaggtggggtactcctgtcatccagtgagtcgagaccagggatgttgctgaatcctgcagcacacaggagaatcccctacaactaaagattacccagccagatgcggtggctgaaatctgtaatcccagtgctttgggaggctaaggccagcaaatccttggagcccaggaatttgagaccagcctgggcaacacagcatgaccccatctttaccaaataaaaaataaaaattagctggcatggttggcgtgctcctatagtcccagctactcaggaggctgaggcaggagaaactcttgagcctaggaggttgaggctgtagtgagccatgatcataccaccgcactctgccctggacaacaggaaacctgtctcaggaggaaaaaaaagattatccagcctgaatgtcaatagtgctgagattaagattccctgctccagagcactcagaaacttgtgggacagaagcagcagcagggccgtgcactgacatgggtaaagcaggaagccagccccagcgcgacccgccacagcgcactgtcctcactggagcccctgcccttactaaaccgcatctactgatgcctctgagcaggctctgttggtggagcttgagactgcgctcatgaatatcccacaggtttagagcctcaggcctgtattgtgttatacaagccttactgtaacttaatcagaaataaagaaaataggcatctatgatagactagacagctctgactgactcactttttgtctctcagctgtcgaaggcggtgaaacacattgatgacgtcccgtatgcgtcttggggcctcttctatcttggaagccaggtggacacaggccattgacacatgctgaagcggaagcattgcaacacgcccatgtttgtccccagccacggcgtcctgacggccgccaaaggcttgagggctattcagaccaaaagggaggtgcacccaggggaaaaaaaaagtcaagaaacagaaccctccggcacagagctcagactggggggcaagtactcactcccttagtaaccgggcaaagtaacaaaccgttttaccctcaacatacttcgctgggaatgaagtgcaggaggaagccttacctccatggagtgcttcacgaaggacttggtataaaagaaccgctggaacaacacctgcccggtagccatggccacctagagtagaagaaagtttccgtattttcaaacgcaccattcaaagccttcgcggccgaaagtcatcgagtaacgtgggactccccacgcagaaccaaacactgaaacgcttcccacgtccacaaaggctcttcgcgtcccgccgtctcgggatccagcgcactggcgggcggggaggccccgggtcaggggcatgggctggctagggaatggcgccgaggctggggtcggggcaggggctggggtcggggtctaggcgggggcggtgcgggcccgactcgccgccaacaaaggcggctgccgccccagcggttacctgggccggaggctcgcggccgcgccctcacctgcggcaggcggagcaggataccggccgcctggatgagctcgcagcccaccacgcggaggtcggtctctgtgtcggtgtcgaggccgctcgacatggacggcgtgaaacggagcttgtcgtcaggcaggaggcagttctccaaggtgatgagcaccccggagtacagcctgtccccgatcagcaccccctgcgaccctgagggtgcgcccccagatcccggggcgccggccgctgccgcgggagctgccgaccctgcagcaccagccgccgccgccgccgccgccattttgtgccgccgactccccttcggcttcttccctcagggcggctcctcgcgaagctccacggccgccaccgccccgccccgtcgcgtgccattggttcggcccgcgaccagcgcgacgccgcctagccgcaattggctacataacctgcccgtcagcaacgcgcctaacgccgacgccggaacctggcgcgggtggggcgggctcgttacccaggggactccgcggtgccggccgacccggaagcatgtctgtccctagcggaggcgcgggtgccgtgctgagagcgcctgcctgtgcgccccgagcggggctgggactcttccaagatgcccacgttcgcacagagaccccggatcgcggaagctcgcgtctcgaaaggcctgtgggtcaaggggggccatctcggtgggatctggggcgggacgacccccactgctgaaccctgggcgcggggcagggtcagaggctccgctcggcctccccctggatgagacgcgcatgcccggtgtcccccggccgccgtcggcgtcgtgtcttcagtccttatcgactccagactttggggatgcgtattaacgccagactcctgcaaagtcttgccttcaacactcagcccctggggagagacgggtggagggatgactggaaacgtggcctcgacgtccctacagagcccctccagcgtggggaggcctaagtacctcaaggttcaggcccacggaaggagtcgggggagcgaggcccggtgatctacgtgtgaaggagcttggacaggacctcacaaacgccagggagacggcgagggggttcgtgcgtttgtaacgtcttgacatcgctgatcctcccgcaggcggtctcacgccctgcccgtcctgggttcacggtttttcatcacctgcggctgtcctgcgatcgaccacagctgtgcaggaggggcaggaggtatctgttgctgcagttaccggaacctttgccaggactagtacaggaccacgggtgaggatggtggggaagcctgcgtggggcagggaacggtgaggcaggaagagggaagggcagcagaggcctgagtggttgcaggttcacacactgagctgccagtaactgcccagctcagacgggctcaaattcagaagccaccattgctcctcacccccacccccaggtcagctgtccactagctctgccatgacttgatactgcagctcaaacagtgccaaccaaaacccactctcctcaccgcctgttatgggtaacacggtatggttacagctttactcatgtcctctttccccaggctggtagctcagggatgtctcgtctgtgagttacagctgcacgctctccaggaaagaaggaatttcctcttctctggaaaccccaccacacagctggtttctcattggtgctgcttgcccattccctgagctgtgactgccagaggagtgggaggttggtggtgcctccagcccatcaggggcaggccctgggaccgcctgggaacaggaggactatggcacaaaccgagtgagtgatgggagcaacccgcagggctctgccacatccctgtcttccttcactgacatgaaacgcagaaaaggcagctttgccacaacacaggagcacgcaccgaatgtggccgcccagggctctgtccttgaccctgttgtccaggactgtttaccaagggctgacaggcactgagtgccccgtgcacctggccagacactgcactcatgcagcggaaaggacagtgaacgagactttgtccctggcctccaaaggcttagggcgtagtggctgtcatgaggcacagtgacaagggccaggagggggacctcttagggggccatgcagtgatggaagccagaaggaatgaaggcctgcagtgaggatggagtggtcggcctgaagccatctctagcaagtggtcaggacgctgattgttctgcgcaggttggaggtaggtggtgagtctgagaaaggggccggaaagactccccagcaactgctggcaaagggtgaagggcac

SEQ ID NO: 348 - DNA, 4001 bp, Homo sapiens
tcccaacactttgggaggccgaggcgggcggatcacgaggtgaggagtttgagaccagcctgaccaacatggtgaaaccccgtctccactaaaaatacaaaaattagccgggcgtggtggcgcgtgcctgtaatcccagctactcgggaggctgaggcaggagaatgacgtgaatccgggaggcagaggttgcagtgagccgagatcgcgccactgcgctccagcctgggccacagagcgagactccgtctcaaaaaaaaaaaaaaaaaaagattacaacatggtctcttttgggattgttttgaatattaaatgacaacatacatattcccagatcagtgactgaatgtctaacaggctcccaatacattttccatgttttcctcactcgagcctttttaaaatccagtgatctggaaggaaccattggttactccaggctgtactgaggcgttcaactgggtccccagccctgcaagcctctgggcaggaaagaaggtgaaggggccatgccttgaaaacacgcgcagcgccaccggcgctttcggatctggacaggcgagggaggatggggagggacggaaggggagaggccctagcacttataaagatgctctcacagccaagttattcaacactccacgtaaacaaatgcaaaatattctttagggacagcgtagcgaggtcggggagttaatacggaaaacaatggccccattcatcagacaaagcttagctctgtggttcttaaccttttgggttacctttgagaatctgattaaagctggggctcctctgatcaaaaatgggcgcctagaaataagcagatgggactcagtggttcgccaagaaataagatgggattcagaggtttgccaagccgcagaggcccgcgaggaaagaccccagactcagccagcggcgcttcaattgagttcaccgctggctcgaccgaaagccacctaattaaggaaataaagggtggcaaaggctgccaccttccctattttgtcaagagagacggattctgtcaaccgaaaaaaaaaaaaggaagagccagccccgagtggcgcaagaaataagagatcagctgctcagagcttagagcaaaccgtccctgcgtgcaggcccctcgcgctcccctccgggccgggtacctggcagagccgcgtcctccgcgtcctcggcctccgcgtccccggcctccgcgtcctgctcctccggggccccgcgcgcccgccgttccgcctcctcctgggtcgccggctctacgggcggcgggggcgagggcggggcgcaccggggtgcggggcccccggcgcccgacgactctgacgacgccgagtcctccgaggagccggccgggccccagtcgtcccagagccagggcgcgtgcgcctgctccagcagccggcggcctaggcggtagtgcagcagctcgcggtagcacggcccgtactcctcccagcgcggctcctggtagcgcttcatgtactcgctcttcaccccgctccccggggacatggtgccgtccgccgcctcgagcgccagccgctcctcgctgcccgcagcctacgggacccggtacacgacacagaggccgccccgcccctccgccggccctgcccgccgcgacgtttaaacccggagccccgcccggacgggagcagggggcgggtcccggcgagggcggggagggggcggggcgggggcggcctcacccggcggccgggaccaagagcagaggcggggaccggggctgctggggtcgaggggcgcgccgccgaggagggctgctcagtgggcggaaggcagggaggctgcgggctggggcgaggggaccgcaggagactggggctgagcgggaggaggagcgagggaggggagcggcggggcccgtgatcgggtggtcctggggtctccggaggcgtcccctgagctaggcgtgcggtcccgcggggctgccttacctccttcccgccgcgcccggccgatcctctgcgcccaggcccgaggcgcgcgtggcgcagcagctaaagcgcagctcgctctcccgcgcgctttcctcctgagcaagatgtcgccgcggcggcccgcgctccagctgcaggcgggaggcggtggcgccgcctcagtcccggagcctccacgcgcgctcccggcccccgggcctccgcccgctccgtgggggcggctgcttccgtagagagcgcgaggcgcgggggtgcgggcgtgcctgccagtccgaggggcccaggcccaggtccctggcccacttatttgaggtgcccgtccaccctggtcccagcagacgctgtcccaggcacgcgtcactctgcaggagtcgtcagttaggggcaagagatgatccctccagatatgcagcccccccaggctgcggccgggggcgacactctctgtcctcactcgaaacctaccggttcttcctctctgtgttcacaacacctgttactctggctttaactcccttttatatctacactccccaaattcttttagattttgatcaaaaccatttcactcgctcagagattcgtttgcacataaaagcttgacagattaacttacgttgtgcagaagtatacaaagttgtcccatttgttacagtttcaaaagtggccccacactcttttccctttttacacataaaaccttcacagatccagttactttgtgcagaagtatacaacgttgccccatttgttacagtttcaaaagtggccccgcactgttttccctttttgctcataaaacctccacagatccggctgagcgctgtggctcacgcctgtaatcccagcattttgggaggccgaggcgggtggctcacgaggtcaggagatcgagaccatcctggctaacacagtgaaaccccatctctactaaaaaaataaaaataaaaagaattagcccggcgtggtggtgaacggctgtagtcccagctactcgggagcctgaggcaggagaatggcgtgaacccgggaggcggagcttgcagtgagcctagattgcgccactgcactccagcctgggcgacagagcaagactccgtctcaaaaaaaataaaaaataaaaaataaaaaccttcacagatccagttacattgtacagaagaatacaacgttgccccatttgttacagtttcagaagtggtcctgcactattttccctttcttaaaaaaagagccttgatacagtagctgcaaaaagatttgaaaggaaaaaacttttggaaaatctaaatatatatatagcagttaaaaagcaagcccaggccgtgagtagcgctcacggcttccacgtcaggattcccacgaattcacctactttctacgtgtccgcatcctgcctcccaccaccaccgcccacctcatcatagctaaatgattcagaggcggctactggcccaaatggggcgggtcagaccgtctgctctgaaaacttgaagttactagtccaatcattagcacgggattgtgttaatggcagttttctggacggaaactccaggataccctgctgctaatgagtccgcggacgccatgatttctccccttcccaactttattttctgttccttgacttacattagggacattctaatgcactttccttttgtttaagctggctggggttggtttctgatgtttgcaaccaaagtagccttaataaagattgaataaggtggggaaatggttatatgtagttctatgggacatgcaggacaccatcggtttcagcttttgctgcataattcactccaaaactcagtggtttaaaacagctaagatttattatttcttatgattctgagggttagctgggcagttcctccgcagttggattctgatggagagacagcagggctggaagtttcaagatgacctcctgatatagttgggataattcctccaaatctgaagttgaaattgatccccaatgttggaggtggggcctagtgggaagtgtgtgggtcatgg

SEQ ID NO: 349 - DNA, 4001 bp, Homo sapiens
gggggatcatactctaacaggtccagcataattagtgatagcgcccccacagcatactgtttagaacacactcaacagtttgcaagataaattatatagtcacctcataattggatgtaataagaaggcctcagtaacccatttaccatcactaagaactgactacatactttaactgggaggctaatcggtcacagccaactaatgccagagattaatgcagacctgaaaggagctttgcaaatacaccactcacccccaggccatgtcagtggagacaagccagtggttataaccaaaccaacataatgtttatttccttcctctctctaaattaccttcctttacaatttaagtctgtaaatctttcaatccagtcccatcaaaccaaaacacccacaatgcttaggatttacatctatctcagggagctgtaaccaaaaacctgcatggacctacaatccatcagaaagaaggcggcttttttttttcaaaatagcgtttttattttatttttttccttaaaagttatttcccaggtacagagataatgaataataactctgaaaggcagtcagtatacagaagacggtaagggaggggagatggctagccaggctctgcagatgaggtacagaagttacacacagaatggaaacataccaaaggaagacaatggaggtggtgctcatcagaaaaaaataagggaccgggcgcggtggctcacgcctgtaatctcagcactttgggaggccgaggtgggcggatcacctgagctcatcagcagttggagaccagcctggtcaacatggtgaaactccgtctctaccaaaaatacaaaaattagccgtgcgtggtggcgcgcgcctgtactcccagctactcgggaggctaaggcaggaggatcgcttgaacctgggaggcagaggttgcagtgaacagagatcgcgccactgcaacccagcctgggtgacagagcgagactttgtctcaaaatataaaaagaaaaaaaataagggatcttccaaaaggaaaaggtgaccagtcgagaaatctgggaaaacccaactggttagtgggaaagagtacaacgccggggacacggagggaacgattacatctaagatcagtgaggcaagtacggttacttcgggaaaagggattgctgttcaagagactgttactgaaaataaatgtaacgtaaagtgaccaaggatattacctatttaccagaccctctttaagcagtctaccgacttacctcatttaattctcacaattctactaggaaatactgttaactccgtaatacagattgaaacatttaaattaccgctactaagggatgggccaagaatataaagctagacctaactgaaaaaaaaacaaaaaaaaacgttattcgtgcagctacatagcgacaatcaggctagaaagggcgcaggggcgggggaagcgtgggggctgagggacagaacgcggagtgggaaagagcttcccaagacgagcacacgtcaaggaaagaggctcggcgagaataaggccagtttgagtttgtgcagagaagcgaacaggttaagagaagagaggaaagcgggacactgggcttccaaaatgaagacgatgattggaaggctcagtggcccggtcagtgggggacggagctggggcaacactgaaaagtatggacagaagagggcgaaaagggggtccatttcctggcatccccagaactcactgagcacgagcactggacgatggcccatcatggcgacgcgatgcagagccgggtacccagagctgggggaaccggcagaaccttctggagagagagaaccagacagaagcccagaaaacgctgcctcctcagggcttacacctcaacccgctactctcaaggtagtcgccaatcaccgcacccatctcattgatcggcacaaaaacagaccaattgacagccttagtcccgccccctacgcaagaacggccagacaagttagacagagagcgcacgacgaaggcactgggagggcacaggcgcttgcgcagtagggtggccgctcccggccgcgtgcagcgcgaacgtcggcgcaggcgccaaggctctggcagttggccagcacaccactacgcatgtgtgtcaactctagggttgggtgctggggttgcggctttcggttaacaccgcaggtgaggtcgttaaactgtgtattgcgactcggctcctatcggaccgtgaaggctaagaaaggcttcacagttcccactcttttggtctagccttagcaacaggtggactagagaggcgggactccagccagcacatgggggaaagacctgccggcttggcgcagggtgaagtgggagttgtagtcttaccgggccggactgcgcagcctttttccgggcacactgggagttgtggtttatcgcctctggactaatggctgtatgtggacttttcccttcttaggaaatgctttcagtgaggctgtgagcagtaccggagggtgatggcttgcgtttccttaagttatcctatctaaaatattttcccaagtatttccgccgggcgctgtggctcacgcctgtaatcccagcactttgggaggccgaggcgggtggatcacctgaggtcaggagttcgagaccagcgtggccaacatggcgaaaccccgtctctactaaaaatacaaaaattagccgggcgtggtggcgcgcgcctgtaatcccagctactcaggaggctgaggcaggagaatcgcttgaaccctggagacggaggttgcagtgagccgacatcgtgtcactgcactccagcctggcgacagagcgagactccatctcaaaaaaaaaaaaaaaagtattccctgtggtgctttgagatttttttcccccacatccatccctctcccgctgtcctgagtcttagttagagatgatggggagccagagttttaaaattaccattcgggataggagaaggacttatcataccgtggaaattaaacatggtgagaacacggaaagtaactgcctgttcgtcagagacgtttaaggtttgggtttggttaaattactattttgtccagaaaaaaaaggaagcactaaaggaaaactgttttccaaactagtgaaggggccgtgagagcaccaacagttcaagaacagtcacctgtttggccatgaaatagagtttcctactttttcctctgcagattggaacaggctgagatctgctggagacaacttaggaaattatcatagtgaaaatactaacatggattgttgatcatctgatgctatgattctttcccaggcaccacacctgttggtgttcagatggagcggcacactagtcatcctaacagaaaaggtgtgtgttggaggccctgcttcccctcccttaaaaagcaagacctcctttgcattccccactaaatgggagcattgctgtattcccagcacctagaactggatctgttaaatagtagatgctcagtaattatttgttaaatgaatttattattcttcctttgtatctcctcttaatacttagaacaagactatgtacaggatcttagaagacatggtgttaactagagtgaagagatactgagttgtagtgggacagccccattggtgggccagggaaatgcctgaggccttctgactccagagcctatccacttaactttagctggatcagattatctgaaagacctaccattccatagcctggacataattttttttttgtttagacggagtctcgctctgtcacccaggctggggtgcagaggcaccatctctgctcactgcaagctccgtctcctgggttcacgccattctcctgcctcggcctcctgagtagctgggactgcaggcacctgccaccatgcccggctaatttttttgtgtttttagtagagacggggtttcaccgtgtcagccaggatggtcttaatctcctgaccttgtgatccaactgccttggactc

SEQ ID NO: 350 - DNA, 4001 bp, Homo sapiens
gtaattgtttaaatgggttaaggaaaagcttccagcttcccctttttgagccttgattactactttccttcccccagggcttctagcctgcttaccaaaaaaagagacagaatttgcaattctatgaattattgcacaatgtaaacccagtttcctcctatatacatagcaaacatagaattcaaatacacaaagcacatacacttgagaatcacactcagacaacttaaccaaacaacaaaaacacaccagcccccaaaggatcccaccagtgcacctatccatcaacacccgccaagccagtctggcaggcatccgtcacccagcaagtggtcccagtaacttcccctgcaggccctaggtctgactcttaacctcacactatcatatgtacctagagacatgagcacaattcaactcaatcaatgtttattaagcaacctctttgtgctgaatgctgtattcttttcttttaattcttcagccatagtcctggtcacaccaaatgcagcttggtttagttccccaatcatcccagccattcgggtccctgcactggctccatccagtctctctaaagcaagagttttgtttgtttgtttgtttttttagatggaatctcactctgtcacccaggctggagtgcagtggctcaatcttggctcactgcaacctccacctcccaggttcaagcgattctcccacctcagcctcccaagtagctagggccacaggtatgtgccaccatgcccagctataaagcaagagttcttaactgggtccacatgtaggattaaagggtccataaactagggtgaaaaataatcttacatctttattttcatttttgcctctaatggaaatttagtattttcttcagttatgtatgtagacaaccacagatatcttcatatcacattacaactacttaagatatattgaaatgttatttatactcatcattactttgaagtttggtggttaaaagacctacctgtagattttgttatgtaatgcataaataagaagcaaataaattactgcattataatttatttaaaatattttgatacctgtatttcaatgtgactgatttcctctgtaattctatgcattttattttatgcattttaaacattattctgagatggagtctattctctttaccagatgttaatgaaaactgtagcataaaaagtacctgctatctggtttgaaactattccattacctgctcaactcatctgactctcccttctacctccaaattttctcttcttccatcctattcaaacatagataaatgcccctagatcaggcaagcccctctgcatggccctcagtagagccaagtgaatcttcctgttcatttctcagtctctcagtagtcaatttccacttccactcgcaggtgaaatctagaaccttcttttagcatagtctaaaactactaagtactttcataacctttctttccatccagtcatatctgcaaggcatagttatcccatcaagccttaatatcaggcaaaccttaaggtctcctctcagtttgggacacaaagcttttttactgtctcttgggatgatcggcccaggaagatgagtaaagccagggccaagcaaaactgacagatctggcaacacacacaaatgttaaaaccaatggaatcttgtgcatgggactcaaccaagcattgtgactccctggaactcaaggatgtctaggtaagccaagaactgtcattagtaagtcaaaaattattgctaacatcagaaatatatggcatagttgttcctgtagagaccaaattgtcctgttccatcactcagcaccctgagttgatgaactcctgtgacaagagaaacataaaggattatgaaacttactcagaaggagaaagaaagatgccacatatgagatgcctgccatttgggccagcacagtcctttttcgtcccaatagtgtcactaacattcagaggttgagtgacaaatgctgtgctctcactgcaaagtaaagaggaagcaaaagtgtggttttcagcccactgagaaatagagatgtcttgtgaaaagcaaaactggttacattatgtagctctttactaatcactcaaatttgggagtaaaaaagttatctttgtggttaagtaaacagatatcgataaaactaagaaaagatgggtctcaacctggctcacagtatgtgtcatttggtaatgatgagagaatttaggtaaactgaataaataaaaaaggcaccagcaatgttgtcttcttggcccttccttctcctcctctcttgagagaggaaatgactgagaaatgggagaaggcccctgaaaaacatgaacttggggcgacatgaggtggtgctgaaggttacaggctctagagtcaggctgcctgggtttgcatgcagattctagttttagtaactgtgcaatcttagaaaacttaattaacttttcctaaccctcattgctaaaatgaggatactaatagtaggtaccctgtaagattactgtgaatgccaaatgagctaattttttaattatttttttatttctttttttttgtattttacttttttttattattattatactttaagttctagggtacatgtgcacaacgtgcaaatttgttacatatgtatacatgtgccatgttggtgtgctgcacccattaactcgtcatttacattaggtatatctcctaatgctttccctcccccttcccccgaccctatgacaggccccggtgtgtgatgttccccttcctgtgtccaagtgttctcactgttcaattcccacctatgagtgagaacatgcagtgtttggttttttgttcttgagatagtttgctgagaatgatagtttcaagctaatttatttaaagcacttagaacaatatctggtacatagtaactgctcaatgaatattagctaccatcatcaccatcatgagacatttaagtaaatcttcatctgccctgtgaaactgcctttgcaaaaattgtaacagtgagaaagttatgacagtgaaagggatctgacctcaccatctccatcttgcttctaacttccaagctgcccttgttaattcctggttgtaggccaaactaactttgggaggaatttagcttagtttaattttgaaacaaagaggataacagccctttctggaaacaaacccccttcttgcctggggagcagacttccctagtaagactaacaaattagccacaacattagaaattatggtttaggagtcatgcagccagaggccacacaattccaacctccccaactgttcctagggataacatcactattgtaaaacctaaattggtgctcaaggtatttttcagaccctgcatcctgatgcaccagctgacaccatccaggctggtgatctggttccaccagttctttgatcccacttaggaacggaagactgcaagaaccccctttgatcccctgtgatttcatctcctacctgaccaatcagcactccccactccctggcctgccaaattatccttactaactccagtctctgaatttccggggagactgatttgagtaataaaactctggtttcccatttagctggttctgtgtgaattaaactctttctctattgcaattctcctgtcttgataagtctgttctatctgggcagcaggcaaggagaaacctgttgggcagttacgctaatgggcagttacaccgatgtgaacccaggtatcaaggatggcagaggagtatctaaatgcaacagttggccctgaacctagactaatactacgctagtgctagagttctcaggaagcttccacttaaatcagataatcacaatgcaatgtgtcaacaatcagtggggcacctatagggggtggggaaaattggtaggcaggagggaaggtcaagatggattgggctgggccaggtgagtcaatgagtcatctagagaggcagggggccaaggtacag

SEQ ID NO: 351 - DNA, 4001 bp, Homo sapiens
cactgggcaaggatgctctgggaagtgaccttggtgcccgggaggggagcaccctgttgtgatgcaggcggggcagcgcggagccggcggcgctgatttcgcactctggccgctagagggcgctgcctttcagccaaagccgagtgaccccctacctgccccgcgttggcccgcgtcactccagccatgggccatccagcgagcatgggggctagccagggaaagtctaaactaggaggggagatgagggggtgcaaagttgggcctggtgggtcctggggacgcagcatgtactagagcggcacctggccctcaacagaggggagagcgggtggtcgtgagaagtctgggaattttccgggcccactacacgccaggggcgggtctcccctcttaaaacgttgtgagccccagcgcgggcaggggggagggtgcccgtggagttggcatcctcatctttgatggtccccggggctcctgagctgcgctggtggccccagggctcggtgcctctctcaggcgacagctcacagacggcgggaaactcttccctcccgcaccttcggaggcggtcctggagtcttgtggactcctgggttcaaatccaagctttgtgtgaccagcacattgctggacctcactcagcctcacattcctcttgtgtttaaaactacctcataggaatgtggtgacggttagatgacacataaagctttgccagaggttttctggggagggtggggacaagagggcaaggaagagtctccatttcctctgccaccggagcccggatctaacctctcagaggagctggaaggtcagctctgagctccacaaatacctctgtatacagatctcccacgacactgaaaaagatgcccagaaagatctcatttgcagctgtgaaggggcttctttttcaatctccacaaccccaactgccttaaagtagaaccagacttgttagtagacagaggtttgggctggggggcccttgaagctcttgtctgagatctcaggcttcctgctcaacacaccaaagcaggtgcctgacataaaggcgccatggacctctttggtggtctgggaaggcatatggagtcccttctcagaacaacatttaaaaattaataagatacatgggataataaagggaacaaattatgacaagacagttgtcaaaacattagaagaatgtgtggtagagcagtacacatgcttctttagatttgacatcagcctaataactgttgtaattctgtagtagtgctgagcgttaaggacatttggagaaatctataaaaactgtaatgagatttgaaaatatttgtgttttctattgatggcaaattctattgtggttcattgtctacattcataactgaagcaagtgctgactttcaattaaagattagtgaaaataaagatgtatttttccccccaattcacaaatcccatgaataaatctattcacggacctccaagaggtccatgacgtgaaccacctaggacatgaacttcccccggaggtgcctcacagggccagctccaagccccgtggcacctcccggcttgtctcaggccaatccttgaagagctccagcagatctaaactttggtaactttcctctggtaatttgaggaattcctccatttgaggaatgtcagaatggggccaggattcctgaatgcccatggaagaaaagcgagcatgctggtctggcgggcagaaataaccttctccccaggctccagagggcagaggacatttccctccaaaaggcaagtttctcagggacctcatgagaagcctgtcctcacctgagcagttctgtcaaccatcccatcccttcacctggaccccaggtccccagcaggcctttttacctcgagacagaagttcttctttcttgttctcagactgggggctcacgttgaaatggctctcagtcctcagattgtccttgcatcttgttaaaaccctatctctccagtttcgtcattgctcacactttcatagctgttattatattcgctctttgaaaaccacagaatgggttgttagaagtcatagatcttccgccacccccactgtggatttttttctcctttctctcctgcaactggtcctccatctccttctcctttcctctcccttgttttgtctttttggtgttagaaatagactagggtgctgagggggctaagaaaaaccacttcttaaaattcttttctttaccctggggaacaaagattttgtatttgctaattcataataaggaaaggactgatgatagaataactagaagataaaaggacagaatgtcctctcaagtataaagaaaggtaccaagtcttctcctgagagtaggttttggttagaagtaggacagagaacacagctgctccaggctgaaagggaagaaggtcagggagctgtcaagaaggcttgggtgagggtggtggtgagcaggggaggcaacgagtgggggcaccaaaatggtcctgatgtggtggggggaggatgaatgactgaccttatcttcccacccacccattttttttctttttcttttttctttctttcctttttttttttttttttttgagacagggtcttgctctgtcaccaaggctggagtgcagtggggcaatcatggctcactgcaaccttgacctcctggggtcgagtgatcttcccacctcagcccctcaagcagctaggaccacaggtgtacgccaccacacctggataactttttatttatttattatttatttatttatttatttatttatttatttatttatttagagatggagtttcgctgtgtcacacaggctggagtacagtggcgtgatctcagctcactgtaacctctgcctcctgggctcaagtgatgctcctgcctcaaccttctgagtagctgggattacgagagcctgccaccatgctggactaattcttgtatttttagtagagacagtttcatcatgttggccaggctggtctcaaactcctgacctcaagtgatctgcctgccttggcctcccaaagtgctgggattacaggcgtgagccaccacgctcggttgataattttaaaaatgatttgtatggatgaggtctccctatgctgccccgcctgctcttgaactcctgggctcaaacaatcctctggccttggcctcccaaagtgctgggattacaggcctgaaccaccactcccagcttcccatccatttctattctgttctgttcttccttggtcagtgatggcttgggagattacaattgttcctaaattctagggttgtgcccttagatggcaggaacattagtctgagaattagaagcattgggctctaagtcctgcaaggctgggccaggccctgtgccaaagggcacagcacaccaggaagccccacggttctggaggaacacctgtcatgattgccacccagtgccaggctacccaggaattcaagggtggagggagggtgggggaaaatttttcataactagtctagagactctcttttccttcttattcctgttattgtagtactctgtggtcctaaaaacagtagggtgctctggggtttgagaactcccagatggctccactgaagccatcgtcaaatgagacagatattagaaatatttcttcactccaagccaggcgcagtggctcacacctgtaatcccagcactttgggaggccgaggcaggtggatcacgaggtcaggagattgagaccatcctggctaacacagtgaaacctgtctctactaaaaatacaaaaattagttgggcctggtggtgggtgcctgtagtcccagctactggggaggctgaggcaggagaatggtgtgaccccccgggaggcggagcttgcagtgaaccgtgattgcgccactgcactccagcctggatgccagagtgagactgtgtctctaaaaaaaaaaaaaaaagaaaaaagaaaagaaatacttcttcac

SEQ ID NO: 352 - DNA, 4001 bp, Homo sapiens
ggagtgggaagcaaagggtggcattcttgcctctactccgccaggaacccgccttgtgaccctctctgggcctggagggtgcagtaggcaggcactgaggatgtctcctgagcaactcgagccacacaccctcacctccaaggacaagtcccgaggggtgaccttgagttcccagaactggcaatggggaggagggatgggaactgtcatttcttgattgccttcagtgagtcagacactgaagtgggcactgtacagcttctcataaaacctgcagagcaactctatgagaaaggcatcatccaacccatttcacagatgcggagacaggctccgagggagaaggcgcagggccgaggtcacagagcatgtcagtgcctgagcccagagctgtcttcccctgcacctctgctcctcccactgccccgtctccagggagtactcacctgttgtgactgtcttcggttcataggtggggtggtggtgagcagctgaggagacaggtgatccatagcaaagcagccttcccaccccctgactcccatcaagaccccagcccccactcaccgctaaacttccgattcagatgcagccctgtccctactctagacatccaacatacttgcaagccccacacagttccctccaccagatgtgctctctctccatctctaccttccaggctcattactgatgccacctcctccaggaagcactccctctcattccctctgaacttccaaagtccttgctatgccttaaactagaagaagagctaacactcccatcccctccacacacctgtactaattttcagatgaggaaataggcagagagaggaggggacttctcagtgagctaaaggcagaactgataccgggcccaggtatgggtgagcaaaatccaccgcctgagagaggctgtttcctcctggggggcaggctatggctggggagacccatgcaacttggcttaggtgcaagaacccccttacctggacatgcctctgagcggttgtagatggagcaaccttccttgaccacctcagattgggccacacagtgtcctggtgagagaaggtgcaggggggaggtttggggagaggggccagggccttggggttcagagctgggggcactcaatctggggagggctcagctccatacctggctcctctggccggcactgctcccacacgcagctggagagattgcgcgctccgtctccctccacgcagtgctcacagacctccagctgtttgcaggccccttggaccgccggccagatattcaggcggatcagggctcccctcccaaagcctcgagctcctttacctggtagtgcggtggagtgggaagggagaattcctcgaagccaagctgtggcacccgcccaccctcccacccaacactccggtggccctcgcccctctgcacacatctgggctctcacactcacccctggatccccaagccccagcgcacacctggagcttccacagcagaggtctacacacacctagagcctccccacattcacccagagcccctccctttgcatacacccggggttcccagattcagttggagccacctcccccagaccacctgaagctccctaggcccccacacctggggcctatatttacacacagggctccacacagagctggagccccctctcccacccctggaggcctgcacttggccggaaagccccctcccctcaagcccaggctgctcctggggagacggctggctgaggtgcaagctccatccgtccccgtcgagcccctagccagaccctgccgcgagttaccagccacagccagctgggcacataggaggaggcagcaacagccgccacagagcgcagtccgcaaggcgcggggtcccggagcctccatgggctcgcggggtgggggtggccgggggcggtggccgggatcggtggacagctgccgggcgcgtccctcccagactgggctcggctgagcgtgtgcggagcgagacctgggcaaccggggcgtggccaggtgggggcgtggccagtgggagcggcaggtggggcggggctcgtcggtcggggcggagccaggtgaaggcggggccagttaggggcgtggctagtgtgcgcggccaggtgagttcgggggtctggggcggggcttggactaaagcaggtggggtccaggactggtggctggcgtggttactatgtgcctccaagggcagcttcttgaaaattctggaaagtaccgactgctttgatccttacttcacaggtgaggaaactgaggctcagacaagatgagtgactcgttcgaggtcacggagagaggcagtggcaaaaatctggattcgagacgaggtcacttccctgccttcagggctcggtgcaggccccgctttgtacaccctccacccaggccccatgaccgctgggccgggccctagctggcccctgccctctggctgcccaagcttagcttcggtgctccctctccattcactgcacccctccacccgcctcccttctgcccctcatccgctgtgtctgcctctggcctaccacaccctctggccaggtcaggggtgacgccattactaggccaactgggcctctccgcagccttccccacggctaccactcctgccctggcaccagcctcttttggttctcctcaggctccttagggggcacttcctctccttcctcttcctcctcccctcctctcccctccttcccccatctgcttctcctaaccctctcttaatcgatggtggcccaggttagtcccaagccctgttccacactctcctggggtcatcctggacattccactgccatcagtccccacttgaaacccaacagctgaggcaggaggattgcttgagcccagggatttgaggctgtagtgagctgtgatcatggcattgcactccagcctgcgcaacagagtgaaaccctgttttaaatgaatgaatgaatgaatgccaacaggtcacgtatcccaataaatatatacacccactatgcacccattaaaaaaattttttttgagccaacagatctcttaatcatctccaggccagttctgacttcacaactgccacacctgtaactgacaatatatagctagcaattattgaccccttactagccgaatgtacattttgagagcttttacatgcaacttcccatctaatgtccacagctaccctctaggcatgagttttgtcatttcccatttgcaggctgctcaggggcacagggtttcaatgcagcaggccaggatgtaaagctaggattgaatgatgctggaggccatgctccctctgctgtgcctcccatgggtccacggcatctccacctgagtgtccctgaggcccccaaaactgcccactcaggggaaaagagacccttcgggttctgggggagggaggagggatagcattaggagatatacctaacgtaaatgatgagttaatgggtgcagcacaccaacatggcacatgtatacatatgtaacaaacctgcacattgtgcacatatactctagaacttagagtataataaaatatatatattatatatataaaaaaagaaaatgtggcacatatacaccacggaatactatgcagccataaaaaaggatgagttcatgtcctttgcagggacacggatgaagctggaaatcatcattctcagcaaactatcacaaggacagaaaaccaaacactgcatgttctcactcataagtgggaattgaacaatgagatcacttggacacagagggggaacagcacacaccagggcctgctggggggtggggggcttggggagggatagctttaggagaaatacctaatgtaaatgatgagttgatgggtgcagcaaaccaacatggcgcatgtatacctatgtatcaaacctgcacgttgtgtacatgtaccctagaacttaaagtctaataaaaaaataaaataaaaataataaaa

SEQ ID NO: 353 - DNA, 4001 bp, Homo sapiens
cactggatatggcaaccatgaattgttctggaagctcacaaagtctgatccttgataagctaactgcaagaagcttcctgagacctttccagagtgcagctcacagcctcctgtcacctgtatctcaaaaggatctggggttatgaaatagaggaaagagggagaaaaaaatataaaatgaaatgagtagaagcaaagattatagaagcagaagggggaagtgtgcagggtttgacataatggaataaaatttggtttggtcagggattcagagaaagaggaattggtgggagctgtaggtggaggaaaagattaataacatgaggaagagggcaaactggtcaaagaaggtgatgtgaatgctgtgggtgagcaaggacctggtgtaagagaactgggattataacaacttaggttgaattaaatgcaatgggttacaattgagtatatatagagagactgctgaagagaatgaatgagaaagtgagaaagctgaaggtatctggttgtagggcaggcagaagggtggtcctgggatacctgtaagaaaagataataatgcacaaccctgcaatcaatgagagaggagttcataagtagcagaagtgtttggagaattaaggtctggatgatagcccttgcccaaaagtatgcaattgcagttttatggtggaaagaatagaataagatacagaagagagtcaggctgtttcctaaaggaataagaaacattgagacaacccctctctcccacctcaccactctccatggagaaaactgaactcacattcaaactgcaattcatgggcgtatctacgaattccctcaaatgaccgaatggtgcgtatacggaataatgtttccagttccttccactcctcattgctgaagtttcccctggaccaggggcacaggaaaacgatggtgctggaattgctgtcccaggtatgagtctgcaaatcactcagccaacctgagaccagattttgtttccaggaatggttgtaaaaggatgcgatccaggtgacatggaaggagagaggctccttgagccctgcgacaaaagaacagatagaatggggagaaagacattgagaaagaggatggagagagaaaggtgccagagtgcgggaactcagaatctggagaaaaggggatccatcatgatcttagcagacattcacttgccacacagtcccatgccttatcaaccaccttcataagagctcagggacctggagtcatggatagtcagaatggaaccagcctggcactctcactttccaggtatatgctagggaaaccacacacacacacacacacacacacacacacacacacacacacacacagagagagagagagagaccttcacccaccacccaactgggcagttgtcagagttcttaccgtctgcattgccatcacctgggagaacagctaacaatggaagtagcaaaaacagcatatcatttgcagatgttatttccttctctcagaaaaattggtctttgatttctgttccaaacaaacctaccccacgatatctctattctgacttctttctgcagccaacagacaaacctcccctgactgcaacaaagaaaatccactccttcaaaaaccctgagatgcctactcagtctctcatttccctctggttctgactctcctctctgttccagcttctctccttgtcaccaacctccaacttattcaccttcccctaattcaactgctatggaacaagtctgatgtggcattgaaaagccacttaaccactaaggacatttttttctcaatcatacaataagagcataaagtgaaatggctcccagtgtgctgcccaatgctcccatgtccctgctctttttgatcactctgtccttttcaatattttcccatgtattctcttcccctgtctcttcagccccttactacattcacatttctgatttaacattgatttatttgctttttcagagtctcctacgactgccctgtgcgacagtacaaactaacaccttttctccattattcttagagaagagccagtaaccatcacaaaaaaaaaaaaaaaaaaaaaaaaaaaaaaaaaaaaaaaaaccacaggaacactaaaacatataaagaaaatttcctctgtttgattttcattgatatacattcactcacccaacagtctctcttagcacctgcctggagtcaagcatcttggtacacttaagaatatgcagtggttgacaacacaatcactttactgaaggagctttttctctacttagggagaaaaacacgccatgaaatataaatcttggtgtactgagttttattatactgtatacactctctggataaaaacaaggcctgcttgaaataatattttctaaaatgggggctcctaactaatgtacgccagcccagaattttgacttcaatgtttgacttggagtgttagttccatacagttatcatactgtatccccacctaacagagtatctcacaagtggtaggtgcttagtgaatatttgtcaaatgaatgaatgaattcagtctatgcatccattttttaattatggaggtgatattcaacatgaaactttttaaagatatcataaaagttacttgtaaccctatgtagtgagatgagaatctcatacagttttatttaggataaaagtacaagttactggcatgagatttacataaaagatcctgctataaatgtcctattacttataagaaactagtcagaacttgtgagcagtgaagttaatggagtattccaaagtctttatcccaggatccctttttattagtcctatttggatgtttcagggttgttttgttataaatgagtctttgccggacacatttacattcctcttttacgctgcttgtaactgttgaagggcttctaaatatatgtttgtgctttgtagatatcatccatataaatgtgtctgggctatttactattttttggttttcaaaaaaaaagtatctgaagctaatttagggggaaaaaattttttttcttgagacagggtttcactctgttactcaggctggagtgcagtggaataatcatagctcactgtaacctccaactcccggcctcaagcaatcctcctgtgtcagcctcccaaagtgctgggattgttggcatgagccaccaggcatggcctgcaaataatttttttatttgttttttgttttgttttgttttgttttgttttgagacagagtctcactctgtcacccaggctggagttcagtggcatgatctcagctcactgcaacctctgcctcccaggttaaagcaattgtcctgcctcggttttgcaagtaactgggattacaggtatgcaccaccatgcctggctaactttgatattattaatagagatggggtttcaccatgttggtctcaaactcctgacctcagatgatccacctgcctcagcctcccaaagtgctgggattacagataatttttttaaagttaagattagcatgcaaaaagctggaaagagcttcattttcatacttataattttttgaagccagattatcaaaatcataacttgaatttatcaaagaactgaaatatcaaggcaaccagttaacccaaaatataaagaaagacagactcctcaaaggacagatggaatgcaaacccttgtttacttgggacagatgccagatattatacaagccagtaagaataagaattcagctaaaattttagacaaattagtaaaggctagcatgagtatatagaagccctgggagtcacaaaaacagggaaattcgcatcagtctctaagcctttttctatgaacctcaccagggtcttctgaaacattagggtcagagatgtagaccagataaatcctctctcatgatgcgggcctgaggtatgagaacagctactgcatgggaagggtagtaagtcccaaccagacccatctcctctattgcaacatagaaaaaaaaa

SEQ ID NO: 354 - DNA, 4001 bp, Homo sapiens
caccccgcatccacatcacccacacgggctttgggtagaatcctgagacatggcacacaagctgcagacggccaggtccaggactggggccactggacagccaggcctcaggcttcactaaggcaggaaggagaaaaaaaagtgtcatgttataactcgagttcagaggttatgaactcagaaacctacaagcttggacagcgaccccattcactcctttgggaaccaaataacttgttatttaagctcctatcctttgatatcttcctactcttgatcttagaggaggtggtgggaagtgaaataacagcaggactaaccttgtctttgcagatctgcttttcctgcattgaggacgcccaagagatatcgggggcaggtttcatagaggagaattctcacagtttccatgataccttgatattgtatgattagtgcacagaatttctgtgccctgctgccaccttctggggaaggcacacatgaagcattcttgacactcaggaaatccaatcctcctagagctcccctcaggaagcttactatggcacctccagaatgtagctcacagcctgctatgccctggatctcaaaggggtctatgtagagggaaaagagagcaagttattaaacacaaataagaaaaaaaggcatgagaaaagaacctaggattttagattttggtggggataaagttatttggtgtaaaatgatgatgagctaaaaactaatgataacatttagacattttcagaaacaagagcattgagaaaaatgtgcatgccatgaagacaaaggtatgtgataaaggagtacagtgagtatgaaaggagaggtgaggcagagcgtggtgcagtcaggagtgcagcattccagagtgagtggaggttcccagcaagaggagggtgcggggaggagatgattgaaaagatggattaggggagaaagccacacgttagatcactcaggcacagggtaggagaagtaagggcccttgaggagaagtttcacataagacaaaccagcagctggttacaaagtggaagacagtctgagagtaagagaagagtgcagaggcagcaagaatctgaaatatgaggtgtgatggtgtgaagctggagtgagagactactcaagaaaagcatgtgcgtgcatttgggtaaaatagaaaggaagggagaagcatcagagagagcaacactttgcaaaaaagagagaaaagagagtccttgagactcttcccagttcggtggactagactcacatttcatctggaaatcaccggcaaagtcttgtacttctcgagcgaatccaaagatgtagactcggaatatctcctctaactcagcaacctccttatcactaaagttacctttagaccaaggcttcaggaatatggcagtgcctgagtcgctatcccagccatgaatctgcaaatcatccaaccagcctgagccttgagtttgtgcccaggtactattggtaaaggacgaggtctggataacatgaaaggaggtcggcccctggaaggctgtgaagagtggaaaagcaagatggtgaagataaagagagaagcaggagacaattaggaagaatgggaatgaaaatgatttagaaaacaagaacctagagtctaaagaacacaggaagtctgacacatttgactgccttaaggcttcaggttctagtcccaaccaccagaatggttgaagagggcgggagacagaaagacccagacccttagtgtccaattgcacctaggaaagccctgcttgctttttaaaatccaaacccctgcaccagtgctgggagctgccagagtgactcttaccatgttcactgttaccaccaggaaagagaacagctaacagttgaaatggcagcagcagcatttcactgggagatgcaacttcttactggcagagctggtatttgatctccaatttcagcaaagcttttcctcagtaccctgtagtgacttcttctctcttccaactgccaaatctcttcctcatccaaactgcttttcagagaaaaatgtgcctcccacagccctgagcctcttacctcaccttttatttccctcaagccctgatttttagagtttctcttaccccctgacttccagccgctctccctgtcctcaccttccttcatacctccttggaaaagcccccatatgattctgcattttcatttctccttccttagcctttattcccacatctataggataagatggtgatattaagcaattgctaagcttttagtctgctttaacccagaaggatgcttttagtttatccacctcacttagtttctccccctcccagctgccttatcttctctggcactctgttactgcctcttcccaatgttttcaatgtcttctctttcttatattgccctctttgtctggtgttccttaccccacattctaaactggctgtgagtgtgtgtgtgtgtgtgtctgtgtctgtgtgtgtatgtgtatgtgtgtgtaccgatattcacttacataaaggcaaagcatttaaaacatttcctgtactatagcactacaaaccaaaatgccagaatcaaatataataaagactgaagtttataattcaaacaaaattatactatagcaatatttgagggaaaaaatgacaattgctgctagcatgtgaccttctcttcaggagctcttggcctatggagttttgagtaacaaatattcatgacataaacagaactctaggagctatgctatgtgcacctccagcctaagtcaaagataactttttgggtaagttgccataagcggcagagcttttttcttctcttgtaatatctcataactgctgtctacatttgggcattcatatcaccacatgtggtattaataatagagcaaagaggttgcttttttttatacaaaaagttcagagatacttgttttaagatgtcacctcctatcttcttgtatgcccatgaaaaattttaagaagaatttttggattttctccatttaggaaaaaaatcacatatttgcagagatctatgtatcatgcagaaatgtggcagcaatcgattccgagtaaagagggttatcactaactaattctattatgtggataagaaaatgcaaagtgagtagtgtagtgttctctattcctggggacactactggttcacaacattaataagactggttcacaacattaataagactagccttcatccaagattattactgcctaattgataaatacagagcagctctccaaatttcaatgtatgtatctcttaacaacattcccagactccaatacatgacagaattgaatctactttttggataacagccatagacaacagcagagacttaacattggctgtcacagacatgaacattactatttttgtgtttatacgttttttattttgggtagaacacccaaaacagagctcaggaaaagctggtagacaacctgggctattttccattaaaataagtgagttcttgcaagactcccaaagttgaattgctacaaactaaatctgaaatgttcctcattttaaaaaataatccaaaagagttggcagggcacaggagactatcacaacactagccccacactcatcaaacttttttttttcttgagacagagtcttgctctgttgcccaggctggagtgcagtggcatgatctcggctcactgcagcctctgcctcttgggttcaagtgattctcctgcctcagcctcctaagtagctggaactgtaggcatgtgccactatgcccagctaatgtttgtatttttagtagagactgtgtttcaccatgttggccaggatggtcttgatctcctgaccttgtgatctgcccacctcagcctcccaaagtgccaggattacaggcatgatccaccacgcccggccactcatcaaatttttaaacaagttaggcctaaaacatgagaacagtaatccagtcaaaattatgttaccagaaa

SEQ ID NO: 355 - DNA, 4001 bp, Homo sapiens
tccatgacgcatgaaattggtcataatggtcattgaactgtggacatagatctttgaagaaattgaatgggggaatagattttattttaagggagtcaagcacagagtgggacagctgtgtatctctggattgtaggatacagagggagaccacaggtggaagataacaaagcacaagaaaaaaaattccaaaaatagcaagagcctaggaaatttgagggagtcaacatcaggaatatcccttaaaaggttcatctatgcagaattttatggtgggatgggataatgggaaatggcccaaaaattagtagagaatatttccctgaaatagaacattctaaagaactcccataatttagatgattgaacttacatttcgagtaatcttgacttgcatggtcttgaatctcccgagttaatccaaagaggtagaaacgaaataacaactctaggtctgacaactcttcattgctgaagttgcccttggaccagttatgcaggaaaattattgtgcctgattcactgtcccagccatgagtctgcaactcgtccagccatcctgagccctgacctcgtgcccaggattggttgacaaatgagaagatctggatgacatggaaggagacgtgttcctgggatgcttttggtggaagaagggcaagtagtgtaaggaaaaaaaaaaaaagagaggcaaggaaaatggagagaaaatggaaggtgaaccagttaccacagagaaacattaatgactactttagctataccattttccttacacagagccccatgctctgccaccatcctctaaaagagtaaactggacctggagagaggtatgctcaaatggcaaccattctggcttcttcattgatccatcttgggaaagcccatcatgctcaacccagatacatgtaaccttgcagctgacagagatgttcatactatctgcattgtcaccaccggggaggagaagaactagcagcggaaactacagaaacagcatgtcatttgcagttgtttccttctctcagaaaagccatttgctgatctctgttcttagcaaacttatccctctacatctatattctgacttccttctaccaacagacaatcttccccatcagccactgacagcaactaagacaatctgcttcccttaaccttaggcctcctactcaatctctcatttccccatctgctctgaactaaagttactctcttcccttaggattttagctgctctcccactaagctccatcttatctacttcccttcctcaactgccttagacaaagtggtgcgtggcattgaaaggttgcttcatccctctggaccttgcgtgtcatttgtaacataaaaaggagaaaccacatcattttcctgggccctgattgttttaacggaaaatggagaggaaatggaaattgaaccagttaccacagagaaacattaatgactactttagctataacattttccttacacagagcccatgctctgccaccatcctccaaaagagtaaactggacctggagacaggtatgctcagatggcaagcattctggcatctctattgatccatctcgggaaagcccagcacactctacccagatacatgtaaccttgcagctgacagcgatgttcttaccgtctgcattgtcaccacctgggagaagaagagctagcagcagaaactgcagaaacagcatgtcatttgcagatgtttctttctctcagaaaagctgtttgctgatctctgttcttagcaaacttatccctctgtacctatattctgacttccttctaccaacaatcttccccatcagccgctgacagcaactaagaagatctgcttccctcaaccttggtcctcctactcaatctctcatttccccacctgctctgaactaaagttattctcttctctcaggattccagctgctctgccactaagctccattatatctacttcccttcctcaactgccttagacaaagtggtgtatggcattgaaagaaaggtcattttgtccctctggattttgcatgtcatttgtaagataaaaaggagaaaccatgtcattttttcagttcctgcttgttttaatagatcacagttcttccagtttctccacttaactttgcctccactctccatagtgtcccctcttctcatcactccattctttctttcccccttttgaatgtcctcaaagttttctctttccaatttcacctcttttcacccatctttcttatttcctcattctcactgattcttttataaattggagacgttgctttttacatcttccaagatttccctgcacaattatataaactacagtccactctacattatccttagagattaaattgcagccattcagaatgcataggaccataacaaatataaagaagcccttctactgcatttaatctgtatagtcattcactaaaaaattacatagtacatggttgataccagtgtcttactaggcatataaacacacagaggttaacaatgtaatctcttctatcaaagagttttaaactgcagatgtttaaacaaaaaattaaaatgcattgtgattttaatttcaatgtatagaatcccagatacaaatctacttagaactatattctctagagcagcattttgactgactaaccccctgggaagttcataatttgaagtcctggaagaacagcatgcatctcaactaaatactgaaaattctgtacagtgtggaatggtatacgattgtgatagtcagaacatgcagcttttcaagaggactcatacatggggagaccacaaaaatccaaatttaagttgttttgtgatctgaccaaaacacattgtataaaaagggcagcatttgtcaatgtttgatttaagtagtttatatgaagtattcagtgacttatcagtgaccctggctggttaatatgtgtaaatacatgaacacagtttttttgagatccaggaaatacatttattattatagtgtttcttaaatcatattaattattcactgaatgcattggagcagtcacttaaaatctgggcatgaatttgtgctaggcacaatgactcatgcctgtaatcccagcactttgggagaccaaggtgggaagatcacttgagcccaggagtttgagaccagcctgggcaacaaagttagacctcatctcgataaaaaaattaaaaagttggccaaatgtggtggcacatgcctgtagtcccagctaaatgggaggcagaggcaggaagatcttttgagccctgaaagtcagggctgtagtgagccatgttcatgtcactgtactccagcctgggtaacagagcaagaccgtgccttaaaaaggaaaatcccatttgtaacattgtttctgttttaaatttatatttattctatgtatttactgtgtacaacatgatactttgatatatacactatttcttaggtttgtcaacgttaatagtgaggccagaagtcattctcaatgagctcttcctatcatggccacagatatgtggcaatttctatgaactataatatctttaagagcaatacccagttcaaatcctacccaaatcattcataagcactaggtgttatctttgctcatcttgtgctgttaatggcaaatacttggtttgtggttttagaaaacaatagtagataccacattatgtgtttattcacatttttttccatgttcctacaggaaagatgcaactgtcctatttcctaatagttgggttaaggtcatggactgagttctgggcaatggaatgtgtggtgttggaagcattagccagctccagtcctgaccactgaaaatatcacatctgatcatcttaccctgtggtaccaacttggcagtcaaatttctaaatggcaagactatgagatggagaagagcagcctgatctacatgcagtttaactgcatgagaaataaacttcattgtgttaagcctccaagttctaaa

SEQ ID NO: 356 - DNA, 4001 bp, Homo sapiens
atggggacccagacttcagggaaaggaaagtaagtgacctggagtaggcaggaacgagggacactttgaggagtcaaagcctgggacatctccaggtagaagggaaatcagaagagggtggacagagcagagaatctcatcaggtggtgccacagtctcccagttgagtttctgtggccattctctccccttgggtaccggcccaggatcctatccctcagctcacaggataagcgtagcattttggcgaattccttcacgtccctggtgaagctgcttcgataaacccgaaatatatgctgcagcgtctcccactgctggtcgctgaacgtgccctgggaccaaggcttcagagagcggacggtgtccgagtcgttgctccagctgtgcgtctgcagctcccccagccacgccaagccgtcggtgcgcgtccagctgctattggcgaaggacgagatctggaggcagcggagggggaaaagcctttgcgggactgggagagaatgaagattggaggcgtgtagcaagtggccgggagagcagccagcataaagagaaggaagaaagaaacaagaggagatgagcttcaggaggcggctgatgccagcgaactctgtgccgcgctgcctctccccggagccagggagcagcgagttttctacctagatcgcgccagtgcgtcccgggtctcaccagtccccatcaggcgttgccctccccgtccctacccagctccctctctccgccctcccgcgagtgcactcaagcgccctcgttccacccaccttcagcgcttccccaagcctggaggagcgcccagagcagcagaaacagcaggcaccccatatcgcccggcgtggggacctcgcggagcgccgctgcgcgccgccctctgacctgcgcactcttctcccccgccgctcagctcacgtccctttccgctgggtgccagccaattcccaagcccagaccccggcagccctcctcgctgggcttgccggcggtttgctgcttctgccgaagggcgccctcgcccttagctgtgcgagctgcaaagaggtcggggtcccaggaatcctggcgccgccgctcacttcagtaggtttcacaaccggcgtgtctcaatttcctgtttcaaaggagactttgggtcaacgtgtgggacgctttacaaccattatttatgttttggaagcaggacataaggttgtgtctgtgttacaattccaaccatggtaaaaatgcaaagggaaaaaaggatcaaagtccttgctttagcagtacatgtctctaggtggaaagactatgagtgatcttaatttgctttacatctttatgttttccaaaatttctcaagtgcaagtaccacatttacaataaagtaaacgcatgaaaattaatttcctcagttgcacattgagagaactggattaggttggctacaattctttacaactgtcatatcccaggattcctccacctcagtgttccctagcctctctttcctcctgtcatggtccttgctctcccctccccggcctctgctctgtcttccctgtctcctttttggggacgcgcccccagactctcttcctcctctccgccctaggctctgccggcataccttctcctctggctcctgactcattcactttccaaatatgcgcctctgtcttaaacagtaagtgtaagatgacagtgtgtacctggacagccaactcgccacttctcacactgaaaataagaaaaagtgaccaaaaatcgtggttctaagccttagctcacctggaggaaaagactcctctttggcaactcagaacctgggctgcagcctgacacctccctctccctcactctttttatccaatctatctccaactcatctctatttcacttctttttgaatacctcttgaataaattcctttttctatatttccaccgtcaccatcaccctaaccttttgactgatctcctgaagtagcattcttgggtagaaaacaaaatcattagcacggcctgcaagattatgcgccctctagccctggtgtctaccttttgacatcacctcacaccccagcatcatttgctctgtactgtagcctggctgttagctttcagttcctccactatgcaaaacctcttcctgactaaggtctctgcacaaagttccctctacatgaaagctcttgaccttctcctcacctcaccccctcccaatgcctagttatttccactaaggtatcagttccaaggtcactttctcagggaagtctttccagatctgccagactgtgtgaccctaggcaggagaagtagggcagtcccaacctccactgcttgtacactaactggctttgagaagccatcctctcagcatgtagcagagtttataattatagaaatggccatatgtctgtctccctctgtgtcctcttctaaatcagctggagaggtgccagaaggcaaggatcatgtctccataatctgattcctcccattctgctaacgttaatgtttcccttctcccatatcctgttgcagcaagagtcctagagaaaataggctactgcaccacactctaggctgggatcttgtagacagccctaacccagcctatctaattatgtgtaatttgcccaaaaaagcttaaaataacatagtaacgtgttcttgtaacaaataaggtgttaaattattaaatttggatacaaaattgcctaaataatggataggagggaagctatgagaaataaaaagaaaaataattatatgactcatggggcaatatttttaactttactttcttcaaatttccaagctccctttaaaaacttgaacagttctgtttagtttttgtgtatcttaaaaattttaagtgctaacattcttgcacacttaaagacaagaagctggtttgtgtgtgtgtgtgtggtttttttgtttttgtttgtttatcaacagaggccaggctatattaccttcagaagttaggactatctggaattatacggatattttttcccaaaggtcagttgagttagacactttttggctattggaactttcactgctttttttctgggaaaggaaccattgaattatgaaacgttttgcaatatgttacctaaacaaaatattttataacaagactgactcagaataccctagcacagagagatggtgatttactcagagccttaaaataagcccacggtgggtactacatgatctcacttatatgtggactctaaaatagtttactattttatggaaacagagttagggtagtggtttccaggagctggagggaaggggcaaatgtgttaattttggtcaaagggtttcagcctctcaattttgagaggctgaccaaaaccttggagcctgatcataagggacttacttggtttcagttcagaattcacaattcacaacgtcaaattagttggaatcttatatgctttcttcatgtttttgttatcctaaccataaggagaccatttaatgtacaaaggatagctgcatatgagaatttaagattcttgagaggacacatcagggaaacttttataatagctatcaggaggataataccaacgaactaaagaactcttcttaatagcactttccacaagccaacctgatcaaaatcaaacaattcaaagttcagtcaataaagtttaacagcattcaagtgcaattgctcatagtctttattcagagcataatggtgatcaaggaccgtagtttgctgtaaaatggcctgatttaaagaggtattcatttttgtaagtagcctgataatacaaaccacagtaacctggagatccactaaaagaaacataaggattagaaaaccttgtgatagctctcttacctctcggacgtccagtcccaggagcaaaactccagcgactttgggccccgcccccgtgaaagtggagggcggccgatgaggacggttctgagggaactagaccaatgagactagcctggggc

SEQ ID NO: 357 - DNA, 4001 bp, Homo sapiens
agtcctgaacccacacatctcattctctagtctctcactatgtctttcaaaatgatgatgagaggcaaattcaaatatgagagttatagtactaggaacaagaggggagagagagagttgggctcacctttccgtttcagttctgactcccctgcttccatgagccccgctagaaatcgagggcaggtgtgaccaagaaggctttgcagtatttccttaatatctaggtagcgattgagcactttacagatgttctgggcccggatccctgctcctggagatggctcccaggaaattccttggaaactcaggaaatctgacccttgatatgccatatttaagaagatttgtggggcattcattctacagccagctaatatctggatctcgaaggggtctgagagtggacagggaagagagatcattatggaaagaatgacaaggaagaaaaacaaacaatttagacagtaaagagattcaagggaagaaaaatttgctgggaaatcatatggagactagagtttactggcaaaggggaagaaaatttgtgggaagaaaatttgaagataataaagatactttgaaataactaatgggaaagtggtagatgggaaggctatcaggaagataggagattggtcataaataattcacgtgaaagtggttaggtacaggccagtccatgtcaacactcaggcaaaggataaagaagggcagaaagagggttgagaaaggctgagtctgagggcaggaatgaggggcagaagatccagaggagacaatcattccaaagagccagacatgaagctatattcatgttgagatatgtacatgcaggcccttttgtgtatatggtggagtgtgggtggtggtgaagggtgaagcagaggagggagtgggagtcagagagtggggaacaaggttagtaaggttaaatgatggtcagagtctatatactatcttccactttggaaaatagttggtgttcccaggcaaattatcagcttagagcaacgaacttacattcaagctgaaattgaccagcagaagcttgcactatctggataaaactatggaagtataactggaacagtgactgtaagtttttcagctcctgcttgctgaagtttccatgggaccagggcttcagaaagcggatggtgcccaagacagtgtcccagccatgagtctgcaggtcacccagccatcctgagccctcactgtgtgcccagctgtggttggcaaaggaggaagtttggagcatgcggaaggacagctgctcctctgctgctagatgataggattgtagagcctggggagctgagagagagggaaatgacaagtagagagaatgtaaagggatgggaaaagtgatgccaaagggaaaaaaggaacccagagatgagagacagttaggtagcttgtacatactccaatacccttttcctgtggggccagcttcctttctccaaaatcagagacaaaaactgagactgagagcaagaattctctgcctggaactagcctgaaaggcatattccaagggcatcctagaagagtactgctcccttcccccaggacctccccagagcttcctctcagccctctggtgccctaccataggtatctttccacctgcactcttcttacctgctgtattttccccaggacagcagagaccctcgaagaggaggaacaggagcagcattgaagctctgttaaaggagggattccttggcaggacacctgccctaataattcagatatcagtacccctctccacaccctcttgcactctcgtctgacttcccttgctgtacagacagacaaacctctccctctgctgacttccctgtcagagaagccacactgcctcgctttgctgcagcctcccacggggtttttcatttcccctctgcctctctcactgtctggctccagattttctccctgctcttgtgtacatcctcccaacctccctaattgcactaactgctggaaaacgagtcctggcttaaaacaaagtctgtggtctggctagaagatggagtagcttttggccttgtagaaatcaaatccatacttggcttgtcaataatctaatctgtgagaagtgatggtagtcactcagtggtgcctagtgacctatccaccagtctcccacttctacctctctgtgatcctctcctccgcctgtatctcttcactctgctcttgatcatgatcagaagacactcagcatcctggatgtagctgcataataagcaggcaaccctccataatccaactctctgtgctgctgaaaaaggagcagcaatggcaatgcagattatcagaaaatctaaagaaagctcctttttttcagtttccccagtcaagccaactgtcactgttaaagtggtccatgagtgggcttgacctggaagtggtgagctagagggcaggtagatttcacccatgttttacaggtggctctggaggaaatacataggggacttggatccccatctctacccaaacgaagaaagcatgtctggaagtctgtgggccagctttgccctgggtatgaagaaagactgagggcaggcatgaagctcctcattagttcatggcctgagagcattggagtccccttgcttgcgttcggttagagagcagtttgggtggacacagggaagtacctttagaggactgaagtgttcactggagaattaattgagtctttatttttgtttctttttcattgatatttgttgtgacactctgaaggcagttgaaataacattcctttgtttggtttttatatatttgttcaactgacatttattcagagcccacctatgaccaaaaacaattgccaggccctaagatatcagagatagacatctttgggaaaaaataaaacaaaattcaaccccaaacctctacttttcttatacagtaaatttactgaacggtggtcagaattattgaaaaaggtccaaacctagtttcatcttattatcatttctaaattctaagttaaaagaaagataaaaagtttccttgtttcctgagtagaatatctacatttattttcaatactctttctgtgctggagaggtgctggagaggatgtggagaaataggaacacttttacactgttggtgggactgtaaactagttcaaccattgtggaagtcagggtggcgattcctcagggatctagaactagaaataccatttgacccagccatcccattactgggtatatacacaaaggattataaatcatgttgctataaagacacatgcacacgtatgtttattgtggcactattcacaataacaaagacttggaaccaacccaaatgtccaacaatgatagactggattaagaaaatgtggcacatatacaccatgaaatactatgcagccataaaaaatgatgagttcatgtcctttgtagggacatggatgaagctggaaaccatcattctcagcaaactatcacaaggacaaaaaaccaaacaccgcatgttctcactcataggtgggaattgaacaatgagaacacatggacacaggaagaggaacatcacacaccggggcctgttgtggggtggggggaggggggagggatagcattaagagatatacctaatgtaaatgacgagttaatgggtgcagcacaccaacacgacacatgtatacatatgtaacaaaccttcacgttgtgcacatgtaccctagaacttaaagtataataataaaaaataaataaataaataaaaataattaaaaaaagaaaaaaaaactgcaaacaaaaaaacaaaagaaaaaggtccaaacctagtttcatcttattatcatttctaaattctaaggttaaagaaagattaaaaaaagtttccttgtttcctgagtagaatgtctacatttattttcaatactctttcttttctacaaatacattcaaagctataagttgctatgtaaatctatctataaatcgctatgt

SEQ ID NO: 358 - DNA, 4001 bp, Homo sapiens
ttatatataacaaggagataataacaactaggtctcagtattgttgggcgctttaaataagatcatgtaagcaagcacttgacccctaactggtagccattatttccgccgcaatgctaaatgcgacccaaatgtgaaaacaccagcatggtcccccgcgtagggctcacactcaaaacaggacactcgagttttgtgctgtttggagtcctgagatctgtggtttccagagcccataatcagaggcccttttcagcgccatgctcaaccccactacatttctacaaggtgctctccactcaaggttgcaggactagggtgtggaaagttgtcacttcaggggagctgacagtgtctgggattgctggagtgggcaatctgacactatctgggattgctggtaggcccaggtgctgaagatggggctggagacagagaggaagaaggtggggtccctgcttctggtgatattttctgtgtgaagcacagaaatgcttatttgctcactgaatggctggcctgtgctcatgctggggttcctgtctgcctccccaagtcaagcgcagcttcttcttttcccttcttgtcactacttccccagcatccccccgggctttcaacttcaatggcatttcgattccactttctctaccttctctcccttgcctaagccacctttctctatgcctgacccttattatcctcattcttcctattttagaggcaccctttggtctaggccagtggcgattgactttggcagctcattagaatcccccagggagctttagaacctaatgatacccaggccgcatgcaaaaaaaatctgatttaattggtcctcactccacttggattacagcagcagctttctaactagtctccctaaccccatcctcaatatccactcctgtcctcccagtacaggcagagatatacaaagccacaccttgtgcatcttctacacatatcagcaaaaatcacctgccaccttgtatcactctgacaagcagatccaaaataagggctgttcatccttaaatatgttgtttccagcccttttctgccatataactcctccttcagggcagcctggcttgaaatgggctctgtcgatgaaaggcccgctgctctccagtcagcctcttcttctcgccccactcttagctcgccgattcatcagcaacctggaacagttgccttttccctcggcctacctgtgtccccctcccgattaatgccaccttaatccaggttcttcacccaaccccacattcctgtaaccacctgaagacagagttgtaggcaggtagacttgagggtctatcagatgtgtggatcccattcccgcattggaccacagtctccactggggcaggagacatgcatctggtttcctgtatagcccccctggaggcagaggtcagcgctggggaatattagaaatgctattttccaacttgccaaatagcacccacactgaaataaagcaattaagggaatgaacacttaccttgaatcttcaaatcaaatattttttccaacacattttttccttttgtatcatatattgataccttgtagatatcctgatcatcggtcttcagatgcttaattttcagagttccatttttaaatagcttatatgtatctttttccttgaaagtctctttctcttttctgaattgtgcaatctttttcttgtctgaagttttttcccattttatatcgtcaatatcatcactcatttgaaaactaggaatgtccaagttgatgtcctgacccaaggcaccccaggtttccaaggcattcgtaatctctttggagactgcacctataaaaagcaaaagagttactgagagtcactttcagggaaagctgggttgggacttctttgactcttatgcttacctttggaagaaacattgaaaatcagaaggaagctggctacaaatttacatggaaagctcatcttaggggttggtttcctcttttgattctgagctcttcatgcaaaaggaactgaagtgagactggtggagtccacaccccgagagcttaaccacgtgcctctctttacatcttttacagtaacataaaacataatacacatacacagagagcaagagcgcgcacaagccagcccttctgatgtgctcctttgccaaagcagatgtgtttatgagtgtgtgttttcttgctgcattttaattctcacacaaaaaaattgggaaggataggttttctcatctcagtgaaagagaaaaggaacagagaggctaagtagatcactaaggatcactcttttgtaaacaagaagccaaattcaaccacacagccttttatccacttaggtatactgtccctaacaagaccacatagaaatataggtaaatgttcacaagccaatagcagaatgcaaacatttatcccatatgattatattgaaaaatgtagacccataaaatgatgaggaaattgatttttttgtttctccaaagatatttttcatgttctaaaatcgtttttgtggtgaaaagaaagaaattgaatatcagctgtaaatgcttgcaatccccaaatcctatgttcggcatacattttacaactctagtgaaattcacagttagataaataaaaacttattccaaaacaaagaagcatagagactatgaaatataattaaactaccaaaacaaaggagtcaaaagcatttaaagtgattaacattataggtggttaagaaaaaggagagattaggagaaaaaataaatgagagggaacagggagagaaaaaaagaacagaaatttgtgacacaaggaaacagacagtgatgcagagacgggtgtgccctgaaaagatgcctaaaaagagaaataaccatgacagacttccaaagcacattttcagggttataattctttaggtcacagtgagtaaaaattgcaaaagtggtgctcgttttctttttcaactttaagtacaaatatggatattatctgtcagaaagttgccaaggaaatgaaattaagtcaaagcagttgtttgctgttactgggtaaaagaaagccaaatatttacctcatggttgtatgagcgtcatccacaataatgaactacagttggattaaagttttaaatgcaaaaatactataataatgctaaaaggaggccgggggtggtggatcacagctataatcccagcactctgggaggtcgaggcggacctcctcacctgaggtcaggagttcaagaccagcctggccaacatggtgaaacccatctctactaaaaatacaaaaattagccaggtgtggtgatgtgcgcctgtaatcccagctactcaggaggctgaggcaggcaaattgcttgaatctgggaagcggaggttgcagtgagccaggattgtgccactgcactccagcctggggagcagagtgagactctgtctcaaaataaataactaaataaataaaataataacaataatgctaaaaggacaatatagaaagatattcctatagtttgagtatggaaggcctggctacatataacatataatccaaagtaagaaagaaaagatgaacacaactgatgatataaagaagtaagatttacatgcagatgaagaaataaggaacaaaatgaaaaggcgtgacaaaatatttgcaatatatataaaattattaatattcaaaatattcttaccaataattcttaccaatcaatacaaagtagtttttaaaatgggcaaatgatataaatgatcagcttgcagaagaaatatttcgcagaagaaatatcaaacctacaagaggagtctaatgtgaccaaaaatatatgtatatatcttagctataaaataccatttttcaccatcagattggtaaaattagaaaagatgataatttacattattaacatgagtgtgtggagaaatgaaccctcatacaacatcagagggaatgtaaatcaataccttctggggaaaggaatttat

SEQ ID NO: 359 - DNA, 4001 bp, Homo sapiens
gaagacccaagtccatccctccctgtgcctaacaagtcactcaccagcttcaccgtgcaagggccggcatagccaagcccagctatggtgctgaagccctgggaatgggggtggagggagcattgccctctgtcacacaggctcatgacctcagggtcataacctcagcttctctgttactctcatccccacagccaggcaccaatcccatcagtcctccttcggctgtctgagctgcattcaaggatccttagaccaggttccaacctagctctcctgcctagaatcctgggccactaggccccccaacccacccacaagagctgcaggctccactcctccctccctgctccctgttcctcatcatgctctgccctaggctgcctgcatccttacaaatgttgagtccacctgagccttgactgtgtcttcctgaaggacacaagaatgctcagggactcggtaactgaattgagtacctgggcatgggactttattgcatatggggcttctacctggccctgaacccacacaacactatgcctcagtttcccctctttgtgcccagagtgtaccctcctctaattccacgctctccacctccgtgaagcccctgcagagtcactgatctaaaatgcagaaccctggctgggcatggtggctcacacctgtaatcccagcactttggatgggggagaccaaggtgggcagatcacctgaggtcaggagttcaagaccagcctggccaacatggtgaaacctggtctctactaaaaatacaaaaattagccaagcatggtggcgcacgtctgtaatttcacctactcgggaggctgaggcatgagaatcacttgaacccgggaggcagagtttgtagtgagccaagatcacgccactgcactccagcctgggtgacagaaggagactctgtctcaaaaaataaataaataaataaaaattaaaaatgaaataaataaattaattcaattaaattaaatgcgggatccaggtttcagagcatcctggaccccagaactggagaaagaggggagcagccctcagctgggatccccaggagtaaatgttagatggctccatgcctggctgacagctttaggtttgctgtggagcttcctcatattgtctccttcttctgccccaaccctgcatgtccctaataatttccaggctcctgtggcatctggatggctgaagaagccggggagatgagggaccatgccttccagcttcttcctggctgctggcctcgccctcccctccctgggctcagctttcctgcctcaggggtccatccatctgtctctgagctcgagaaccacccacttccttgggactgcttctcttctctcatgccacaattggaggatgcaattttcatcatctttacaggcggctggaaggaggcttctctctccactacacggaagggtaaattgaagccagtgggaaggaatctcctcacccaagacttcctggattgctggtggcagggccagatacccctctcacagacctcccagtgcactgccagcctgtcctgtctgatttagactgtcagagctgtcaggagctgctcggagtcaagttccagatgactgtgtatgtggcacaagcagaggctctggctctgatctccctgaggggcacagctcctagtccctccctcgccccacgccaggtaggacctccttacctttgccctgatacaccttgaggagcaggaggagtatgagggtgaccacttgccccagcatttccacaggacagaggggccaggccagcccctccaccccaccagactctctgccgtgcacgggctcagcagtccccagtcagcaagaggacgatggggagcagaactgccttgcaacctgtccagccacagtttcctcaattagaggctgttaacgcctgctgtgagctgacaaggccactgagaaagccccagcgcctggagctggtctgacagttcccacaagccaaactggtgaagcttacctcaagtgggagggtgcttgaagttcacagtgactcacaaagccagtttcaaaattgcatcccgttctctgcttcagcccaagaagtcttccaattctctgaatcctatatggagagacccccatgggggccaaacagccagtatccccaactgttccattccaacagacattgtggaggtggagtggagaggggctggaggaggagtgggctgaaacgtagggccctggataagcggctaacagtgttgaaggaaaggaggagtagctgagagaacataggaagagacctaagggctggaggcactagaaaaatctagcaagcctggggattccatgcaagttgacaccaaagtttaagcacatgtaaattaaatttgtttcataagaatttgtttcacacggggcacagtggctcacgcctgtaatcccaacactttgggagactgaagcaggcagatcacttgagatcaggagatcgagactagcctggccaatatggtgaatccccacctctactaaaaatagagaaattagccaggctgggtggcgtgcacctgtaatccaagctacttgggaggctgaggcaggggaatcacttgagcaaaggaggtggaggttgcggtaagccaagatcacgccactgcactccagcctaggtgacagagcgacactgtgtctcaaaaaaaaaaaaaaaaattttgttttgctccacatttccgatctgtatgcctagattccctcccttcctctttttctacttttctatagtagtcctctcttccctcttttgtcttctcccagaagtgacatgggcctatttttgctgccttcccatccatgcttggacgccaccctccaggaaggccaggcagctctggatctgcttaggcccccatggaggggtggggacagcggcatcccccctcccctggaacactgtgcttcaaggccaggccccagggttcatgcctctttctttcttccttctgctttccccttaacaaatactttcagttcccttcaagtccgctcttattctctttttccatcctttggtccatttccagccaccctgtctgaactgggcagggggcagcagactgacagcttcagctgccaacagaggcagcagcggggctctggacagagcgctggatttagagtcaaagacttggacttgcagctcccattcagcaacttacaacctatgtgattctggccttgttgctgtctgagcctgtagggtcaacaatacatcctccccaccttcacaaggcagttttcaggatcaaattaaaaatgatactccagaatatgcacacaaaaaacactggacatagatgaggtttttgtggttttgttttcatttttttaagctctgaatagctttttccagcgggtctaatggttatcatctcttctctcctttgtctgctcccaaggggcagccctcaaccctggggaatttcttcagagttgatctggccatgtccttaaccttgagaagtggtgcacaagacatgatataacaaagaagggtaaacttcctcacacgacaggtggaaaacaagatccagctgttggaacccactaatgaatgtgaattaggaatcagcctctccaatcctgaccccaacaccagctccatccttcccaccaggcatgtggatgacctatcatcccctggaaacagaactcggagcagctgtaccactgagtgtgtgtctgtcttgtggtccctgacaaactctatcacacaatatctgctatttgtaggctgatcgcagtggctcatgcctataatcccagcactttgggaggccaaggcaggtggatcacttgaggtcaggggttcgatatcagcctggccaacacggtgaaacctcatctctactaaaaatacaaaaattagccgggtgtggtggtgtgtgcctgtaatcccagctactcgggaggctgaggcaggagactcctttgaac

SEQ ID NO: 360 - DNA, 4001 bp, Homo sapiens
agtcgcgctttgccttaccgtacctcgtttctgggctaggatattttgaaacacttttgtctattagctttatctaaaatagctaaaatatcagtctccatagaggcaaagtaagtggcactgagaagcaaaaaatccagccaatgtgcagttttctcctcctgccccctatttgtggaaatgaggcacggcccccatcttgtctgctgggtggggttctgtttaccacgcttggcagccaccgccacccaacaatctttcatttttctttctaacttcactttgcccctaccttggtctctccaagccgaacacaaatggaccagtgaggaaactgcaggtaaagaccctgaaaggttatatgagctccctggtgtggtgtctcaagcctgaagctcagaggctggagctattgcccctggctgtctcccctgaagtcactaaattccagcgttctgggtccccttgtccccagcacacaaggatgggctgctctgagcaagctcaggcaccctcactctgccacactgtgtgtgtgacttagaccccacaaggcttttctgagaaaacagctgtgacctgacagaaacccctgcagctgcacgggcctcagaatcccccgaggcgctggcccgggctgtgcctggctccctggtgggagcagaagtgcccatggcctctcctgccctcccaacagggcccctaaacaaattcccacacccaggtgagttaccaggagcgatcaggtgggccgaggacatttgcttgcttcaccttccctgtttctttagattgaaattcagcctgccccacttctcaggaagatgccacgaggctgatccccctgagcagtttgtcctgtcctcttttcactggttttcttcctcattacctgggctagaaaacatggtggaagctaaaggcttgcagcaaagctgggctcccacgatcgggaatgaggtgaggagcaagcactcttgttggctgggcgctgctcgtggtggtgacttaaccaggcacatcgtctcatctgccccgtgttctgtcaatgccgggccctctggctgggctagatggccgcctaaggggcaggctggggtgagtcacggagcctgggatggtgcgtcacccggcagtcccaggcgtgggtgtggggacagccatgacaaggctgagcctagacacggacgcttggccatgaggtggcgaaggcgctgtggaggctgccacccggtgcttcctgcctgtgcccctctcctccttggttaccccacttactcccgggcccattggagtgtttcaggccatgaccttgactgaccaacaaaatcttctttgttggcaaaggaagaaagaaaggggctgagtgacggagccagccagagggtgaaagaagctgaagggactagaacgtcgcagcacgaaacatggcctggctgacattttccgatcctgtccagcttctgtgaaacactccctctccgtttctctaccctgggcctgcctcggttgctctcttgcttccttcttccttcctctcttatcactcgaaaaatctgtacctggaggagctgtgtattctagcagctggctctgaactgatgcccaactcggctgtgacggagcagatgccagcaccgggccggacccctcactgctcacttgcccattgatttgaggagggcaggatttgaaggagaccccagcccctcaccaccctccactacccacacccactcccctacacatacacaaagagtttctagaagttccctgccgtcgacacgtcggccctacctgtaatcggcaactgtgcctgcaggatggccgcggtgaaaagcgccttccacttcatcttgtcctttccctcagaaagaggctgggaggcagaggctgaggcagcggtggccgggacggttaggagaaaaggagtctctgctggttttattctgcagctacctccccaggaagtggaggactgtggggcctttgagaaagcacctgccgacagggccaagaaattcgcactccccctttcggttcacaggcaggaagccctggaggtttgagggtttggggtgtgtgtatgtatctgtctgtctgaattttgctttttctctcatttgaccattgttttaatgctcctttttttaaaaaaaataattcttatctaattcctatcttgattggtaaagtccatctctaggcaaatacaagttctcgatggatgtaagaacatttgctgttttcctagactgtcaaatattttatggtggctggcaaaatgacagaaccctggattagagtccaggacaaatgtagagacagattccttgggctttagtgacatctctgcctaccacctacttgctgtgtggcgttgagtcagtcactcaacatctctagacttcagcttccttatctataaagcaaagagctggagtagatctgaggttgcagatctgaacttggcctgaatttggatcattgtgtgaaatactgtagctcacatagtattttaaacacttgtgttagttgtcaacatttaaacaccagagtaatttacaataataaaacattaaaacctagacataaacttcgtctaaaaattgtaatatatctatatgaaacaaactttaaaacattgctgaagaacgccgaaaggacttgggtaaatggaaaggcatacccttctttgataggaagctctcttttaaggagaccaccattctctcttaattaatcaatctatttcattgaaaataccaacaaaaagttttagaacaagttaagctgattccaaaattgatatgaaaaaaattaatgtacaagaatagccaataatccaaagtcacagcaatccaacataaaattgataaattggacttcatcacaattaaaagtttttgtgcatcaaaggacactatgaagaaagtgagtcctgcaaatcaccgcatacctctaagtgatggaaacagcattcccatcatcagacttggtacctactcagagcctaaattgacccctaagggggccgatgacttactcaaggccacacagcaagtaggtggtaggtagagatgtcactacagcccaagtagtctgtctctacatttagtctgagtcttcatcagtgaaggttgtcattggtctggggtgctgacacactgatgaagcctacatataccaaaatgaagacacagctggggaggccatcagggggaaaatagcagaaggaaaggtgcagaggaaggatatcttctactgtggaaaactgtgggctacaaatcacaacccagagctggtctgcccgagcctagagaggatgctcaaggtcctccagctagattgtgtggatctttacatcactgaaatacccatggccgctaagccagaagacaaaatctaccctataggtgagaatggcaaatggttatatcacaagtcaaatctgtgtgccacttgggagacttcggaagcttgtaaagatgctggcttggtgaaatccctcggagtatccagttttaacagcaggccagctggagctcatccagaacaacccaggactcaaacccaagccagtcagcaacgaggttgagtgccacccatattacacccaaccaaaacttttgaaatttcgccaacaacatgacattgtcatgattgcatatagccctttggggaccactaggaatccaacctggacaaatatgtcttctctgccttcgttaaaggatgcacttctaaaaaggtgcaataagatcacagctcaagttattttgcgtttcaacatccagcaaggggtggttgtcattcctaaaagctttaatcctgaaaagatcaaggaaaaccttcaggcctttgacttttctctcactgaatcaaggacattgaagcctggagtgaaaatgtccgcttcatagaaatgctcatgtggtgtgatcatcccaaatacccatttcttgatgaatactgacttcagagagttcctgaacagattc

SEQ ID NO: 361 - DNA, 4001 bp, Homo sapiens
gagaatggagcatctgattggaatctgcaccactggccaactcacccctgtttttttgttttttgttttttgtttgtttgtttgttttgagaaggagtctcgctctgtctcccaggctggagtgcagtgccaggatcttggctcgctgcaacctccgcctcctgggttcaagggattctcctgcctcagcctcccgagtagctgggactataggggtgtgccaccatgcccagctaatttttgtaattttagtagagatggggtttcaccatgttggccaggatggtctcgatctcttgacctcatgatctgcctgcctcggcctcccaaagtgctgggattgcaagcgtgagccactgcgcccggccgactcactcctgttatgagggcctagtctagcacccactctagaattttgaaacctcattgatagcttttccttgccccaaagcacacatccaggactgccaaacagggcaacccaaaacttctctcagagcttcctccagcccaggggcagctgtccccagctgggcggacccaaagatggacaacagaggagactgggaacaaagaggtctagtccaggtcactctgcagggccacagtgggtggcccttaggatgtagtgagagtacagaattgggagccctagagtgctgtaagcaaaagggagagcaatgtacaaagtttcaaaagtttcaaaccttccaagtgcaaagagatgaggtggagaatgtcattccccaaggaaagtaatcgagtataaatatttaccgggtgcctattttttttttaaccgaagtgagagcaagaccttaagagtaaggatatgtgtaggtgagtgggggcagtgttctaacccatccactagctttagaacttggagcaggggcagaggaagaaaactccaaaaggtgacaagttttgaaatttgtgcaggggtgacggtttttggtaaggcgagcgaggctgggcgcagagcaaattctgtctacttctacctcctccgcggtggggttgctgaagtgggaattcaaactcagcttcccaatcttaaatgcaaggtttttgtttggttggttgtttggttttgtttttccttttcacggactgttcattccgaacacccctggcctgggacctggagcctcatccctgattcgcttccctcgaattccttaatgtccacttctggctctcccagtccctgtgcaaggtgggcacaccggccccttcccagcaatccgctccgtgtctatactttctgaatcaaccaagagccacaaaacttttcctgcttctctcctccccagtctcccggttctggctgcaacttcgcactccgcgcctctggcaaccagaagagaccctggcatctccaaagcgctttatctcagtccattggaaccagtcgtgctgaccgattcacacctcggctaacgcacactcgcgggggtgatggccttcccttcccctcccacccccgtcagctcccaggtgaggcgctggccccggggggaagcagctgtgggcggcagtgcgtgggttgggcaggggtcccttccctccgtgagactctgctctgctgttcagcctcccagaaagcctccaccctccccgcggcgaagccaagcggccgcggcgcgcgggcggtactcacgcagcaaactcagcaagcaaagcgcggtccagccccgcggcatcctgggccctgcgcgcgcgcccctgcggaccagcatccttcccgcgcggctcctagagagacgcaccgagtggaagacactactcggcttggccaggacgcgctcttcccgccccctccgcccgggagaggggtgggggattcttgcttttttcctctcttctcccctccctttttagtcttggcaaggcagcgcctctccttggctgctactaacttgagctcccctggttggtcccaaaggcggagggcgttaggagggaggctgggttgccgccgtcgaggccaaaaaaggtggaggtttgttcgggctccagatgcctcgttcagctttctggagaggccccatcccacttcttcaagctccacttccacttaacttttaacccctttgtggcagccttgccggtggccagggcaggggcaagtttcctccgattttttccccacttttctttccttgtgattttcctttatttttaagttgtaagccagtaacaatcttgcaaaaggaatctactgtaaggacctcagtttagaagtgtgagcatttcgttaatcaggtaaaacttaaccacaatgtggcacatttagtgatagcctcaccagatcctgtgctgtgtgtgagtgaagcgtcaggagtgagcaggtatacgtgactataagtattcattttggctgtccaaaccattcttggagactttttctttcttttcttttcttttttttttcctgcaagacctttttgtgttatgttaactttttgctaacttgtgttaacttttcctgtgaccttccatatttccccatttagttccccatcaccatcatcctaaagaaaaaggacttccctggatgccttctcaccagttatcccctctccagccctgggtctaagccactagggatttcaccttgctctcccatcagaaaaaggactttctgtgactccatcctccaccacttgatagatccttgagcttcctgttcctcaccagttcctctgggtgttggttgtactgaatagaagaaactctgagccgggtaggcagcctagtcttggggacgtagagacgggagaaaggagaagccagcctgggcagatgatggcaccaggggaggatcagataaggtataacctgggagaggctgctctgatatccagagcagaatcatgaaattataaatactcagttcaggctcttccatgatgtctgtaccacatagcctaaagggaaaaaagagaagccagaccagcactctgtggtcctttctgatttctccgcagacactctagcattataaaagtagctttacctttatagtccatctcaaacctactatgcgttggggttgcacaggagaaggatccaggtctaaaaacaaacccaaaatctccttattctggtcttgttgcctagcattcctttaaacagggaacaaagtctttcatcacacaataagagcaaaggcctgatatgctaatttgattgaatacaacggaatggtatgaatctgtttcaaagtacaaatgatgattcagaactgatcacatagtgatggcaagggcctggggacagaaggagtggcaaacatgcattttaaaatcagtcattggtccttgggactcccaattaacagggaaaaggagttagttccaacactgccaggccccccactcccctcaacttcctcagctccagggaccgctcggtctgcttcaggcatccagtgtgcagttgagaacaaatgtggggttgtaatccctgctagatatgaaagctaatttggtccactttaacttccatttccagattttttttttctggttactttaaataccatttgtctcccatagctggaccacgggaaacaggggaaataacttgtctttctttagtacctgaacttcttaactagctttgggagcaaagagagagagaatgattctgtggagcagagttttctcaaagcatggtctacacagaatcaagggtgagggccagaatctgtactttgagtaagtattctccatgactcatgcacactgaggttcaagaagccctggtatagaaagaacacttgctgggtacaaggagcaagggcgaagtggatgtcaggcttcagggaggaaaaatagaagtaggggatatgggaggctggcaaatcccttcctctgagagaccagagctgtttcttctctggcttgcaaaggttatggatagccccagaactacaaagctagacagtgattggccactcttcatattttccagggtcactgagactcatcacc

SEQ ID NO: 362 - DNA, 4001 bp, Homo sapiens
actgagcacttatcattgagcaaaacaaagtccctgcttatcttcctgcatgaatgtgtgtgtaaacaaatagtgaaaaaaggatcaagaaaataggaatggtttgttattgcctaccagtgtaatagcaccagacatacaagacccatattcgttgaatgaatgctcctaaggaaaaaaatgcaacgtagaaactatacatgttattggatcctaaatataatttggacatagatacacatgacgcgcacatgaaggcagaaacaaatatgccaaaatattaaaaatagctgtcttttgattctgttcgtatcgcacaataagcatgtatttcttagcgggttttttttttgtttgtttgttttgttttgacagggtctcactctgtcatctaggctggagtgcagtggcatgatcacagctcactgcagccttcacctcctgggctcaagtgaatctcctacctcggcccccagagtagctgggaccacgggcataaaccaccatgcccagctaatttttgtatttttttgtagagacaaggttttgccatgttgcccaggttgatcttgaactcctgggcacaggcaatcaccccgcctgggcctcccaaagcgctgggatcacaggcgtgagccactgcgcctggcctagcatgcatttttaaaagtattgattccattcaatgaaatacaaaataaatttagtgggataggccttaagctttagcttatgagctgcaggggaaaacaagattaacattatctgccttcctttgttaggatactaatttctcactaggtttggctaccattgttttttaggttgtttcacatctctcaaatatgactcaaagtaatgaaaagaaggaaaacaatgtcaaaaagccattaggcaatggaatcagatactatctatattggttgggaacaggaagaagactcgatggcccacccaccccccaaaaaagcagccatttacaaactaataggagctcaggtaacacggagactgttcacagaaggcacaaaaagcatggcgcgcccttaccacctctctaaccccaggcaccgagagcctgctctcactcaacatgccctccctagccccagagtccgcgctcactccattcaaagcaaacagttgagctgtcttgcccacagtgaactctgcacacaggccacttacgcacagcacgctcccagcaacacctggccaggcccctgctcgcccagcccagcacatggggcacagcagacgcactgcaacccttaccgcgggtactgtccaagccctaatgaacaccccactcaccaaggcaccaagggaacacagggcaaactctcaccacggacacagcacgggccctagcaacactcccacgcacctgtgcactccagaacaagccctcacctagggcgcccagtccgcgctcccctggccgactggctcaatcccgaaaacacgattcacgctttttttagggacgcagccagatcctgcgtaaatgctggccgcgcacacgacgccaccaaacaagcttcacctcgggctctgcgtggtccccgcattccccgccacatacccccgggatctgagcactgcacccctcagagaaccctgtccccaaacaggcacggcctgctgtgagccccgccccgcgactcttgcccgactgaggagagctctagtctcgccgcggacgcgcgaacccgccccggggtcctaccggagaaggagtacagcagcaacaccatggccgccagaagcaacccaggaaagcgccaggaaggaaagggacactcgcggcggccgggaggctccatgcgcggcgcggaagacgctgttatttctccggaggaaagcagagaaaccgagagccagccgagcagggaagtcccttctgggtccagatatgggacgcaacaatccccaactcacaaagcatccagtgctgcaggacaggtgggcgtggcccgagccgcgcccggggcggaagtgcgtcgagtcaccagggcggctggggccaatcggcgggccgcggggcggagcctcggcgttcatgggcagcccttggccttcgagaggtcagggggaggccctggcggaacctaacagaacaggttccccgaggccgccttttttcttgctaagcccttggcctaccatcccggaagcctgaggcgtcctgcgggaaaggactggctcgccgtcatatttgtgacccaggcagggtggagagaaaactaagctgctttggtaatagtttccgggaattcgggagtcaagaataaagcacttcgacctaaaaatagagatccagagtctagacagggggtcaccgtgggctagcacccctcagggttagttttatcctggggcactgcaggctgtcaggactgcctgggcccttacttggtatttggcattagtcaggcattattgggaacaatatttgagtttttcttgcttgaatgcctgctactggatcgtctcggggccgtcttgttttcacaatctcaaaggtttggcttctgcactcccagcccctaaggtaatttgccctttgctcccctccctggaggggacccttccgaatctaatttattaagcaacaccaggcaattagaatattgagactctatggggcccttgcccttgagcaactaaattttttattgaagacgaaatatacatgcatgaacaatgtaaggacaagggtgtcctaagtgccaaattcctggaagcaataaatgcagaaggattcggatgggtagaaattgttaggtgaagagtggataagggggagaacttttctggtgaaacaatctgaggaacaatactggaaaattaagaatgagcaggattgatttgtaggattgtgagtaaaccggaatgaccggtaaaaggaaaaggacatgactgacattaaaagagcaaacaaagagttgacatttcttcccctcagattggcaaagaattaaaacgtcagccaatgtgagtgaacgtgttgcagggggaccagcactctgtaacataacttttcagtatgttaaaagtcttaaagtggacatgacttgtgttaggctctcagttcccagagaaatcatcagagctgtgatcaaagctctgatgtgatcaaaactctgatgtgattaatttttgaaaaaatgtaaaccctaagtgtctagcaaaagtaataaagaatttctggcagttacctttgtgtgatggaattctatgcagcaaatattgcaaaagaataccaaatatgagaaactatgatatcattgtaagtggaaaaagcagagtccaaactggcatgtgccttttggcagtccttttattaaaacaaaagtaccatattgatatgtataaaaagaaactaggaatacagcaaaattaacaatggttgataagattacagatatttcactttccttatgcttttcagttttctatgttgaccttatgttacatttagaataaagtaaagaaaatgtatttaaaaaatcaaacctatatatcaagggctgttttgttcatagaattatgggagcagaacttgtattacacagggttaacctatgagaggacggtgaggaactggatgctcagtgtataaacctaaaatgggtcttatagaattatagagtttaagtgtatttaacacagttttataaccgagatgtactgaacaatttctgggttcaccaaaccatggaatttcctcttcctgtccgaccaacaaaaatttttaaattcttggcagagattataagacattaagtgtggaggtggtatatcagataaacatcttagtatcttggattataaaattcaacactccatgacagcaattaaagcgggtataattaaagagatggtaaataggaaactcaatgcgggaaaattattatttctgttaatatatggtgtcaaagagtgatataacagatatgttctgtggctcaaagccagccttcatttgtgaaagtgga

SEQ ID NO: 363 - DNA, 4001 bp, Homo sapiens
acatggtttctgtcctcaaaaagttcaaggaaacagatgatccaccaagcaattcacaaaccataatctggagcctgaggttcccatctaaccatgccttcagaacacagtcacaggcagacagtccaagaagaagtcacataaaaacagaagcctaaaagagaggcagggagagggcaggagggagagaaatctaggtggaaagaaggcatgtacataagcccagaggtaagagaaaacgcctcttttaaggcaaacagtaaaattaagagatttagacacattgaccttcaccaagattccctcgccttagtctaggaaaggtataatcataatagaatggtttggaagttagacctgtgtgcccttaggagaatttcttaatctctctgcaagacagtattctcatctgaaaaatgtagataataatagccacctcactattttctaatgaaagttaaatgaaaaagtatgcaaaaggcctagcacaatgtctgacacacagtaagtgcttaatttgtattttactaacccaggttatagcccgggtgttataacccaggtttactaacctcatcaaaaccaatattatccattcaaaggataacataatcaggtgtggtctgattgtttcaaagaagaataaatgaccaagatgaagcctagaaaagaagtcagagaaaggtcaactgtcaggatgttttcagtatgcctagagaaagtcctaaaatattccaattctcattggcaaccctgcttttcccaatagttagatgaatacttcacatcagcccccaatcccaaggtcataccaatgtcctatgcattgagtcaggcccacagaacctatatagccgtagactcacacagtcatgaaccaaaggactctacctgagaggtagaatatgtgagagaccgatcctccacacattctacctcatctccccaaaagttacaaactatcatcattttatgccacagtgtgactaccacatgtttgttgatttttactgttttactcagagtggtgagcattaaagccctttaaattaaaaagacttgagtatttacttgggggaatagcaagaaagtcaaaggtttcactgctgtttctcagctggcataagaagagaggtactggatgaagaaagagggtgaggcagctctaacaggagaaggaaagttagctcagcccttggtcacacaccggggaccgaacaggctgtggcagaggaatggaccttaactcttagcaatcagatgtgttaaggttcctttgatgctgaagcacttccagcctcttctcagaccctcattcagagaccccagacagcaatcctttccaagcttttcttcctataattttgatctatcttttctttgggtcaatgacaatatcatttaccttggctcaggatgcaacacctcacatatacagaggtctcaaagaatgcctaagggagtacagtgtgtctgagcataaaatgcagcagctgtcagtgtagagcttcttcttattcaaaatgaaaaaacaaacacttttccacaacttcatggaccaccaaccacgggacaaaatatgaggagcctacttctcttgctccccaggttcctgttttgatcacatccccgtgggaaaggagatgaagctccattcatcagtgctaagaaaggctccccaaccatgccatggccatgctattggaatggaaatacctgctttccagacaccagatctggcttctagggttgaactacatcccgtctcccctttcccaactgaccatgccttcagtgcacaatcacagatacacagttggtggaaagtaccttgaatgctggtcaccaggagtgacagaggcagcagtagcaattccagagccagacacgaatcccaacctctggagcacatgcttccttccagaacttcccagcaacgcaggagacagttgagagcctggctagaaaaaggccggggctaaaaacggaacttaccaaacagggttagagagaaaaaaaaaaaaaccactgagattttctctccacccagcacacttgtgtggggccccagaaaccagaaaccggaggtcttgtaaatttttttatctaagagcatcacggaaactgagaacaattttgtttgaaggtacatgagtgcttttttgtagggggaagattcatagcttctactgtactctcaggggggccagtactcagaaaagaataagggaccctgatagagaatgtctgcttttcgttcccaggcaggaatccctctgattaattcaggggctaagacataggagcttcccagtcaagcctgggtaggtgtcattcagagcctgaagtctgggaaatcagacccacgtagcctttgtgctgcatatcttacccccagcaccaccctctgctcttcttcctttatgataattcactatttgaagtttgacatcagcctatccactgaacatcagaaaaaaagtaagattacttggcccaaaagaatggatttcccacccttgtagtctgtattagtctgttctcacactgctaataaagacataccccagactgggtaatttataaaggaaagagaggggttttgttttgttttgtttgttttggttttttttttttttgagatgcagtctcactctgtagcccagactggagtgcagcagtgcaatctcagctcactgcaacctccacctgacaggttcaagcaactctcctgcctcagcctcctacatagctgggattacaggcaagcaccaccatgcccagctaatttttgtatttttagtagggtttcaccatgttggcccggctggtcttgaactcctgacctcaagtgatccacctgcctcagcctcccaaagtgctgggattataggcatgggcctgtgcctggccaggaaagtggttaaattgacttctagttcagcatggcttgggaagcctcaggaaacctacaatcatggtgcaaggggaagccaatacgtccttcttcacacggtggcaggaaagagaagcactgagcagcaatggggaaagccccttccttatgaaaccatcagatctagtgagaactcactatcacgagaacagcatgatggtaactgctcgtatgattaacttacttcctactgggttgctcccatgatatgtggggattatgggaactacaattcaagatgagatttggaagggaacacagccaaatcatatcatgtctaggaaatttcaagctcattcctattgaatgtaaattagttatttgcccacccaggacccacaggcaagccacagttcctgatataacatatttgtaatcactttttaattggggacatttctgattctcaacatggagatgaacaataaaatgtctgctcttctcagtcctcaaacctgaaggacattatgttaagtgaaataagtcatgcacagaaagataaaaaaccacgttcccaatcatatatggaagcttaaaaaatgagctcatagaagtagagagtaaaattgtggttatcagaggctgggaagggtagagggaagtggaggatgggaagaagttggttaatagatacaaagttacagctagagaagaggaataagttccagcatcctgtagcactatggagtgaatacagttaagaataatttaatgtatatgttcaaaaagctagaagagaggatttggaatgttcccaacacaaagaaatgatcaatgtttgaggtgataggtatcctaattgctttgatttgatcatcacacattgaatacatgtatcaaaatattactctgtatcccataaatatgtataattattatatgtcaactaaaaataaaagggaaaaaaacataaaagtgaaaagaaagaaccctgcaaataaaatttgaaacagcaccagaatcaaattcctcttggtcaaattgttacactttggaactgtgtgttatatttttcctataaattgatttaaccttaggatacgac

SEQ ID NO: 364 - DNA, 4001 bp, Homo sapiens
ctcgaactcctgacctggtgatccacccgcctcggcctcccaaagtactgggattacaggtgtgagccatcgtacccagccctcaggggacttttgaatagcgtgtttgttatttaaagatgcagtcccctttctaccctccccgccctccatccgcccacctccataaaacagtcctcagttctgccccatgtgaccactacttcttccacaaggtcctgtcaggatgtttgactgcttcctgctttgacacaggcagggacagaggtgatcactgcccctgtccaccccctttcacagaaactttctgtttttttgagatagagtttcgctcttttgcccaggctggagtgaagtggcatgatctcgggtcactgcaacctccacccctcaacctcccgagtagctgggattataggcagccgctatcacgcccagctaattttttttttttttccgagacagagtcttgctctgtcgcccgcccaggctggagtgcagtggcgtgatctcggctcactgcaagcttcacccccaggttcacgccattctcctgcctcagcctcccgagtagctgggactacaggcgcccgccaccacgccacgcccggctaatttctttttgtatttatggtagagacgaggtttcaatgtgttagccaggatggtctcgatctcctgacctcatgatccacccgcctcagcctcccaaagtgctgggattacagacgcgagccagcgcgcccggctcgcccagctaatttttgtatttttagtagagacgggattttgtcatgttggccaggctggtcttgaactcctgacctcaggtgatccgcctgcctcggcctcccaaagtgctgggattataggcgtgagccaccgtgcccggtcacagaacctttcttttcacctttccccagcgaccagcccttctggcatagagggagacaggggagccctggcccttgaccttcctagcctggcaaagggcttagcttccctgagcctcagtttcatcttctgagtggggagaagttcatcacagttgtgaaggtcacatgagccagggctgagtgagaaagcacttggcaaagcgtgggtggctggatgtggggtggggaagtggccagatggtgatcgagctgtccttaatgcttgatggagctgcaactagaactgttcttgatggagattaagctggttttgatggtgatcaagctgttcttgatcaagaacttgatggctccggtctgctgtactgactcccctctgggcacctgggatgctaccaaagctgcctcctggaatagcagtcgcttttgagactccagttgtttctgaaatgggagagtcctgtcttctttgcattcctgaacatccaggcttctctctggcaggggagtgggggttagagtgtcccctgtcacctccataaccacagcaggctccacttggacatctcctggcctctccccaaaggaccatctccccagactccctgtgggccgatgccttcctcactcagggttgtcttcccaagtctcttagttctctattattccacaacaccccttgggtgccccaacgcgcctagcaccctgtaagtgctccccagctgtggatacaggtttctctcagggcagcccgcaagcagtgcagccccagccagaagagctggaaggctgggcggccaggcccgctgtgtccccagttttcctgttggagtccatctgctgtgctctcaggagagaaggctgggtctctgggagctcacatcctgtatgccctccctccatgccaagcaactttggggagtcctggcagtggtgccaggcgttgctcttacctgtaccataaccaggaggctgatggtgagtaggaggaagaggaagcgcttcattttggtaggatcttcgtggctgtcttggtagcagctttttaggtgatctcagggctgtctggaggcttcttttggtttagctgcttttgaaccaggaggcagaggaggcggggtgaggtagggagaggaaggagggcttacaaggtggaggaggggtgtggcttcctttctgcagatctgggggtggataataccaggctctaggttctaaggccctggctgggggagcaggctagatcgtacaagataggagagaggtcaatccagaggcaacggtgggagtaagtagggcccaaggcctggaatcatgcatcctgcaggctgaatcctggtttaatcactgaccagctctgagaccctgggccagaaactctacctctctgaccctttaacaaaagaactgccggattacatgtaataataaccaatttaaaaagagccagaacatagcagatattccgtaaatgagtttgttgtttaaagaagattggggcagggtataggagctgaaggagaagggctgggatagatttatgtttcaagggaaggttgtagatgggctgcaggttctgaatgaaagcttgggaaatgtttagattgtggaagggttggtggatttctgtgaaggtgctggaggtgaggaatcgggaagcctggtttcagttgggctttccctctctaggcctcagttcctcatttcaaggaactgggaagactgaaatagattatttctgaagtttgttaaaacctagtgttttgttttgttgttgttggtttttttgtttttttttttaaacagagttttgctctgtgcactggcatgatctcggcttactgcaacctccacctcctgggttcaagcaattatcctgccttggcctcccgcatagctgggactacaggtgtgtgccaccatgcctggctaattttttgtattttttttttttttttagcggagactgggtttcaccatgttggctaggctagtctcgaatgcctgatctcaagtgatccgcctgcctcggcctcccaaagtgctgggattacaggcatgagccaccgcgcccagccaagacctagaattttgtgattttggtagagaaagtagcaagcagatgggttgtttgtattagctgaggatgaatgggaggggagcgagggaagggacaagtgggtgactaagctacagtggaaggggactggggtgagagagtggctgtgagggcccagggaggggtggggggatgagaggaatcccacagctgcctggatagtgctccatgctttatgcattccctcacttgataccctctgtggtgccctgcagcaggtgttatgtttatccccatttgactggtgaaaaaactgaggcttagatgttaagtgacttgctaaggtcgtaaatggtggagccagtctcatttgaccttgaatccaggtctgtctgaagccacagccatgtatgtaacctctggggctgccctagaattcatccattaagtcttgattccctgccactccctccccctcccctacacaaactccccccaggccccaggagttggtcaccacaaccccagctctggcccactctcccttcacactctcccttccttagtctactttaggcctcatttacatgctaggtagtaaagggaaaactcccctcacttctcttctattgttttgggccttgtgttgcaagcccaggggagatctggctgaggctgagtccaaagaaaaaaacagaggctgggcataggggctacgcctgtaatcctagcagtttgggaggctgaggcgggcagataacttgagcacaggagtttgagaccacccgggcaacataggaaggccccatctctcaaaaaaaaaaaaaaaaaaaaaaaaaattagccgggcatagtggcacaaacctatagtctcagctacttgggggctgacgcaggaggattgcttgcacctgggaggcccaggctgcaatgagccatgattgtggcactgcactccagccagggtgacagagcaagaccctgtctcaaaaaaaaaaaaaaaaaggccaggaaacagtggctcacgcctgtaatcccagcatttt

SEQ ID NO: 365 - DNA, 4001 bp, Homo sapiens
agtcacctctctaggcagtttttggcacactcctaactcctacagtttgtgcacgttctccatctattatagaaaagagcacattgcactgtatttgtatattgctgtgactgtcatccataataaactctacaactcctttcagatgataatcttttctgttatcctgtatctccagcaccaagtgccatatctggccatggggtaggagtgggaaaggagaaccagagtccgagggcctctgtgcagtcagaggtcaatcagagggcacaaaaaaccaaggaccaacagactttgtcctttccagtttgtgcctcttgtcagtgaacaaaggtgaggtcacttaggtggtggtaaccatagctgtgaaggcatgaacttggaatcattcctcatgaatataaaggtacccaatcctttcatttaaaaattaagtgttcttaactggcccacacaggaaacatcacaggaaataatgtttcagttcagtctttgctcccattcaaccacaatttcaaaatagtacagattctcctcaagattgagaaagcaaaacctctttgtttgtccagcagctgggagtttgctttttctcagctttcttccaaagcacacgcatagtatgatatctcttatctcccatgggagttccttaagagtaggactgtttgctagacaaatattctccttctaccttttcatctccctcccccacaattcccaaagcacagtgcctggcctcaggaggcacctaccacttgattattaagtgaatttatttaaaagactgctttttattttttaatacaaggctcaataaactctgaggtgttttgggaatccagagccctctccccgtccccacccctcttggaaatctagagccctctgccctgttcccaatcctcatacttagatgggtgggtgtaatcaaagagaactttctcctttctgctccagggcataatcaagtgaaattctcacaggtcttggaagaagaaagctcttacatagagtttccgatggtggtcacagagagtcaggaccgaagctctgctaacactttgctgagtccatgcaacctcagtcattagttacagcacatgattggaaattactgcagtatcaagttttggggattgcattttatacgtgcatttcatgtgacatttatcagtggtcatgttttgtacaccaaggataatttggggaaatgctgaggatcccaatgtgcttcctgctccttaaaagccaacaatctatgcatcctttagagatgtctagctttcaccttttaaaatacagttactgagcacatcctggtgttttgatttttagccacctttctatttagtggctttgaagaaccacagtgggagtcactaaatttacttttgaaattttctcaaatgaaaaagaactgtgtcttctagctgtctttctaaagacagctctggctgtgggttctttcctcactttaaaatcacaagaccaattttctgaagaccagagcacataggaaatctccccaatgtcatctcgcatagaaagctccaggcatcaggaattactacacagagtaattcaagctctgaagcaattaaggcatgtgaatgcctcgactcagagatttagataatgggaacctgattaagtaaaagtatttctggcctgattgcctttggggatgttactaggatcttgctaatctgttttactttgtgcactaaatatttgtgaaagagaagttgccggagattttatggttactagagaggtatatggagacccctaagaatacgccctaccccacattagacagcaagccaagttaaaacgtcatcaaccttaccttttccaggcaccgttcctcagtcctttcggcagaatttagtgattatccttgaggtggccgagacaaggctggtaacacagatatccggggctatttgtgtaaaaggagaagtgaagggtgaaaaaatatgatcatgctgtgacgacaggaagcccagatgagaagaaggaggaagtgaggctgagtccgccctctttagtctcagagatttagtactttcccagtggctttttagaagcttcctctcacagcccaccctaaactagttttgtgaaacaaaagaaaacttcaaaaccaagttggttcaggcacagatctgtgagcagtggtggattctagggtaatttggcaatgatttttgcttagaaaaggacagtgcttctcaatcaaggtggcatctcagaattaactgtgtatttgttcaaaaagaagtatgcctggccccaccaccagtttcccattcaggtagacagactggaggggaacacaggaaccaatatttctaaacattttctaggcccgagactttggaatgtctttctgaagattctctgccccctcctcatactccctctgtctggcttcagccagtctctagacttgaattggacaccatttgcagacttctctgtctcgagagcaagactgtcttaaggtgagtccccaaggcataatcccaggggcactggtagaaatgatttggttagtacaggaaacaccacatttggagccaaagatctgagtttcagttccagctttatctcttttagctgtgagatcttgagcaagtctcaatctgtcagcctcagtttattaatggtaacacctaataataatcctactggttactgttacatccttatttatatacaagaaaacaggcgctcaaagaggttagaaaatttgcccaagctcatacaactaagacatgtcagaggtaggattaaaattcaaggtcacagagaaggccttttgagaaacactgtgatcaatatattttgaaaaatgtgtttctggtttcactatgctgcatcactggaattttcttagattgggtcaaaggagtatgtgacaacccaaatgtatcactagctaactatgaaacttggaagcaatcactgggccccaatgttttcatcttataaatgaacagatagatgcactctgcggtgctgacttgcgggcatgcctctgggaaagctagctgtctcccgcttccttcaccctgagacattcagatccagagtaatctccagccagggctgtcttgtggggaaaactgaattaaatgaaggtaaaaaggtctttactgcagaacttgtcagtccttaatattctctaagcaggggaaataatatatagatttctccaaacttatctgagcatggaactgtgtggtgtgtgtgtgtgtgtgtgtgtgtgtgtgtgtgtagtttctcttggggaacaatttttcagtgtaactacactttagggaatgctattaaaaagtctctgcacctcggctggaatcactgaccctcactcagagctgctgccatgcttacaggtccctgaagtggtggggctgaggagaggcttctggctgaactcatattttcctaattatctcacccattctgatggctctaattactatctgtctgttccaaagattcacaaatctatatagatgccatgatctctcctttgagctccactctctcccaggcacctcaaatccaatatccaacttcagtttgattaacttggcatccccacactcaagcctgctcctcccaccatgtccaccatccaggaaaggcctgactggcctttcagccacgttcatgagaaaccaggtgtcctcttaagctactctctctcccacaccaccacctattatcagccaccaagtcctgtcagttatgcttttgcctaaatatttctcaaaccagaccacctctctccaaccccatagaaattacattagtctttatcttttacctgtgttacaggatcccagtgtccttcaagaccaccttggatgtttcttcagtctgtcctcaggaagaagggaggagagccttctaaaatgcaaatttaatcacatgactccccagcttaaaactctcagccggctatttcttccccggccccaccccca

SEQ ID NO: 366 - DNA, 4001 bp, Homo sapiens
ccttgaggtggccgagacaaggctggtaacacagatatccggggctatttgtgtaaaaggagaagtgaagggtgaaaaaatatgatcatgctgtgacgacaggaagcccagatgagaagaaggaggaagtgaggctgagtccgccctctttagtctcagagatttagtactttcccagtggctttttagaagcttcctctcacagcccaccctaaactagttttgtgaaacaaaagaaaacttcaaaaccaagttggttcaggcacagatctgtgagcagtggtggattctagggtaatttggcaatgatttttgcttagaaaaggacagtgcttctcaatcaaggtggcatctcagaattaactgtgtatttgttcaaaaagaagtatgcctggccccaccaccagtttcccattcaggtagacagactggaggggaacacaggaaccaatatttctaaacattttctaggcccgagactttggaatgtctttctgaagattctctgccccctcctcatactccctctgtctggcttcagccagtctctagacttgaattggacaccatttgcagacttctctgtctcgagagcaagactgtcttaaggtgagtccccaaggcataatcccaggggcactggtagaaatgatttggttagtacaggaaacaccacatttggagccaaagatctgagtttcagttccagctttatctcttttagctgtgagatcttgagcaagtctcaatctgtcagcctcagtttattaatggtaacacctaataataatcctactggttactgttacatccttatttatatacaagaaaacaggcgctcaaagaggttagaaaatttgcccaagctcatacaactaagacatgtcagaggtaggattaaaattcaaggtcacagagaaggccttttgagaaacactgtgatcaatatattttgaaaaatgtgtttctggtttcactatgctgcatcactggaattttcttagattgggtcaaaggagtatgtgacaacccaaatgtatcactagctaactatgaaacttggaagcaatcactgggccccaatgttttcatcttataaatgaacagatagatgcactctgcggtgctgacttgcgggcatgcctctgggaaagctagctgtctcccgcttccttcaccctgagacattcagatccagagtaatctccagccagggctgtcttgtggggaaaactgaattaaatgaaggtaaaaaggtctttactgcagaacttgtcagtccttaatattctctaagcaggggaaataatatatagatttctccaaacttatctgagcatggaactgtgtggtgtgtgtgtgtgtgtgtgtgtgtgtgtgtgtgtagtttctcttggggaacaatttttcagtgtaactacactttagggaatgctattaaaaagtctctgcacctcggctggaatcactgaccctcactcagagctgctgccatgcttacaggtccctgaagtggtggggctgaggagaggcttctggctgaactcatattttcctaattatctcacccattctgatggctctaattactatctgtctgttccaaagattcacaaatctatatagatgccatgatctctcctttgagctccactctctcccaggcacctcaaatccaatatccaacttcagtttgattaacttggcatccccacactcaagcctgctcctcccaccatgtccaccatccaggaaaggcctgactggcctttcagccacgttcatgagaaaccaggtgtcctcttaagctactctctctcccacaccaccacctattatcagccaccaagtcctgtcagttatgcttttgcctaaatatttctcaaaccagaccacctctctccaaccccatagaaattacattagtctttatcttttacctgtgttacaggatcccagtgtccttcaagaccaccttggatgtttcttcagtctgtcctcaggaagaagggaggagagccttctaaaatgcaaatttaatcacatgactccccagcttaaaactctcagccggctatttcttccccggccccacccccaagatctcctcacactgggtaacactggatatggaattccttttagttgcttaaacaaatcaatctagttctgtctcacgagctctctctagaatatcctctcacctgttcacttaattccttactcatcccccatcatagcaccagaaagccctccaggcaggaacagttactcctgctctctgctcccattgcccacaggcattcctccaccctctgtcattccttgtttttcattgttttccccactagactgaaagctctgtaggttctgtgttactctgtgtatgttgggtgatcttgctcatgactgtatttttagtgcctggtattgggtctggcacataagaggtgttctataaatatttgaatagtttcaggtaatgtgaggcctgcaagttaggggaaccagaaatttgggacaggcagagagagtaaggagaagaaagagataggtagactgaacatctgcagagagagaagtgataaataagggggaatcttaggaatatcgggaagactatctcaagacaaattgttcacagcaaaataggtgaccattttaatgcagaacatttttccttgaatgtgcctctttccatcatttcactgggaagggttgttccaagtgccggacaactagaggtggctgtttcctgggtttaggggtttggtagagaacaacgtgcccacttatacccatacctataaaattttattgagaattaattctgtttctgaccatcagatatttagaattcatttggagggacaagaacaaaaacaaatagagaataagacaatatcaggaaaccccatgttattgaataacccaaaagaacgctcaaaaactttgaaaaaactaaattagaaaaggcatttagcagaagctcagactcatggcttggtcttctcaatacggggtatattgatcaccatcatagatgataatagaatctgagagtttaggaaacttgaacttggccagacgaatagcgggaatacaaattatgagtactctactactgtgcagtcgtatttgccaaaatacattctgaatagacaaatactcacatagacattttgtatttagcccccatttaggcctttttcaaaagccttctaagtgagtagttctgttttattattggaagataatcactgttgaaatatgagaatacagatagaacttccaagtttatttcagagttatttaagtatataaggatattagagtttaagaggcatagattttgtgagaattataagattggaaacttcaaatgggagattaaagttaactagtagtacattggattttgcttatgggctctaagagtaaagttttgaagaaaatgctgtagaacatcattcttaactttcattttaggttcaaacgtacatatgcaggcttattatataggtaaattgcatgtgacagggttttggtgtacagattatttcatcacccagggggtaagtatagtgaccaacaggtagttttttaatcctctccctccttccccgctccaccctcaagtaggccctagtgtctgtttttcccttctttgcgtccatgtgtactcagtgttgagttcccacttataagtgagaatatgcaatatttggttttctcttcctgcattaaattgcttaggataaggccctccacctgcatccatgttgctgcaaagaacatcatctcattctttcttatgactgcatagtattccatggtgtatatgtaccacattttctttatccagtctatcattgatgggcatttagattgattccgtgtctttgttattgtaaagagtgctatgatgaacatacacatgcgtgtgtctttatgatagaacaatttgtattcctttagatatgtacccagtaatgggattg

SEQ ID NO: 367 - DNA, 4001 bp, Homo sapiens
atattcacctaaaacaagaaatcttcatttcttttaattctactaggtatcagtatcaaacacggttactgtgttagcccccaaacaactcttcactgggcctcttattcatttttaacaatcaacctatctacctgtctatatcccagtttatacatctctctctccctatatatatctctctccctatatatatatatctccctatatatatatatctctccctatatatatctccttatatatatcccaattatatatctccttatatatatatatcccaattatatatatctctctccctatatatatatcccaatttatatatatacatatattttttcaaagtagcaagaagagaagatttggaatattctccacacaaacaccaagtgtttgaggtactggctatccaattaccctgattgatcatgacacactgtatgcatgtgccagaatatcacatgtaccctataaatatgtacaagtataacagattttgaagtaaatattgagagcttttaaaaatgccaccacagagttgtatttggtaagtcctactttataaaatacttaagaaaacatatcatttacgctatgtgtctcaaggcaattgccaaatatattttatatgtttactccctaaacaatacctattgtttattttctctactagttcgttcaagaggtacagtgttaggaagaaaaactcttaatgaagcagcaggacctactcagggtggtaaatgtcttcaattagctggagtgtgacgtgccaacagggtataccctggggtttagtaacgctagagaactatcaattactagtcactccaaaggtatataaaaataaatttaagatacattccattcccagaacttttctaaaaagatgaagaacttacgattgcagaactcttcaatatctgaccattgactgcccttaaggcagatcactgagtccttctcgccaggaattttcacaaagctttcttcacatttgtacgttattacagtatcctcgggaaaacttgtacggccttccaaagctggctgggcattaggtacatctgggggaaggccacagtcacctagggagacaaaagcagaactgaaggaaatgactatcaagtgtcctcacagttgctgttttcaagacacaagcccccttgaaatgccacacctgaaagagatgacatgcaagtttgcagcatcgtgtgctccacacggctggactctgtcgagagtggggaacggtcagcggtctggcctcccatccttttagaccagctttttgggggttaaggatacagtctctttgagccctccctttcgattttgccaggcttggctgctccgcaaacccagccggggcctctttaaccctccacgccgacccctaaagccaagtcagctgggggccgacacagcaggagccccaaatgctggtgagcggcgagagccttaaaggcacaggacggcgggaaccacgaccgcgggccaagctccccacctgccaagtcgccggcccctgtgcgtgtctcagagaccgacttggacctcccacccagcccaggggcttccccggccgccgggcccctactcaccccacacggccggcaggcacaacagcaccagcagcagcagccggggcagctccccgaggaggggcagcgccgcgggcacgctcggccgcgcgacggtcatggcgcgccgggttagaacaaggacgcgccgccgggactccgccgagtcgcagctacgcccagcggccggagcgagttgcagtaagcagaagcctcgtggctccgcaataccagttaaatgagtgctttgggcggggtctgggctggggctctgcgtcaccaagggtgggacaaacaagacgggtggagtaggggtttgttgtggtcagaggtgcggtcagagggctccggcgtcatacgccccgggggccctagactcggggagagtggggaggggaaggaggaggagctcgctggcaacaccctctgggactcactctctccactgctgggtggggcctgcgatgacctgccttctagaaacctaaatatctcctcgctacgtaaacacaaacggggtgtaaacgggagagggggaggggtgctcaagtatcgcaggccttgctgcccgcacgtgagttcgtctaagcggagcatccccgcgcttgagtgctgccaaggggacctgcaggtgcggtggagttcgggggctgagactcaggcgctgagacgcggtgctctacccgcgtcttgggccctctactgggaggtctgtcaaaggccagcacgagggtggggaaataactaaggaggaagggcgtcatctcctagaacactctctaatgtgaaaacagagacctggggaaacaggttgaataacacagtagggagtgaacattgttcatgccttgttcgggtgggagtcattttcttcacccgggttctccttatttacgaaagacaccactttgggattactccagactgactgtagagagaaattcaccagtgtgcgtgtgtgtatgtgtgtgtgtgtgtgtgtgtgtgtgtgtgcgcgcgcgcgcgcgcgcctcggggcggtgtggggtgggataacaataaaaacaaacagaccccaaaacgctgaatggtggtggggtggattttaagaggaaggcttgttacaaaccctttagaataaatagcctgaggtttgcaagactggccacacattagaatcacgtggggagcttatatatatatttatatttatatattcatatatatttatacatatataaatatatattctttaagttctggaatacatgtgcagaacatgcaggtttgttacataggtatacacgtgccatggtggtttgctgcacccatcaacccaacatctacattaggtatttctcctaatgctatccctcccctaacccccaccctccaacaggcccccgtgtgtgatgttcccctccctgtgtctgtgtattctcattgttcaactcccacttatgagtaagaacatgcagtgtttggttttctggtcttatgttagtttgctgaggttgatggtttccagcttcatccatgtccctgcataggacatgaactcatccttttttatggctgtgtagtattctatggtgtatatgtgccacattttctttatccagtctatcattgatgggtatatgggttggttccaatccagaggcccaaactgcaccttagacaaattaaatcagcatctttggggatgggactgggtatcaggattacttaaagtgccacactgtgcagccaggtttgagaaccacagacctatatggtactggtcagagtaaagatctatccagcttaggaccacccctgtcgaaaacagaaaggatatagatggcaaggtgggttgcccttcttcatagagaatagcctcaagaacatgcttccctgtaataatttatctgggtctggctagcagagtcctagcctagattccttttcccttaaatgccttacctcgttaagtgaaattccctacttggaattatactttggtctatggaccagctgtgggggtatttgttatatcctatcattatattctttcctgaaggttttctgatagctctttcctggttggtatgagctttttgaggaggaaaacagcaatttttcaatcatagcattttctttgacccatacctactgtatagaaccaaaccttgtgttgcccattgctggagccaatcctacagtgattccaagcaagggactactgtaggatttcactgaaacctaacaatattcgaacattgtggagtttagaagttatggtggggggcttttaaaaccatctagtgtcatcctcatatttgatgttaaaatatctaacctttactcccatattggatataaaaacacaaggtatgttaggtcctggcagtgtttagaagtggcatgaggtcttcatttattcccccaataacc

SEQ ID NO: 368 - DNA, 4001 bp, Homo sapiens
ctgggtttgcagtggaagggagaacacaggtacaggcagcagtgacccaaggtgccagggaatgagggaccagcttgcctggaggagagttaccccatccattcaattaatccctgtttgtatctcttcttttccccagccacccgcacatgaactccccagagctatttgggccctgtgatggtagtccaccctggccttctggcctccctgcctccaattcctcctgactgcagccttcctctttgttgctaacagattcttcttcccaggcgcatggtcctgatcctgtaaggcccaggagaagctctctcagctcagagaatccagactccctaaggggacactcagcaatcttttcccacattatcacatgtccacacatcaccagtccttgaaggctgggctcaaatatcctccctcccatgaagactgcttcacaaaagacacttgatttcacaaaagagactgccttcttcttccctctgtaccctcacagctcaccttttttttttttttttttttttgagacaggtcatattctgtcacccaggctggagttcagtggcacaatcacagctcactgcatcctctgcctccgggactcaggtgattctcccacctcagccttccgagtagctgggactataggtatgcgccaccacgctcagctaatttttgtattttttgtagagccgatctttcaccgtgttggccctgctggtctccgattcctggcctcaagtgatccacctgcctcagcctcccaaagtgctaggatgacaggtgtaagccaccacgcccagcccaggcctcttacaacactgacttatctgatcgtgcgggtacttttgagtctatctcaacccctcccccttggctgtcttccatagatgcacacgcgcacctcccgggcaggcagcggacgctgagcaaacggacggacgggctggagggctggcagtggggtgcaggagccagccatgagaacccctcaagtacagttgaactcgctgggaggttactgctgtactcccggggttttgctatggcctgactggggccaatgtgtggagggtgaaggaggatggggaggcaaaatgggaagaaggggacctatttcctgaggttgttgtgacgacttggctgacaacacacggagaggatggaaccagttctgatactagtttttaggatttgaggggaggaaaaaggagcaggagtcgcaccacttaggaatcccaacgtgaggccgctgccgactgggcttcctagttgcctacccgctcctcgctgtggggcgattctgaaaagtcctctctgctgatacggcggacgccgcgcgggcggggacggcaccgcgcggggagggcagcaggcgtcgccctcgagcaggtggcatccgcgcccgctccccgtcccgggcgcgttcacggctgggaaaaattttgcagtccgctgaagcgctcagcgacgttactggggaagcccaggaaggaacttggtcactggagctcgggagggggccggcgggggggcgcaggccccgcaggagaggctagcgggccggagcccgtccttccctaaggccacacagttccttgctgactccatgagggacactggcgatgaaataacaactttctcttcctgaaaaggctcccacggctgagttgttcccggcccacagcgacccgtccccacccgtctctgatcggcaaccgcctcgagcccggcgcgtccacccagcctgggtgctgcccagtacccgccggccggcgcggggcccctggggcaggcttcactcaccaaagcagtgcagcaggcagaccacgctgaggacccccagggcccgccccgcgtcgctcccagcaaccatggctcgtcgggccggcctctgcgcgagtgcccagccacaagcagccctaagttcaagcaccgcctacgcggtcggccagaagtagggctccgccccgccctgggctggcagccggcggcccgccccggcccttcctcccccaccctccgcggcgccgcgtttgtcttcgcgcttccactccccgggcgcgcctctggcctcggctctgcgcgcctccttcctgtgtccccggggcgccgtccagtcccccagctcggtccctcccgtcattccgccgccattccatacgctatttttaagtaagaaattctttccttgaaaatggcttggttttaaaaaccaaggttttaaagtaagaaattctttccttgaaaatggcttggttttaaaaaccaggtttctctgccttcctaccgcacctcccgcgcttccccttagcgtttggggcgtgctgtaggcccctccgtggctagacggggctgtggctcccagagagccaccggaggaggcagcaggacgggcgggagcacccggggcccctcatcccttcagcgctgtgtgatcccgcatcagacggcctctttgaaccacttttcctcaaacatgacaaggaaagggagcattttagacaactgttaggcgtagggttacctgaggcaggcctcccccgtccccatactcccttatccccggagctgggatttccagcctttggtttctcccttctcagattcctctttttctgtcttcccccatctcaaccgggactttccctcaggctgagatgtcagatccacatctccctcactgcccagcctccccacatccatccagcccaagctgaggcaggcactcatcactctccccgctcttcatcagtctggattgagctggccctcccctcacatccctatatcccagaacaaatgaccctattcccagaaccagctcctcacatcagcctccctgtctgtcccctttcttgcagacagaagcaccagagttgcccctgcccagctgagggagttcacagaactcttagttattatgtgagcaggaatccatttccatgaacaggactccctgctgcccaaataaccaccaacacatacatggtgcaggttgtgaaactgagtgggaatgtgctttcttgctgcttcacctccattatccccaggtggggactcgaagtcactcaagacacttgaaccatattgcaaagagacatgaattatttcttaagttagccataaaatcttaaaaggtatctctatcagtgaaacttctgggaccaatgccctctaccacaaacctgctatctcgagatattccctaccatctgtagatactgggaacacaaggcaggggcagtgtgtaacataaaatatgaggaaatcaagtgttctctgccctgggctggtaggaactcaggccaacttagaaaggcaggatggggttagaccttcagacactggggagccacagaaagtttttgagctgggaagtgatatgacagcaaacatctattgagcaggccctgtgtgaagtgcattgcttggattaacttagtcttactgctgctgttgtttttgcaaatgaggaaactgatgcctggggaaggtaaattactcagggcacacagtaaagggcagaacttggagtccagctgaggccatgtccaatgcctctactcttatcccttcatacaggaacgggatatgataatgggacttttggactgacagctatgcagccatttggactgccagcaagagctgttaagccccttaagagcagggctgaggaaagaacagcccagtcacatggggctggggaagcccctcacccccaggtcatggtctccaggtattgggtgaggaataactcattaggcttccttggttggactctcctttgaccaaggagcagtgcctgctctttcattgagagaaatgctgtccatcaagcacttttagaagccctcaaatgcctggttaattttatgaatcaaaagcagctcaggaatgctggacctgcaatgcgttaagcaggcagccaaaaagattccctttacatactgagaacctgctatcaaaaggaggggtggatgtatttttcatgc

SEQ ID NO: 369 - DNA, 4001 bp, Homo sapiens
gatatgcctgtgttcatcggcacagcatttagaccaggtaagcaaactcttactgtaagaggccagacagtaatattttcagttttgtgggccatacagtgtctgttgcaaccactcagctctgccattgtagcctgagaacagccacatatatgtatgcaagtgaggacggctatgttccattaaacctttattagacactgaaatttaaattttttgtcattttcatgtgtcataaaatagtatttctcttttgcttttttcctaccatttaaaaatacaaacctcattatcagcttgcaggctgttttagctgatttagatgaatagctcaggaagtagctctatatgtagttccaaacctccagattccagcaccagcctgtctttaaaacatgggggtttcttcctgcaggatctctgtatatttggactcctttctccataaggtccctcctaatgctgtagagagtcctgggccctgtaacctccaggagtccctgaggcctatgcattttcaactgcaaaacacccaccacccccatcttataggatttttcagaaggtgcaaatatctttggacctccagcctacagtttttcaggcagattcaagtagttcagtggtttatcctggaatattttcttttcttggtttccaaataacctctcattaccctcattcccttaatcttcagaatgtggccactctcaggctcaatgaggccttttctgcaactatccaaaactcaaggttatattatacatatgggaatcattgcataaccccaacccaacatgtgtacatgtgaaggaaagtgagcatggcaagcctgatatgcaggtgcaaacgtgatatagccagtaagtgacttggaagctctgcagtagggtgggtaactgcagaaggcacaggccagaaaggcttcatgaagcaggtggaagtgcacatgagcctggaagacccagtagtatatccatgaggggcaggactagccgttgagtgatgtgggggatgcatggatgtttaagatgtggtcagtaccttacattgaacacaaaagtgtccagttgagaggattgtgtgggctttggtgatgtactagatcatcaagacataaaagtggatgtgattgattagcatagggatttaccaggcattgttagatgctttatattagttatcttataaaaaaaaatactcctaaaaacctctgaggaacataatattatcctcacttcatagatgagagagcaaaatttcagagaggtatggtaacctacgaattcacaccgctaagaaatcaaaacggcaggattgaaatccaggtctccttggctccacaatcaccagattaactaggttaatctctagattactctaagcaatgagaaactgaagaaaactagaaaaacattatatgaaacacttttcagaggaaaccagacaatatgatcaatgaaaggtgattgtcttgcagttctacttcctttcctggctctacttgctgctgcccggtgcccattcatttgtcttcttactaatagtacatttaggaacacttatgtaaaaagagaaatgggataaactatcatgactctgtcattacaaatataagaaaatagaaaaaaatctgttaaagtgaattacaaatgtgtatggattaagcggctttttaaggattagaatagttaccaaatgtaaaaaggaggaagaagctcatccttgaaaaacatctaaatctgttccaggttggcggggagaaagttctcctaatcaaagtgccagaaaactctgaagcctaaaccaacaggtgcagagatactcaccaaggatcaaggagaatagcagagccatgaccaaggcaggtgaaggtgatgagctgaaatttaaggctagaaggaggtccccaagcagcaatatttagttttagctgcaagtatgttaagaggagggacaaagacaggtcctgagtgcaggcaaagcattatcagatgatcagaaaccaatagactcggggggcagagctgacagagctggacttgctgaaatcagcatgttccagaggaaaggaggtggccagaactggcggaaaaatgctgaaaacaaaatagaaacaggctatcatgacttggttctgctgtaagtccagctccgtctgtctctcctacagcccctttgctatgtaaacagaggaaacacctcccacaaggaaaggcaggtgccaaaaatatggccatctctcagtagaagacaaggcagtacttagtcgccaaggatggtttgcaagggaaataagccaattttgattcctttaccccagagggaagtgcctagaaaatttggaagccagaggccatgggataaatgcagagttgcccttggaggcatatcccataaaacataatccagggtcatggtgccaatctccacatacaggcctggctttattgtcttcaaacctgctttctcactgctaagcagagggtccaatatacagatttgttatttttctatgcttgtgctggtgtatgcccatctttggaagctggatggaaacagatccctgaggtgaggggcatcataatcattgaactcaagttgtctgtaggtctaagacatgatggacagagattaagcagtaagaccctctcaggcccctctgctttgctatattattaagtatagctatgcttcatgagctattctactccagattgatcaagcaatcaattttgtatgctgacataatctctgcattccaagcagggtaattgttcctctacagtaataatttttgcttctttgtaatattcaggtaactcagcagaaagcttggttcattgtaggcattcatttttaatcccacatttcttcatttacttagtattgtattcaatgaaaagtttttagcactcatgaatgccaggcaatgtgatgggtggaggcagtacatgaaggaacaagggatagttttgcactgtaaaaatatatggtctagtaattgcaataacatgtggaaaccactgttaagagagaaaagtataacaaactttggaggccaggcgaggtggctcatatctgtaatcccagcactttgggaggccgaactgggaggatagcttgagcccaggagtttgaggctgcagtgaactatgatcaggccactgaacctcagcctgagtgacagagtgagatcacatctctaaaataagaaaaagaaatgaaaccttggaggaaatggttactatgtttggagctaatcagagaagacttcacagcaatgatgatacttgagcaggggtttaggatgagttaagtggagaatcagaataggaaaagattttgctatgcatatgcagacaagtgaaacagcattacttattcaaggaaccacaggtagtttggaatgactggattacagcctgcttagtgatcaggggccagggcttcttgatgttgaaaggtaaagacactagatgatatgcaagtagcaacaagagccagataatggagggtatatcatgaatgagtttgtaaatgctaactattcacatccttccctctctagattctgaagtgacacagtaataggtacagaattcagaaaaggttcaaaatatcatctttactgttgatgaactacattagactgccactgggatctaaggctttatgcatttacctccattcttcaggagctagatgtgcacaacagagtttacccttggaaaagaaaagactttgtgtggcttgagggcagacaaacccattagcaaacacaggcttcatgattcagaaatatattttccccattccatgtggaaaattgagtgaaagaagaagagaaaagaaaaagaaaacttttcctcccaatatagtattttatgaacaggcgtgagaacatgaagaaaggaaaaggaagctttttagccaggaaggacactatcccacaggacacaagaagccaccgaagggtgttacacatttaaggtgtgtat

SEQ ID NO: 370 - DNA, 4001 bp, Homo sapiens
actcctagtttccttttccagaacccagacaaccaacacctaagctcaaactcccaccaccttttctcctgtttatgttccttggacaattccctgacagaggagtcctgcccaggatctctgtgtggtaaagccatggctcttcctaataatgaatgaaaagcgagtgtgaaaaatagtagcattagctgatatctgttaaacacttactatattcaggtaccatggcaagtgttgtacatgcattatcatcattttgattctcaaaacaattctactgtattaatacctccccattttgaagctgaaacaagagtcagaggaggaatgtaacttcgtctaggtcacaaaacttgtaaacaattcactactagctgatttgacaactttatttcagtttcagtagatgaaagaagtgtatcctagagctaccttttatcttagcaggtattaaccttttgaagagcatcaaaaatttgaaagcaatgagtgaagaggtcaggtggagcagaaagaagaaccaatgggattgggattaaccttggaattagaaaaaccaatgtctatttccagctctaccaatttaggtagtgaaatttcaggtgaatttttaaacccctaaatcttaatttattatttttcttgcataatgggattaataacgtctatcttgctcatctcaatggttttcatatggatgacataagaatgtaggcataaacattgtagaatgttttgcaaattaagtggtatcaaatgctaccttgtctggtctctctctggaagattagggacatccctagtaccattcctcatctacttgcattttctgtctgccattctagagcgaccagcagaggctccaaaaatttggtctgactagtggttacaatctccatgaagttcaaattaaaggagccatagcttgaaatggccaaagaaaccagagagatcacagtgcattgattctacctttacagaaaatccaaacgtactaggttcccagggttctaactcatgccagaattctgctagtgcattttcagaactggcaagagatactagaagtagatctagaagttccaaacatagtaaatttctgttagagcaattgtttgtatttaaggagataacatgtacaatgacacagcactcccagatctatgttaatgttacaattttctttgtacaaataacaatcaatattcatgtcgttcttttagtttactgttatgccataagtaagaaaaatagggtttttaattcaagttctccaactcttttttgagactatttgtaaaaaatgggatagtaatctcttcctcatttattttagagtttgttgaggataaaagcagagtaatagctctgtgttttgaaaataaagggagtttatagagatgaggctcaacaatgataacgatgagtcatccatcactctaacctgatagaacaatcaactataattaggaaagacatttttctctctcaaacgccatcacaattgaatgccaagaagaaattgcttgtaagtcattcaagcttttagaagatctttcttttgccaggctttttgggtgggtttaccaagtgctgattcctctgagaaggatttgcctcagacctttggaaactgagatctccagatctcagaaatataactcagtaatataaactttaaagctgaacctaaacacttaggtttgaattttaagtctctccccagccagttggatcctgttgagtacagtagatactgagacccagggtgttctgctaaacacagatcaaaaagacagttcaatgtcttccttaagggcaatttttaaaactttatggaaaactaggaggcgatcagcaagggtcagaactcacaggtttgcaggcaaaggagcaagatccataggtggtgctgagccatctctttcagggtctaaccttctgtggaaaagcacggcactgttctagcagagtcagtttcacttgagttttcttcctcctttttataacgacatttaagaaaggaagtgcatgttaactgatttagttaacattggtctttgtattactgtgctagttttttccaatttaaagtgcctagcattaattatttattcaacacatatttattgtgtgcctactatgtgccaggccctcttctgggtgctggcaatatacagagcaacaaaacaattgatcaccctcctttcatggcatttatactcttttttggagtaatcaacaactctataagcagttccaatttaatgtagtaagcattgcaataggaaaaatacagggaactatgagaggaataggggcatctaactcaggctaagaaaagttggagtaggcttcctaaagaaactgacaaccaacctgagacaggctcaaagaatgaattaccattattaggcgaatggcggtgggggatatgaaagaggaaaaatgttttgacatatggtaggagcttaaaaaaacatagcaattaaaattacataattatagttatataaaatgatcacaagtacatgattatgtattataatgtataatcaacatgtgatattatttaacataatcaatattaagtattatattaataatatataattatatttatatatgatacaataatatataattatataatatattaatatataatatagtataactacatacatataattatgtataattccatgatatcatcatgaaacattatgattatgatcacaccttattagggacacaaaaagtgtttgataaaaatgaagtcaaaagggatttttagactattgaatctattttgcagatggagaaactggctcagaaggagaggaagtgacttttccctatatcacacagtgaattagggaactgagttaaaagccagcagtgtcacttggcaaagactgtgactcctgggcatgagagacagcaggtgcagaggcaggcttaggtggagttgagctagatgtaacaggactatttcttgtagagggtcttcatcttggttaacaagaataagagtgattgtgtaatgtgtgtatgggagatgttgtctgggaatggggatagaaatgaatatttaagtttgactcagctgttttggggagtaatgagaaggctggggacactacccctgagacctggaggagcttttttttaactgagacgagtcctcatgctagctagctcattcctaggtaacctggcctctagagtcacacattaaataatcctgctgatcatttcccatatatacttacataatactgaatatagttgacccttgaacaatgcaggggtttggagtgctgtcccctcaaccagtcgaaaatccatgcataacttttgacacccctaaactcaactactaatagcctactgttgacaggaagccttaccaacaacacagttgattaacacatattctatgtgtcatatacattgtttaccatattcttgcaggaaagtaagctagagaaaataaaatggtattaagaaaatcatgatgaagacaaaatatatttactgttcattaagtggaattagatcatcataaaggtctttatcctcatcatcttcatgttaagtaggctaaggaggaggaggataaggaggagttggtcttgctgtctcaggggtccctggggaagaagagatagaggaggttgaagggaaggtggaagagacaggcacagtcggtgtaacttttcagaagtatatttaatttttgtctgacttttttgcttgttcatttctctaaaaatatttctatatggtaccccttcttacttctaccatttgttttagttttagtgcctgtatcataccatagatgggcccatatcataaaagaagtcaaaagcggtcccgaatagtcagaagccttctgtcagactgtctaatgtcagcttgttttctggcactgctgcttctatgttttcttccgcattgtttgatcctggcttagatgcattcttctccatcaa

SEQ ID NO: 371 - DNA, 4001 bp, Homo sapiens
accagttccagtgctggaaagcatggatggaaggcagccatgctggccccacaggccaggaaatgctgtggccgaacatgctgagcccccatcaccaccacctgccccaccatccctcttccttctgcttctccaaacgtactcatctcattcattcatccaatcagtcactcaacagttattgagtgcctgttctgagccaggcaggtgctacgtcacagcacgagaaagtcaatggcacaaagattcaagacacagctcctgccctctgcagcacaaagtcccaagggagaggcagatacataagtggacagtgatgacaccatgtgataagcacggcaggaggggtcagtgtgggtgccgggggattgtaggagggccctttctgtgccatctggaaaggatgtggaggctttcgaaagaatcaagggctgatttccacattcaagattctgcaatgttgtgagttgcaatggtgtttgcggtggtggtgaatgtttgttgtttgtggtggtggttaatgtttaatattcacctcagccaccaaaacaggtctgaatttcaacacggtactcagagatccttcactccccacagagcaacagcttttggagtcaggggaagtctgggttccaatcccagctctgtgattttgagctctgaaactttccaaacctgtttccttctctgcctttcagggttgcaggggttaaatggatagcattaatcaccttcctttcacaggctgttagcactcaatcaaacctgcttctcccactcaaagatgtttaagacccaggcaagtcacacccgacagaacctcaacagacagggaataataccaaggggtacctccacaccatgtcccctactgccctgaaggagaatgcctctaagcttagcaaaaacaagcttgaatttttgctcacatgaacttttctacaaaagcaataaatcaaagaaaagagtttaggaacagattagagcagactcagatgggctcaggttccattacccgcccccgccccgcagggcgctgctcactgctggactccgaaagcccagctggcttttctcctccaagattctccaccgaccacccccgacaaacacgtcaccaccctggccagcactgagcacagtgggtggaaggaagagagcagggctttggggaacctccagcccagggtttcaccaccagcgccccgtgtgaccttgggcaagtcatgtcacctctcgagacctccgtagtttcatctaaagacgagcattaacacttaggtcagtgggcaggaggtgtggacttagtgttgtggaagcctcagtaaggtgccagacatatccgaggctgggaaagcacgaacgctctccctgcctgcaccccaggactgttgatgtttttgatttatggcctccccttcctgcctcccatccaacttccttcctcatcccagtcctctaagcattgaaagaccctggatttaagccacatttgagcgcggtctggggcagtcggcagggtaggaacattccagcggagactgggggaagaagggacagagccgcgctcttgccactgcctgtgcctctgcgcctcttcctgtacatcttcctctgacccaccacccaggctgctgggctgggggaccctggggtgcccacctttacctttgaagattctcccctcctgggtgagcagggcagcccccacaggaaagtgactgtaggggcagtaggctgacttcttggcctcctgggagcaaaccagcagctgctggacacactcaggcttcagggtgcaggcaggacgcttctgggccatgttggtaccccgggcaggcagcagagcagcgggaaacaggagctccggccagcctgggctggggccccagacacgattgcagctcctccccttgggtgtgtccctgcagccagaccgcaggctctcaggtacgcagctttcaggatgcagggtctaggagaggagcctcccatggtttggactcagcaggtgtggtgtaagacagtgcctacgtgtgcttcacactctcccttaggaaccactctcactggtggacacactgaggggtgggtcagaaggtggtgccacgctactggaaggggaagctactgggtggggcagtgtgagatctcaaaggtccaagctccaagggctgacagtcctcactttgttaaatcactttttctctccttcactgagggaagggctgaggctgaaagggcagggctggggcagccactgcggcatcccgaggcaggaggcatgaacaagctgcagtataactgagaacttctttattttcacccattttccttccaacttctctttgccctagcccagaattaaaaagtgtctcagctgctgggtgtggtggctcactttaggaggctgaggcaggaggactgcttgagcccaggagtttgagaacagccttggcaatatggcaaaaccctgtttctacaaaaaatacaaaaattagctgggcatggtggcatgtgcctgtagtcctagctacttgggaagctgaggtgggaggatggcttgaacccaggaggcagaggctgcagtgagctcagattgcaccactgcattccagcctgggtgacagagagccagaccctgtctcaaaaaaaaaaaaaaaaaaaaaaagtatctcaattggagggtggagttaaccgttgagattatttactcaggccccctcattgttttgttggcaaaatagatattggtgttggtggtaaagaaatgtgtttgcatcctggttctactactttccatgtgtacaagctttggcaggtcacttgacctccctgaaccacagtttcctcatgtcaacagcagagatagtaataatccctgttctagatcctgagactgtagaagggctccagctttggagtttagtaaaccatggtttgaattccattcctgccatttattagacatatgacattgggaaggtcacacaccatctccctaagcctcagtgtcctcatctgcaaaatgggtgcactaacatgatttcacttccagagttgtcatgaggattgaatgagataatgcgtgtacaatgggtgtggctggagagtctggtgacgttatgatgtgaacaccatttgtgactccacacaaactgggttattgtcattaagtgactcagccaagatcacatagggcagaactccagctagagtggccaaagacatccaactgtttccacacccctggccagcaggagagtttggatggggaatggggaaggggcagggggaaaggcaggggaaaggaggagaaaacaaggcagtatctcgtgtcctgcatgctggcatctctgtgtcccagacttggagctctcagccatatgtggacatcgcagacacccagctgggccgctgaagagttgggtaaagtttgcttcctttcctccttgcctcctctcccttcagatcccctcccctcccactgcatccagccctcagagaggcagcctattgcctcctgctggggctgagggcctctccacccatgcactttcctactgtctctataactttggcatctagagcagtttcctggatctcagagggccaaggatgtctcaggacactgtgtgcccactcaacgtgggaataattctaaagctttttcaggccaagtataattactactgggaaaagagttgtagtgccctgctggtctgccaggcctgtcagagacctcaataagtcatcccgttcctgtcccctgccctgtctcagtctgccccacccagccctgcccaggcctgggaccggccttcaggactccttgactccacagtgctgggagaacctagatgacctcccaagctactcatggcccttggcaccttcaaagctctttacctgcacgtggtcatacgtgaggacagcgctcattccaaacccagctgtatggagcgtgggtgccagtggtggctctagaattcctttttctt

SEQ ID NO: 372 - DNA, 4001 bp, Homo sapiens
aataaatcagcactgctatatcatttccttagaagcaaagaaaataatatcaaaaagtttggggtacccaaataaaagaatcaataatatgtcagataaaatgttagtcataaatgtgactctgatacagctccccgcagttaatgtgtcccactttctgaaaaagagctgcacaaacaaaaacatcctgagatagaacagaagtcttgtaaactataaagctcaagcacctgtaatacatgcactgccctgtaccctatggccactccataaatacttagtgactgattcacaggccaattactgagtctggcaatgacagtgtgtctccctggtcctactctggggaatgttaggaatctccagttgctgtttgttgtggtggtaggaagaactaaaacagatagatgtctaaaagaactgaagtgttgaaaggttcaaattctgtcaattttctctgaacttctccccaggcacctgagtcttaaaaaattgatattgttactcgtatcattgggggggaaatgaataaaactgccataaaagtgcatagtgtttcctcgtcaaagaacaagctgaatggccaagagaaaaaaaaacaaaacataaacttacttttcatagaccagctcctcatcgatggagaaatagtgggtatttactgtgctttttggtctattccttaaagtagcaaaatataaccgatctgaaagacaagtttaaaagacagaaaaaacatatgagaagtagagaagtggaagtgaaggtgggtggtaacatacgaaggatcacaatttaaagaccccattaacacgtggaattcttgcagaaacctcatccctcccagaaagctagagactcaagagcacaacagttaggcaagaggaggacctgaccgaggaactcagcggggctcagagcacccacatttcccttgtttcaggccagcagagtaggcaggagctgggggtacccgcagaactggaggtgcaagtttggttcccaaatctccagacctcagcagctgcgagaaggggaagaaagaggtgagcctcccgacgcagcttcggagatttgaaaaagaggaagggagagagacttggggggtgtggttgggggtgtcccgaaaaccgaagcctgcgatggtggagtaaaggtgaccggtgagcatccggagcaggctccccatgagctgctgagtgccggagtacgggcagaagccggtgctgtcccattacgaggccgagaggccatccgagggagctgcagagggagcaagggacacaagaaagagaagccggaagcagggggtcctcggagaaaggagagtccctagaggggacgagagcgcgcgcagcggctgcaggacactggcagcctcaggagaaggtggggacagtggcgcgggaagtgaagagttgggggcaagaaagcgttggaagatgcggggcggctgctcctcacctttcatgaactcacaagccccgattagttcccctgactccgctgccatcttaagcgagatacgcacgggggagggctgggtcgtggccagctgaagtcactcgcccccgggggcttccccactgcccaggagccaggaagctcacagtcccgaacaacaagcctggccgagggaggcagcaggcgccgaaggcggaggcggcttcggggtcagcgcgccgggcgccccggggacattccgaggggaacccgagctcgctccgcgcggggcgctcacgcccctggctgtggccgctcctatttggactcggctgctgcagctgctgctccgccgccgccgcgcctgggaaacgcagaccagctctcagggcagggcaaagtcttcccccggcttccaaagtgatcatggaggaggagacttctggtcccgatcgcgcccgtggctactcgagcggcagccgggaggacttcagtgcccgcgggctggcagcagctgctccggatcctccttcgccacctcctttcagcagttactcttcctcctcctcctccccctgggtccgcccccagaccttcctccccgccctccctcagccccctccactttcacgactccgcggccatcccttaaagggacagccccgctcctttctccgcagcagccccagttaccaggcgccccgcgggtcactaggagccggttgctaaggctttgttgccgtccaccaattgctgttcaggaaacggggccctcggcccaggggagcgggcggggcctgtaggccagaaacttatgaatgaaacggcggggttgagagtggacatcgccaaaggcgctgtcgcggcctcggaggctaggatgtgctggcgccccctttcttttctgcaccctctaagtcttgtcccactccagatttcttttctctctctctctcattctctttctttctcgcccactcacccatgctcttctaaactcttgtagggcgcgcgcgcgcgcacacacacacacacacacacacacacacactcgtaaaaacctcagatctccgtgccctgcctcgcctctagctaacatttcagccaccccccacgcccaacactgagggggtctgcatctttataaaaaatacaattgaaaaagaagcaccagctcctagctcacagtacatgtattggtttcctctacacataccagactctgatataacttgtactttgttctcacgggacaaaaagtttcccatctggttctccacgccctctcatctgggccgccaatgtgagcgcaaaagcatcacagatgcctaatctttacagtgctccggtcccggaggggcggggcgagaccgctgagccagcctgggcgggcgcggagggaacaggagagagaggagagtccactggtccaaggaggaaggttaacacaaaggaatttctttacatagtctcagctgaagcgctccaggcaggagtcccgctaaaagaggccattgacttgtctctgcgaggctctacgtactgtttgaacaacttgaacgctgggcgtcctaaggctgtacctaatcagagtgcagtcccttccatacgaaaatggcgctacagaccgactatccgaagagcatgcgctctgagaggtctctccagaaacagcaagaaacttgtggcggcgttttccttcgcagtcgcttgttgacctctagggagaaagggggcgcacccgtgcagagctgactgagggaaccagcccttcgagggccaattgcaggttttgtttgtggtttttttttttttaatgtgtgttttgttttagacagggtctcgctctgtcacccaggccggagtgcggtggctcaatctctgctcactgcaatctccacctcccgagtacaagcgattctcgtgcctcattctcccaaatagttggatctacaggcgtgcgccaccacacccggctaatttttgtattttttgtagagaccgggttttgccatgttggccaggctcgtctccagttcctgagcacaagcaatccgccctgccttggcctgccacagcgctgggattacaggctgagccaccgcgccaggcctcaaattattttattgaaaaaaaatctagtatttcttatatgaaagatagggaaaaacaaagtatatgaatctctcgataaacttgcccactttgtttaaaaggctaaataaatccaaagatgttgttgtatttccgaagatgctgatttaaaattcttgcataatctaaattcaaattccccaacaatttttcattaaaaagtgcgttagaaatagaagtcagagttctcattcagttcataaacttttaattgcacaaagtaaatagtctaatgaactccaatctacactttcagagaagccagatatagttgaacaccttcttgttattttccaaaatgaatttacaaaaatcttttatataactctcctgcttaaaattgtgatcatgaggaatgaattatgacctaacaaatacaagtccttaaattcaaatgaaaatgt

SEQ ID NO: 373 - DNA, 4001 bp, Homo sapiens
agccccttgatgctgggtgaatgtctgcagaggaacccagccaccctctccaggagcactaggccacacattgaccaagttatcattaccaccactggccaaatgtcgtccatctggggcccagcgcagcccacacacttcctggctgtggccactcagtgtggccacatggtgttctgctacccgaacatcatggtggtggatgtggccagaacgtgaaccactggaggaggaaagaagggaatcaggttctgtggcagcaccaaatgcaagcaagccagagctggttcagttcaggggtgtacagtcaaggggagggtgggcaaatatcagactaccatagaccaacaaaaaccactgacctggacaggatatagctgttccagcttagggagcccactcgggcagagtgactggtcatatttcgaagccgtttctgctgctgcacatcccatagctagagagagaagcccactaggatcagagattgggacttggcattaatatcctccagctgtgcaagcccattgggactggtgagaatgacagcactggacacgtctcacctgcacctcagcactgctggtgcccacagccaagtagttgccctctttgatccaggccacagaggatatatattccccaggctgctccatttgcaaaagctgcaggatgtcaccagagcttgcactccacaggtacacactgttgtccagtgccacggccagtacattcccagaactccaatccacaaggttcaggtctgtcagaggtggagagaagagcatgagcttccttgtttgtgtggtcccaggccctctttctccatgcatgaggcgaggataaggatgcacttacaatagtcatttcggatttcaggcgcatccaggatacggtctggcagggaaggaatgtaacggcaggtcttccggctggagccaggagtggccttttggctgtagagtactttcagtctgttctgataacctgtggcaacggagtgagtctagacgctgggaaaatcaacacctcccttgccctcaatcttagataggaagaggagacagatatctgtgctcagccctggagatgaactgacacctccctccaggaaccaggaacttcgggtcttaccctctggcgcattttgtggttttccactgagccgaaggatcttggcttcctctacatcaaaaccgttcaggttcaaagcccaggctttctgatgttcctggcataaagggtagtgaaggagcaagatggtattatccaaagaacagtcaggtcccgtgccttaagcccctctgggacacataccttcttggtgggcgtctggctgttttcaggctggttctccttgctcaggaggaagctggccacctccatctgggcagcactgcgatgggggatatagcggtcaccgccaggtttgctaggagtggtctgaaccttggaactggatttgcctggggcggagaaagagaagacagtctgaccaggctccccagggagaaagtatgaaggctgctctcactcagttcctttggcacctcactgaccaggagttcggcccggagtcctgccggcgctgtgggatcggttggcggcccgcatgggtgagggggccgggcctgcggcttccttggctttgcgctgccagcgcgcagggggtgcattggggatgggtgcatccagctgaagcagcgagtgcaggtcactctcgaacgcgaactgtgccatgggagcgcccgcagggggaggggtccttgcagttggtgcctacggagccctggaggaaaggaggcgacggtgctcaggggacagaaagggaccccttcgctcctggccggccacaaaatcagggccaccctcggctgcagccccttccggcctagcaccccctccccctggccacggccccacctcggctcagccccaccacctctcaccgtgccctccggagcagttccgaccggctttaacacgcctggcttacgcctcttaaactctccgctccgagcgcctattggctccttcaaaatccaaccgtcgcaaccgttgccctagcccattggcctctccggcgaagggggcgggccttccggggaaagtctcagctatcacgagagtctagcggcggagcgcgatttgaagggtacgagaggggctgggagccggcgccagaggactagtactggaaagccggccgggacagggcggggcagggcggggccgggtggggcctgcgctgcctcagcgtcctggagtcgtctcggttcgcccttttgcgtgccttccaccgccgcgagctcggaatgtctggccccgggtgcttcagggtccgagaacctgcagaagttcacacttaaatcctacacgagagtcgtatttatgatgcagaactcggtgcagaacccgatggagtgcccaaggcgcttgagccgttcctagaaggggaaggagagccgcgggcggcagcggggcaggggacggaattgggaagcttgggagcaggaagaaggccagagctacttagggtacattccacttttgcttggcgccgggtaggaaccctgctagaaaggaagtaacgtgtgtttgtctcgtttgctgttgttttacaaacagggaaaatgaggttgaaaagggtgaatgaattccttaaggtcaagaaaaaggatcggtattcaaacctgcctatctggaagataagcttagactgccctacaggaggcactgtggcttatccccttggggctttaaagatgtgaggaccttagagatccattagtctaacctgtgcgtggtgcagcctccccaccccgacaacaaatccatattttacagatggagaaacggaggcccagggaagggatgtgcccgaggtcatacaaagaagtttgtgggaatccaggtctgactcgcactcaatctagtgctctaataatgacttgagtgaattgtatgaatgtgctcagaggtggagcagcaatcataaaagtaataatggtaccatttatggaccatctaactactgtgttaaaacaatttacaggccatgcgcggtggctcacgcttgtaatcccagcactttgggaggccgaggcgggcagatcacgaagtcagaagatcgagaccatcctggctaacacggtgaaaccccgtctttactaaaaatacaaaaaattagccgggcttggtggcgggcgcctgtagttccagctactcgagaggctgaggcaggagaatggcgtgaacccgggaggcggagcttgcagtgagccgagatcgagccactgcactccagcctgggcaacagagcgatactctgtctgaaaaaaaaaaaaaaagtttacatacattatcgagttcaatccttaatcccataaggcagatagataccccatcttccctttacagaaaaaagaaactgggtcagaaagattagaaacttgcccaaaggcatgcagccaataataagtaggggagcccaggattcaaactatctgactaatccctgcaatctaaacaatacgctatactgtcccagaaagaggctggaaaaatcattttcagtcattagcttaaagtccactccgatgcttacagataatgttattatctttgacttgaagcctttgcattctctatttccaattaccttggaaaataaggaattggatatgcttaggttagaggtggggaattcccagaaaacatagaaaaggttgtctcatgtcaagttggtcagggtcttaaatgttaagctaaagactttggacttcatctgctaggcattgtggtacctgtggggtttctgtgtagggaaggaccaaataaaacatctgaggggggggatatggcaataatttgcaacttctggtggtagctatagagaaggataaagggtatagcctcagggaatttgtacatttaaaaataaaggatttgggcaggttgtcatggttcactcctgtaatcccagcactttgggaggccaa

SEQ ID NO: 374 - DNA, 4001 bp, Homo sapiens
gagaaacagtgggaaagcacttgtttcgacatgaattatctttacaacaatgcattacacaattggatctcatttgctttacagagtcaacatttttgtgtgatactattgcagtcgcggaaggatacaaaatttagaatgtaaacaccctagggaacaaaaattgtgatctctgcttgaccccaggagtccgagaccagcctgggcaacatggcgaaaccctgtctgtacaaaaaatacaaaaattagcggggcatggtggtacatgcctgcagtaccagctactcgggaggctgaggtgggaggctcacttgaccccgggaggcggaggctgcggtgggccaagatcgcgccactgcactgcagcctgggagtgcaatatccattatatttagtaacgtctttgagaccctgtctcaaaaaaaataaaaattgtgatctcaaaattatgaaaatattaagttttttgcttaaagatcgaagtctcgtttttaataacaaaactaaaatgtctagcatagatcaggcataaactgatcctcttttcaacacaacttcaccacaaaaagtgcacttgaatcaacctagggagattcccagcatgcagtaagtcataaaggagaataaacagtctgggaaagtcattttggaccgaaaagtgttcccacaaataaacccacctcattctagtatagtcaaagggacctctatttaaagttaatgccacgcaaggggccgtggacggtgttgtcttacactttattccctgacacaaactaatcctgggattttaaaccttcctagcttttaggtgcactgaaggcggtcatgaacacaagtaacaagctttcaaaacatcatctgtgaatacgacgtgttgggaagcaggcaggataagccactgggtgaccgactaaggctgcaaaatgctgtttgaatttaagtccctgacttgtaggagttaagtctcactccttataccgcgatgacgtaatcttccacactacatttatcttggacttaaaggggaggaaaaacaaacgaacaaagaaaattcccccccgataagaggaattaaccaagcagcagaacgacggcttcgggaggtagttaggtaactccccgaaagggaagcttcagctaaaccggcagggagcgggctggaggagcggatggaaatgctaggaactcgacctccgaaaggaagagcagcctggaggccgtggctcggggccaccccgcccagaggacgcggccggcgcggaggggagctcggacaggcaccgccgcgagcagccagcgagctgccctcctgccaccgccccgccgcggccgcaacgccactcccctcccccgcccccccacccccgccgcaaaatgtccgcggcggcgcccggcgaagcaggaagtccaggccggagcgcagggcacggaacgcagcctgccagcacggaagaccggcgcccggcccggcccaagcgcccgcgagtcgctctgaggcccccggccgcccttaggagcccgccgggccgggctggggggaggggagcccgggcgcccaggatgggtgtgacccccttccttccgccgctgccggtgacagcccggtcccgctcgcgccccgagccccggccgcgcgcccctcctcagacgggcgccccctgcctccccggccgcgacccccgccccggctcccccacagaacgcggacccgcgcccgcccggaggacgcagcgcgagccgggcactcccccacaacccgtgctcccgggccccccacgatcccgcagacggggtgtccccgaggactgggagaggacggagacggcggggatgggaaggtagggtggcagctcccgcggggaacctcgggccccgcactcacctcagcttctccaccggggcgttggcagcactgcgcggggtctcctcggctgccggacaggggcacgcacctgacgtcagcgcgcaggagacgcacagttgggtgcccgcggaagtgggaggaacagggaaggggaagaggctggggcgggtcaaggcggtgcctggactgccctggctccgcccgcctgtcgcgcacgcgcgggccggcgcagctcgtgagttcggggctatgctctgcatgttttcctaatggttgtatttgtaataatactgtgaacgatagtatgcaaagcgcttcctctaccagttcttttttgtttgttttttctgagacagtcttgatctgttgcccagactggagtgcagcgcgcgatctcagctcactgcaacctccaccccttgggttcaagcgatcctcctgcctctgcctcccgagtagctgggatcactggcacctgccaccacgccaggctaatgtttgtatttttagcagacacggggtttcaccattttgcccaggctggtctcgaacccgtgacctcaagtaagtgatccacctgcctcgacctcccaaagtgctgggattacgggcgtgaaccaccgcgcccggcccactaccagttcttttgatccttgcaagcttgtgaagcaaggtattgtcccattttgcagagaagacggaagcttctctgaaagggctggtgacttgccccagatcacaggggtggatggtctctcactccccgggcctgtattcagtccgccgtgatgtgagaactgagtatcactcttcttatctctacctacacccagtgtccctcgctgtagccacatgggtcttttttagagttacaaccttcccccaaccacaggccttgtgtttttgttgttgttgttgttgttgttgttgttgttttttctttgagacgttcttgctctgtcacccaggcaggagtgcagtggcacgatctcagctcactgcaatctcgacgtcccggcgattctcccacctcagcctcccaagtagctgggaccacaggcgcatgccaccatgcctggctaatttttgtatttttttgtagacacagggttttgctggattgcccaggctggtctcgaactcctggacacaagctatcagcctgcctcagcctcccaaactgctgggattacaaggtgtgagacattacgtctggccaaggccttgaatttctttgctctgcctccctcctcttcccccaaatttatatcactgcattcttcaatcatcctatcttcgcagtatctattatttgtcttctctgctagtatgaaagcttcaggaaaatagagaacttccctctcttattcttagatgtttccccatgttagagaaaaatcgcttaaattgcttatcctaggccgggcacggtggctcatgcctgtaatcgcagcactttgggaggccaaggcgggcggatcacgaggtcaggagatcgagaccatcctggctaacacggtgaaaccccgcctctactaaaaatacaaaaaaattagccgggcgtggtggcgagctcctgtagtcatagctactcgagaggctgaggcaggagaatggcgtgaacccgggaggcggagcttgcagtgagccaagatcgcgccactgcactccagcctgggcaacagagcgagactctgtctcaaaaaaaataaaaaaaaattgcttatcttaataacagctcatttattgtctactgccacagctatttggccaacaaagacacttaattccagtatattgacttatagtcatattttcttttggattttttttttttttttgagacggagtctcgctctgtcacccaggctggaatgcagtggttcgatctcggctcactgcaatctccgcctcccgggttcaagcaattctcctgcctcagcctcccaagtggctgagactacaggtgcccaccaccatgcccagctaatttttgtatttttagtagagacggggtttcaccatattggccaagctggtcttgaactcatgactttgtgatccacctgccttggcctcccaaagggctgcgattacaggtgtaagccaccgcacccagccctcttttggattt

SEQ ID NO: 375 - DNA, 4001 bp, Homo sapiens
acgtaccactactacagacagatctgggtgacgatgcgtgcttattgcaacagtgaacttctggaccttagaatgtgccctgtatgtaacagcagacgctgaagaacttgagccaagccttcaagcttgaaggtcatggagcgtttgctcacatcattgatctattccactacagtaggtcttctaaatcacatctatatttagaagaatgaagccaaaaacctaaccagtttagatttaaattaactttcgagtaaaatctaactctcaagtggaagctgcccccaaacattctctaactactatcacaagatttttaaactatgtcatttaatcttacaaacataatttttggaaagtccatgtttagcagtttcctttccttgtactatgtagagatgaaataaaacccactgatcaccaccttcagctttctgttgacctaaggcaaacacagatattttaatatctcctcctattttgagaataatttccatagtctgaatgtttccaccaataaatacctttcaaatgaaggactattatagtgccatgtattaggcaactgtaaccaataatccacttttgcccatcacagaattgatttaaaatctcttactgttgacctaaaaacataagttcttcatagccaagttccacattagctaggccttaaatcaaggcaacaattgagcagcacaattctactcctgggaaaatatttaccaaaaactagcggaaaatcttgaataactagtgtctgtttttttattgtattttttctttgaacggagtagagtttactcataactctctataccaattaaatcataatgaccagctaaagattaacagtttctttaaaaattacaaacttaccccattctaggtattcgagaatgttcttctctcttctcaatggagaattattgcattcatcataaaggcagatgagtatatccagtaatgtctccacactgaagcactgcccattggtctgagcgggcccgtccaaaataaactgctccaactgcctcaaacgcacttctccagacatgtttgcttcgatttctgctggttttcctttaaattattatgatgacttttactattatctgaacctaaattttaaaaggtatggttttaaaaataaaccacttgttattcaaacaactgtcatgcaatgctggtgctgaattaaacatccaacacaccagtaacctcacttaactgaagcgtcttcaatttcacccatatacatatattttgagggtaaattaccataaaatatatacttaatgcatttttaaaagaatacaattaagtcgtatatttaaataaaataataattaaaagtacaacgaactagagagtcaacacttctttaaaaaaaaaaaaaaaaactcttctccttcattcaaaattcaactcgtgcaacgtaatcctgaaacgaatccggttgcatcattaatgaataaagtccgatttgcatcagcaattcacttcccgggaagaagaaaaacagaaaagggaggaaaaaaacagaatgcatagaagggggagggaaaaccaaaaatgttgctgcaaatcctcccaaccaccacttggataatgcatcagcggcaatttctccagcgggaaagggagggggcgaggtccctgaagcagcccctcggctcggagcacgccaagtcttgcccggaggcggcttttcgtttctcctcccgaggtccttctttctttaaggctttgcagtcagtcctattttcaacggattccggtgaaaactcttcattttcctcccggcttcaccctagggcctgaccggcggcgcggccgggggtggaaggcgggctgcgggcggcactggcaccgggctccggagaagcggctacttggccgcccgagcccactccatgtcggtggtcgctcgtgggccgagccgcgccgcgccgcgccgggcagagagcccggtctccccgacacccgcaccgggccgccgcgccggaggctcccgacgccccaggcgggggggtgcttctctgaattcaaaggacacaagcagcagcagctgcggcggcggcgcgggcggctctggcagctacttctcccccttcttcacacccctgggctaagggcatctttccacagcgaggagggaggcggcccggcgcaggaggaggggtcgcttccgcggctgaggagactagaggctgcggcagcccggctcccaaccactcccttcctctcccttccagccctcccccgccttccctctcctctcgcgctcgcgccctgggctcagcgaggctcctccagtcccgccgcacagaggcggaggcttgcggacgagtctggatccaatatggcggcctggccccccggccccggcacacgcgcgcgcacacgccctccactccccgcccccgccctgcccgagcctcagccccagccggcggccaagccgggcggggtccggccggcgcgcccagcggaggcccccaagggggcgcgggctcggggcccgagtggctgcgccagcccgaggggaggggtgtggactgcctaggcggcgaggctgcggctgccgcagcgtggaatgcggagctgcgggagggctgagggaggcccgggcggcggtggcggagcatatggaggcgggatgaccgggccgcgccgggagctgcggcgggactgggcgcaggctgggaactgcgccaccgccgcgccgtggccccggctccccgaggcttctggtgcagatcgcgaaggggggctcctgctcgtcctcggagacatcacctgtctggcgcgtttgttaagggcgcccagaagcagagggctttaggcttccgacagagctggaggagacggtgcctttcagccccttacctgctccccaccggccccccagattcggttcgcgcacactccagagtaatcgtttcttaggtgtctaattacagcacttcgtgtgtcatttcccaggacaaaaacaatgacagacttgtccgagctaccatcgaagtcttgggtctgcacgcaaaggatggaatcccccatctccattcccaaaagtttccctacgggagcctggtgttgtctcctccggaactgtcctcgcggctgcctgtttttccctagccatggttactgcctgcgggggattcagcctgtgaaggcagtcaaggcagttcaccactgtcatcaaacctacacccctgtgtgcatgcgcacacacacttgtaacccagtggcacaatgcaggaattagggaagcaaaggcaaatcgctgaatagctagggcacctgatccctgtagggcccttccaggtttttgtgaatctcggttttaggagagctccctttataaaattctcatggaagatgccacatttaaattaacaccacaaaactaggtcattgcagttctgttactttctctcaaaattgccatctcctttatggtcgttctctaaaatacaattattttatattccttccccacacctgtgaggcggttgtgtttctatgttcatgtccacaattgcatcttacatcttgataatatggaagctgaggaagaattagaaatgagggcctagacgtaaaatgaaggctaacagaagtcgattcaagttgtgattcatgaaatagtgtgaatcttttatgaaatctacaacgtctacacttgcctggcttaagaacagcattattttcaatgcggtcttgacatgaatgatacttagattcaaacaaaaggtcagtcatttccagccatgacatctttatatgggtgtgtgttgtctaattctaaaagtagtagaaaagtttaatcctaacacagataataagcaatattttggtgtttattattcaagtctttttcctatgcactttaacaaaaatgatacataataaaagagttttatagcctcttgcttgcaattagcaatatattatggacattttttcagttcaacaaacattcttcaacaaca

SEQ ID NO: 376 - DNA, 4001 bp, Homo sapiens
tgcactccagcctgggtgacaggacaagaccctgtctcaaatacaaaacacacacacacacacacacacacacacacacacacacacacagaggttttttttttttttaacagccttgagatgagatcacacaaacactcaaatgtagcttctaggggaggggagaacccaggaggctgggctttctcttctcttctcaccactggaagggaggagtaaccagaaggagcggaagctaaaacacgctgtccagagaggggagctgtggtcagtgggacgtcagtgagtcagtcatagggtttgtcctgatggtggtggtggcaggtggtaagggttggggaaaaatgaagaattagaggaaacccccaacaccagcaggcaggctgtactgtgactggactctccctcaacatcccccactctgctcaaagctgagggacagaggtggatagtgctgggagggaagagaagagagggggaggagaaggagagagggaaaggggcagtggagagaacaaggccatttctgtttcttttccagggacctgaccagagctgggtggagggaaagcgtgtgtgtgggacttggcatgaaatgaccaatgatgacgagaagtgaccaggaaattccattccctaggacattagggtctctgaaacttgagggtggggtcagagtgtgaagaagacaggtcagggtgaatgtgatggtagcgcagggcagtgggggatgggaacaaagccagaaaaggaagtaagagccactggcggccactcttctttaaagcagccagaagagagtgggttgaggaaaaatgaagtcctgagctggtcagcccaggcggaagagccacccgaatccaaccccacagtgaatagggaaggggctgagaaaacaacaggagggatgaggattagacctcataaggccacgtcctgagagccaagtggtgctcagaactcgacctctctgagttccaaatggcaagagtgaaatatggaaccgggaaagccaccccccgcccccaccaagatcatactaggacttgagggtctcagagctgttgggaggtgagcagaagggatgggaaagaggtgccagggaggaaggatgtacaggctagttctctggtcctgttcgggccccaaaccggttctcccggtcccaccgcctctggccctaaggcctccaacccgcggcctgacaagccctcacatgaagcagctggagagaaagaaagaatcgagagaatggcatgggcaattctggctagaagcccggggcagcagctggtccctgtgtggagaccccgagacatggagggctgctgagggactctggagaagcggtgtggactccatatttcagccaagtgacaggcccaacaccaaccttcccttccccaggaaaggtcttctgggggcttaagaggaaagagggctaggccctaagcctcccctccccaaatatattcaatcacacagattccgtatctgtctccccccactacacaactctacctagaagttctctgctgttctcaacccttaaccggactgggacctctctgggaatctttcggaccctctccctcccacctcccccaacattccagttccttcttttccttctactcttcagcggcctcagcctgcgcaccccaggagcgtggatgactacggccaccccgggcgcgcacccctttcccaccaccccagcatctctgcagcccaggacacccgcctcccccacaccccgcatccggtgtgtctccgcctggcccggccggcgcggcaggcgggccaggggaccaactgcacggcctcacctgctcttctccaccatccagacgttcagctacagctggtgggggtgagggactctgctccgtggccgccagtgtgggcttcccgggctagctctgcggcgaggtgggggagccgagtacgagccggcagaggtggggccggctgagggcggaagcggcggcgacgcgattacgaaacccgtccggctcggagcccggcgcactgctcccctctggactgcggaggcactgcactgcgcgggacgtgggagggtgcctctgcagcccctcaaggccgccgcccctgcggggagaactggagaatgcggacacctagatgaggccctggcacccaagctggggcccccggaatctcacgttccctttactcgccaggcatttcggggcaaaacgaagcggagccccccaaacccccagacctaaccaagttcagagattcgcagaagcacgccccccaccccaaatttattgtgctctacccaaaatggaataggactaggtttatttacccattgtgagggtagagaggcgagtctggaggagcagggattgggagaaggggtggaaaaatactctgattcttaaaaatactttgtaacctaaagtccttaaattgtggaagaaaggaatactcctcctttccattgtagtctagagttaagatttcaaatccataaattagaggacctaaaattagagggcaattaactgctcattcattgggcccccagtcagcacgggggtgctggaagagatcgggaataatagcgcagaccaatgagcctagggagatgctttcatcgtctctccttccctcaagtgttctggaacctatcatttgaattagccgagtcaggcaggagggggcggggaatccttccgcccttcttaggaggggctgcattgcagggggagagtgaactgacagactcagtcactgaagagggaaaaggagtgagaagacaaagccgtcaaagccccaacagctttgtatttctccagcccggcgcagaccccggagctcccgaggcactccctccatctttggaacacgccagtaattgattgataacaggtaaaccaaactgagggagggggcagggggctgcaaagatagaagagcggctgcttatggttagattgaaagaccccacatgaggtgggggacagctgaagaggagagaagggggcgctatgaacaatgggtagttatttcttcacagcatccatgccttgttaccttatacagaccattaatctctaacaatttacttgtagttatttctcagcacctacctcatttcaagtatccttttctgtaatttattgtcctgtgtatttaatatcttcagtctacttatcttccttttcaaaccataatttgttttaccagctgtttaatttttagtcctactgtatctctctgtcctctacttccctatacttgcaatttttttctgtagtgttctatgtttctctgtaggagggagtttgggagggggttatatgggataatgttgggtgtaatcctgacctttctttggataatctctttcattccacctcgaatctttgctccaaagaaagaggcagcctagggtaggaaaggtgggggcctctgtgttggagaactgcctgattccatagtgaaatcagtatagcccacaggagctaggtatggggacagattctggaaaagaatgatttgcagctcagtggaattggtggaggaatgctagtaggaaaatccaagctctgactgaggcacacattatgagatgtcagagaggttctgctcccctctaccaccaccaccaccttgtccttcccccttccccatggtggcagcatgacacagcaaggccctgttgagtaggccttggatgcccacaaagggtctggacaaaggatatttgggcgtgtctgtgtggctccgagagtgtatctttctaatctatacatttgctaatcatgtatctctaagaacagagtgataattagatattgcctttgcctaaaatacccggataatttaaagtgaaggatagtgggaagcatttattgaacatatattgtggtacaaggcactgtcaaaaccctttaagtaaatgataccatttaagataatgaaagatgtaaagatagatgaagtagggctggagagcatttgtg

SEQ ID NO: 377 - DNA, 4001 bp, Homo sapiens
caacatacaagatgaactgaagaatggaaaagtgcaagcaggcagcataggtgagaaactgttgtaaatcaggaacaaagtgtaaggaaattaattaatgtggtggaaatgggaatggaaagaagacacaatgccatacttactaaaaagaaataaagctaggtgacgatatggggaacaaataaaaagcatcagctgaagattaaagtttcaagtttaggtaagtgggataactgacttccatcaaagcagaaagtatgtgatgtcatatttttctagggtggggttataaagaatatatggacaaaaggtcaaaataagtatcttttagacaagcacagaattcacttaagacaaagatgggaaagatgatctggctaccctttcagaaaaaaaaaaatacagtcaactagaattcctctatttaacaaatatttattattaacaaatacctactatgtcccaggtcctgtgccagagcagaaatgaaggtacacatgcgagtgtacaagagcaggcactgcttgaccctgtcttattcaccctaaggtctggtttacggtcaaagaacatttcatgctgtacactgagatatggtgctttattattgctacaaacatttcatatttttttgtctgtgagttctgcttttgaatacttaagtgatgatctccagtgtcaatttctacatttaagcttaaggcaatgtggtgagtagagataagaacacagatacaaaagagaaatttaatttgggcatcatcaaatttctgcattcttaattaccaatactgagaccatagcaacttcaaccgtaaaacaggttgtattacagtcttccaaatcgcaattcagtcctacatttagatcatacgaagctctgttttaacactgtcctatagaaacatacaattcactttataagattcaatcttattttttgagaggaattgaaaacacagaattgttgcctgaaaaatctttataactgtacatctttggatttaaacacgtacctgcaagtttaaaattctgctcgtttttttttaaagagccttcagcctgaaaccggtcacgctggggagaaaaagccattggctcatccatctgaatccccaaagacgcctccatcacaagccaattgagatgcaaaatgccagctaaggggttacatccacagggggagcaaagcagctgtgaaaattagaacactagagaaatttagatcactcgctaaaccacgcactaaaaacatgctactgccccccaaaggggcaaacattttcaaacgcacgatgtgtccaaacctccacagtagggcatactgtggccttgtctaaggaattccatgtgctttattttcacctatcagaaacaccggcagggggctgcagggagaatttcccggcttgggcacccgcgcagcagcaggcgcagtgggaaacggcgaggctgccagtccggcacagccagcgggaccgcgtgggggaggggccgagcgccgggggcggtttgaagtcaggaaaagaactgagggagaaaaccttttcgccactgacaggaagcgccaggaggctcgtccaaggccccaagcaagttgacggagaactgatacgaccctggccacgagtactgggcggaggaggagaagggtgaatgaatgggaatccgccggccagcgctggccgcgagctcagccgggaaggaccggcttccctcgggccagagaccgaaccagatgcttagtgcgcaggcgcgcgactttcccgccgcaggtcggagggatccgaaggggggcgggaaaaggaactgcacggcgagaaaaccgaagtcacgatccagaattcgttcctaatccctcacaatcccgcgccatggaacaaaccgtcggaaactcacggtttaagggagtacgacttctgtggctccccagatgcctgggtcgccgtctccaagagatccccacctaccgagtcgatcggatgcgcctgcgcaacacttcccgccgccgctctggttgcacatgcgcacactaaagccctcgaccccgcggattccgctactgggcgtttgcgcaagagggtggggtttcttcccgccgccttggccagctagaagagcggttacgggaatgaagcccgtggatgatcttaaaaaacagggtgaaccataaggctaagggcccagcatgatttccaggaaagaagctagctcagagaaggaaaaatctcaggtgctgacacatccctatatacgtggccggccgcacaacacattgggcactccatggataaaaggcactttcttgactctgcttttatttccttttcgttgagtgccctacttccccgttaaaaacaagcagaaaatgtaattgctgattgtttgtggctgtgttagtagaaattagcacagtggcaggaaggcagtgtatactatttactgagcccttggctatgaggtaggtgggtttttctaggggctggaatcatagtgagcaagataaacaccatccctgtaggaagctaaattccaatgaagcgatgacaataacggatgaataaatgaacagtattctttccggcattgattactacttgagggaaatactgaccaggaaggtggcatctagatggtcagggaagccctctcaaagagacctggatgagaaagagctggtagggagactgttgtcctggcaaagaaaggatagggcaaatgcagagagaaagaggaacttggtatgttgcaggggcagggcaggaaaggccagtgtgggggaagcatagtgagtgagccgcaagatagtcccagatagatgaaggtggagagttaggcagaagccagaccagggtccttgaaagccagggtaagaagtttagtgtttgttctgagtacaattggaagctatttgaaagttttaaagcaagggagtaatatgatctatctgttatgaagagaatggattgtagaggggcaagtgtggaagcagaggaaataggatgcactttatgtttaggagaaacataatggtagtttggaccagaacaatggcggaagaaataaaagaaagaagacaatgggatttggtgattggctatggaaaatgaagaaaagggcatcatcaacagtgaatcttaggttttgggctagcatatgtgtgggtggtagtgccacatagaagggaagtctgtgaggtaatggtttttgattgagtgaggtggaagagagtaaatcaaggattctagtgtggataccgagaaagagaaaagcagaccttgacatccaggagatggcctggtactaccagcttggtttgctgttgctttgagctggcctggcaatcacagccaagcattggtattcttctgttgaacataaacaatttcacagaacatcagacaagacagagttgtgaccgtgatagatcaagacaaaagtaagatcactctataatcatatgtgaacacagacacaacatcaacattgcccaagccataaaaatgatcaaatatctccttatcctagctaatatgagtgcctgctgcttctttaccaattatagttttaacctcagtctagtcttccttccttctacataatacttattaaaatacccaattatagaattatccttgcttccttacagcttccaatccaggccaaagtccctctttcttgcacccttccgtaaatctcctaacacaaactcaaattctataacaagtcctttttaacaccctcttcctaagacatcccatggttccccatggtgtgcattctcacgtactgaaacaagcaatacatccaagttgctcagctatagttgtgttcctggtggtcattatcgggaggtcgttaacaataatcaagtccaagatatgcaagtgatgatgtcaaagaaacagatgaatatattggtctggggtatagttcagggtgaagaaataaacttggcagttatgaatttatagatgaaacctagtcttggactatacgat

SEQ ID NO: 378 - DNA, 4001 bp, Homo sapiens
tcagatactctgctgaagtcacaacatactttagaaaccagaggagatactgccgccaaggggtttacagtggagacaaaatgcagagtcctaagcaatagaaaaagaatactacaatgactgtgttactgtgttatgtgtccagtgactagtaagggaaagatgaactaaaaaaacagctaactgctggaaaaatggaaaggaagaggaacagtatccatgaaactggatgaaagtggcattttaagattattctagcaccaacatacaagatgaactgaagaatggaaaagtgcaagcaggcagcataggtgagaaactgttgtaaatcaggaacaaagtgtaaggaaattaattaatgtggtggaaatgggaatggaaagaagacacaatgccatacttactaaaaagaaataaagctaggtgacgatatggggaacaaataaaaagcatcagctgaagattaaagtttcaagtttaggtaagtgggataactgacttccatcaaagcagaaagtatgtgatgtcatatttttctagggtggggttataaagaatatatggacaaaaggtcaaaataagtatcttttagacaagcacagaattcacttaagacaaagatgggaaagatgatctggctaccctttcagaaaaaaaaaaatacagtcaactagaattcctctatttaacaaatatttattattaacaaatacctactatgtcccaggtcctgtgccagagcagaaatgaaggtacacatgcgagtgtacaagagcaggcactgcttgaccctgtcttattcaccctaaggtctggtttacggtcaaagaacatttcatgctgtacactgagatatggtgctttattattgctacaaacatttcatatttttttgtctgtgagttctgcttttgaatacttaagtgatgatctccagtgtcaatttctacatttaagcttaaggcaatgtggtgagtagagataagaacacagatacaaaagagaaatttaatttgggcatcatcaaatttctgcattcttaattaccaatactgagaccatagcaacttcaaccgtaaaacaggttgtattacagtcttccaaatcgcaattcagtcctacatttagatcatacgaagctctgttttaacactgtcctatagaaacatacaattcactttataagattcaatcttattttttgagaggaattgaaaacacagaattgttgcctgaaaaatctttataactgtacatctttggatttaaacacgtacctgcaagtttaaaattctgctcgtttttttttaaagagccttcagcctgaaaccggtcacgctggggagaaaaagccattggctcatccatctgaatccccaaagacgcctccatcacaagccaattgagatgcaaaatgccagctaaggggttacatccacagggggagcaaagcagctgtgaaaattagaacactagagaaatttagatcactcgctaaaccacgcactaaaaacatgctactgccccccaaaggggcaaacattttcaaacgcacgatgtgtccaaacctccacagtagggcatactgtggccttgtctaaggaattccatgtgctttattttcacctatcagaaacaccggcagggggctgcagggagaatttcccggcttgggcacccgcgcagcagcaggcgcagtgggaaacggcgaggctgccagtccggcacagccagcgggaccgcgtgggggaggggccgagcgccgggggcggtttgaagtcaggaaaagaactgagggagaaaaccttttcgccactgacaggaagcgccaggaggctcgtccaaggccccaagcaagttgacggagaactgatacgaccctggccacgagtactgggcggaggaggagaagggtgaatgaatgggaatccgccggccagcgctggccgcgagctcagccgggaaggaccggcttccctcgggccagagaccgaaccagatgcttagtgcgcaggcgcgcgactttcccgccgcaggtcggagggatccgaaggggggcgggaaaaggaactgcacggcgagaaaaccgaagtcacgatccagaattcgttcctaatccctcacaatcccgcgccatggaacaaaccgtcggaaactcacggtttaagggagtacgacttctgtggctccccagatgcctgggtcgccgtctccaagagatccccacctaccgagtcgatcggatgcgcctgcgcaacacttcccgccgccgctctggttgcacatgcgcacactaaagccctcgaccccgcggattccgctactgggcgtttgcgcaagagggtggggtttcttcccgccgccttggccagctagaagagcggttacgggaatgaagcccgtggatgatcttaaaaaacagggtgaaccataaggctaagggcccagcatgatttccaggaaagaagctagctcagagaaggaaaaatctcaggtgctgacacatccctatatacgtggccggccgcacaacacattgggcactccatggataaaaggcactttcttgactctgcttttatttccttttcgttgagtgccctacttccccgttaaaaacaagcagaaaatgtaattgctgattgtttgtggctgtgttagtagaaattagcacagtggcaggaaggcagtgtatactatttactgagcccttggctatgaggtaggtgggtttttctaggggctggaatcatagtgagcaagataaacaccatccctgtaggaagctaaattccaatgaagcgatgacaataacggatgaataaatgaacagtattctttccggcattgattactacttgagggaaatactgaccaggaaggtggcatctagatggtcagggaagccctctcaaagagacctggatgagaaagagctggtagggagactgttgtcctggcaaagaaaggatagggcaaatgcagagagaaagaggaacttggtatgttgcaggggcagggcaggaaaggccagtgtgggggaagcatagtgagtgagccgcaagatagtcccagatagatgaaggtggagagttaggcagaagccagaccagggtccttgaaagccagggtaagaagtttagtgtttgttctgagtacaattggaagctatttgaaagttttaaagcaagggagtaatatgatctatctgttatgaagagaatggattgtagaggggcaagtgtggaagcagaggaaataggatgcactttatgtttaggagaaacataatggtagtttggaccagaacaatggcggaagaaataaaagaaagaagacaatgggatttggtgattggctatggaaaatgaagaaaagggcatcatcaacagtgaatcttaggttttgggctagcatatgtgtgggtggtagtgccacatagaagggaagtctgtgaggtaatggtttttgattgagtgaggtggaagagagtaaatcaaggattctagtgtggataccgagaaagagaaaagcagaccttgacatccaggagatggcctggtactaccagcttggtttgctgttgctttgagctggcctggcaatcacagccaagcattggtattcttctgttgaacataaacaatttcacagaacatcagacaagacagagttgtgaccgtgatagatcaagacaaaagtaagatcactctataatcatatgtgaacacagacacaacatcaacattgcccaagccataaaaatgatcaaatatctccttatcctagctaatatgagtgcctgctgcttctttaccaattatagttttaacctcagtctagtcttccttccttctacataatacttattaaaatacccaattatagaattatccttgcttccttacagcttccaatccaggccaaagtccctctttcttgcacccttccgtaaatctcctaacacaaactcaaattctataacaagtcctttttaacac

SEQ ID NO: 379 - DNA, 4001 bp, Homo sapiens
ttcaagaaaactttgttggatgtgaacttgccaaagacaattctatggaaccttctcctaaataaccccaactagaagtgactgctgtcttcaaaagctattgtagaaagcatttcacatcaacttatagaaagcatttcacatcaacttatctgtttaatctcctctattcagactaagttaacctcctttgaggtagaaaccagagtcttaggaatttttttaatcctcagattgaaccacttcacaccctaggtactccttagccattgtctaaaaaaaaaaaaattcactaaaaatccaaccacatgtaattctacctatgcaaattattcgaaagggtaaaataccagaaactcagaatgtcatttgatcaacattttataaagctaattaaatcataagacaaaaaaattttaaaaccaaccaataggcagggcgccgtggctcacgcctgtaatccaagcactttgggaagtggaggcgggcagattatttgaggtcaggagttcgagaccagcctgaccaacacggtgaaaccacatctctactaaactacataaattagccggccatggtggcgggggcctgcaacctcagctactcaggaggctgaggcaagagaatcacttgaacccaggaggcaaagattgcagtgagccaagatcgcgccactgcactccagcctgggcgacagagcaagactccctctcaaaaataaataaataaataccaaccaacaaactaaatttccctagtttttcatcgactcttcataaagcttccattcaaagaaacaaaatgagtagggaagttgtagctcaaggttctaattctagaagcgatgcaccaatgacagtgacatcattaaaaaggcccctaatgactgttagagccgtctctagaagttttcctgaatgacttaaactgataaaacttcacatggaccaacattcccaaacatttccctttaaaatacacttccgaaaaatcacacgcaccatctatttcttagatctgtaaagctcactcatttcaccaactcctgaagacctctctaacacagacttttatgactcttccaaattcaccaaatttctttccggtcctaacttcagggttgattcccttttctcttctacaggaatcacccccaccccaacaatgaaaggagatgaaataaaccaggagttgcaaagaccagcggagatagttacatagcagcctggaaaagagaaaaaaaaaataaagaacaaaaagaggcgtctacggcaccagacggtgtgctcctttgtgcacctatgttcaggtatcccttgcgcaccagtcccacacttcgctggtacacatacctactgataaaaattaactgtaaaagtcagaaactcccacggtacctttcctttgggcttctcaaaaattttaagtgatgaactgctctagagctccgccccttctttccttaccctaaaagtgcaacttctgctctagagagaaactttcttttccccgaacacccgttttatcccatccccaggggaaacggggggaggggttaagaaagaggtcgcctgggggcgcccaactctgccctgccacccctgggccacagccatgccggacttacccccaaacaacatagttggtcttcacattcttgggccaggagaactccccgaagatcacttcgtctcccttcaccacaatctccttcttctggatgttgtactgtcgcaggacgctaagcacgtccgccatcttcccccccctcgcctccgccggctcggggcgccgccgctgccgccgcgcctgcctccttcttctcttgtcgcctcgccctcttcctcctcctccttcgccgccgcgacgaaccaacagcagcagcactaacagccgtcctcgcctacgacagcagcaggggcagtagccacccaggccgccgaggaccccgcgctgtaaggcaaggccccgccgccggctgcccgcggagaacgcctgactgcgcccctccagcgaggcacatccgccgccagggggagccgcgaccgcctggaaaagtgcccctcccagacttcagctgggcacggagcccactcactcgctgaaacgctgagcgctggggcaccgcgcccacgtacggcgcacgtacggggaactttgccgggcgcgcgcgcgcggagcacgtacccagtaccccgcggcgcgcaccaagcggcgtcaggtgcgcgcgtacctgagcagtgggtcagcacttccatccccagcacgtgcactgagtatttaacgaactgtctcgggtgcgaccagaggctcccccgggtccctgctttggccgggatggaattcggcaaggatttgcggaacactagaattaccttcctatttagatcggacccaggcctagccaaagacctctaggacttagtgatccggagaagcccttttgaaagagtggggctcttggggttggggttggggttttttgtttgcttttgatgtggaaaagaacgagttttggttttttgttggttttgagtggaaaagaccgagtccagaaaaaaaaaaaaacagttctgggcactgctcgtcaagttacatagcttctcacagcatcaattggttaatgaagaaaatggggttaatacgaagataaggtaaacgcgcctagcaagtcaataaaatatcctaaatgttggatcctccctcttcattctttggatgatgactttttccatcgcggtcccttctccccgccaatcccgaagggctatattcaaaaggctgtgttccaagatgtaaatgggaaagttgccctaacagaaaccccaaacggtccaatttagaacacttccagactacccaattttttaaatggtactcagaagtctcagtggtgtccttgacatgcgttttgagacggttaagataagttcaatatactatggccaaccaaacacatcctatgggattgttttttttcttttaccatgtcagaaggaaaaaagaggcaactttgtgtttgacataaccaaattccttgacctgttttgaaaaaagtcaatcttttcacaacgcagaggactacagatacagaagtgtgtggttcatttccgatatgatctgtagccattctgcaactgttagtttgtgaaatttttttctgttccaccaatgttttcaccccgtagtattctcctgaatctcaccccaagcacacacattataaagaaatggctacaattacctatccccacattctctattcatacctgtgtcagagcactcagtaccatattacttccctttatagtttatttgcctgcatccacaaaactgaaacaccatagatctgtgtcctcatatcctactgtctaacattatttggtacatattagtaataaatggatgaattcaataaattgatggaagctcctagtaaatatcgagttaatacatggatagaggcttctaataaatgttgaagtaatgaatggaaagataagctcaaggaagccaagatttcatgattaggaggctcgactatagtcccttcaaacgatacttaattttatttcatactcaaataatgattaaagtctctcttttcagagaaattatgttttttaggttaatgaattttaaaaagtggtaagataagtcattagtaagttgttgcttttaacagttaaagcattgaaatttgtagatcatttttttcctgaccagcctgggcaacatacctagaccctgtgtctacagaagcaattgtagatcatttttgtttttatctaagtacccttataattgccctaccaatactggttcattggaggatgtcaaaatacaataaaaggcaagattagtggtagagctgaaaaattagaaaattaattagaaaaaaacagaaaaatagtctggtttctttgtcttgggcaaaagcagtccacatctccagatattagctcctgaagaattcctaaaaaatctttagttttatgtct

SEQ ID NO: 380 - DNA, 4001 bp, Homo sapiens
tttggagaaataagcaaatgaatggcttaataaataaaagggcaagtcaaaaggatcattcaatgtctaatatgtgagcagaccatgcatttctatccaggaaggagactacatgctggatagttaataataaggaaaacagaaaagggcaacccagcagaaaagtacagcctcctgcatttctccggacatttaataagggagtgcagaaacaggctgggatttttctctggccaggaaaactgatgtgtctttttttttgagacggagtttcactcttgttgcccaggctggagtgcaatggcgtgctctcagctcaccgcaacctctgcctcccaggttcaagcgattgtcctgcctcagcctccagagtagctgggattagaggtatgcgccaccacgcccggctaacttttttgtatttttagtagagacagggtttctccatgttggtcaggctggtctcgaactcctgacctcaggtcatctgcccgcctcagcctcccaaagtgctgggattacaggcgtgagccaccacgcccagcctgatgcgcccatttttaggttagcaatttccataagctgcagaaggagctgcttcgggttattcttctatctgagctctggttaactaaccatgtcatttattcattcatttttaaatgggtaaaatatacatatatttttaaaaatactattttctggccgggcgcagtggctgactcctgtaatcccagcactttgggaggcctatgtaggtggatcacttgaggtcaggagttcgagaccagcctggccaacatggtgaaaccccgtctctactgaaaatacaaaaatcagcggggcatggtggcaggcgaccgtaatcccagccactccagaggctgaggcaggagaatcacttgaacccagaaggtggaggttgcagtgagcagggatcgcaccactgcactgcactgcactccagcctgggtgacagagtgagactctgtttaaaaaaaattaaataaatttcctgatgtgtgaaaattatgtgaaattcacatttcagtgtatccataactaaaattttattggaatacagcccatccatgcccattcactacagctgttttggacctgtaaacagcagagctgagttgtccgacagagaccgccccgcccgccgccccccaaccacccccccatttttcatagagaaaaatgaagtagggaagtgagacagagagtgaaagggtctgcaattttccataagtggtcatgtcagatctcattaaaaggtgacatctgagcgagccctttctgaagggtgtcacctaaccccaaggggctcctggcctccgcccagggaagctctccagctcttaccgaagtagtcaagccagttcatctcgcgcagagccttggggagccgcaggatctcgatgttgtagaggttatccacctccttgaggaggttctgcctgtctgactcaatttgcttgattcgtatttccactgcgggagggcagagccgacaggacacgggtcacgggcgggcgaatctgtgcagctcgtgtccccacccgccagcatcccgcgaccgccccaggaggccgcgacggcctggccccttaccttcacggtcgaagtctttcagaaaggaggcgagcttccgcctccgtaaggagttggtcttggccacccgactactgcccttcctaggagccatggcgctcggcggaggctgcggggagcggcggagatggggcagggaagcaagaaactgggtagggacgaggagggcggacggggaccacccgaagaagtcgccaggcacgtacctgcggtcccgagacaagggctgagcaaaacctcgctgtgccagtgagagagagcggctctacagtcaaccgccacccaattcaaactccacagtcacaggctgacgaatgagaagccgccgtcccacaacatccaatcacaagcaagttcctgccggcccagggtcttccgcccaatgcgccccctatagcctgagtgcgacagcgaggccgccgccgtcgcgggtactcctgggagttgtggtccaggcttgtttccccgccctccccaccaacccacccggctccgccctggccggctgcgaactatacaaactactactcccggcaggccttgtggcggctctgcaataccccaagctctggagggctgggggcctactaggtcaggtcggctgtaggattctgctccagggttggcggctgcttctttctggcctggctgccactgagtagccgaggggccgccgtgaccctctgactgattgactggctggctgcctacgtcggcgctcctcagggccccaagctcctcaggccgaacttcgggcaagtggcgggtcggcagagacagagcagccccggcagggtttgacagagcaagggggacggaatgatagaggagcagggcaggggtgcaggctttggggggggcgcgctatcccgcggccagtctgggcagcgagtggggggaaccctgtcgttcctcgctcccccgcgggccggccactcccgcccagttcgcgtgttggcgcctcgactgggtgcgcagcgcggggctgcgacttcaggtgcaagtagtggcgcttggcagctggccacacggtgactgcagcatgagccgcggccaccaggctccagggagcccagggcaggaggcagctctgggtgtcgtggccgtgggcctgggaatgggcgtgtagacggcgagccccgccgagccgcggtcctgtcggaggtgctaactgtgcatcttggtatctgcccacggccacagggttggattgctcaagagttgtgctgagacccagaaggctagaggctagtttcgaagctgtagctcaggctgagtctcaaggcgggcggcgactggacggccagaccggcgagctcttgacgggtttgtggcctgattgtttggatttggtgcttttcacctgtggatgcggtctgaagccatgtcagaggggttgtgtttaagcgtgcatgttataggctatgggagtgataatcttgcctctccccctctgagttgaggaacaatcgaagaaataagcaaaggtgccaagcaggctcctgatgggcaccagcgagcttggggacagagcagtccaagcatagaagtcctggcaagcctggaccttcctggaaagtcctttctctctcttccaccctggtctgttgctccatatgcaacaaatatttgaatgtcgctcttccgcccgaggtcagccctgggcagtgggtagtgggggtgacaccccagtctgctgggtgcctgaggatctccatcagtcagatggccaagatgagacgggatgacaacccgtacctcatgtaggctttccccctgcaggtgtttttatgctgcgcaagtcgggcttccagcctctcggtttcagggtttccttcaccctactccccagtgagcccgaactccctgggcacctaggacgtccacctgcattttagccagagctgccacgtcaggagcccgtgatttactagtttttgccagttggttgtgatacacaatgtcaaaagtgtcattaaggcacaaccggaggcgcaagataagaggaaaagactccacagctaacaggacatgccaccaccgccacccaatttaaactgccgcaggctgacaaatgagaagtcgccgtgtttggacggtcccaacatccaatcccaaggaagcttcaagccgagtggccagtccacatgttggactacagtacccagaagtcattgcggcactacgatatattttcgcgactcagtagccaggcaggcccgcggagtagctttgtggggaggtcgcgtgtgagcatgcgcagagagactgtgggcgcgtggtgcagtccctggagggttctcacgctttggctgtctggacttttaagtttttccgctttttcaggaaggcgaccggcagcctcgggcaggggagacaggact

SEQ ID NO: 381 - DNA, 4001 bp, Homo sapiens
aaaggggctctggggtccggggagaggaaagccgatcttgctggggccagcagtatcaaggaggggcaagatttccagagggggtgatatttgagtttgtctaggaagaatgagaaggtttcttcagttggggaagattttcagggagggaatggcatagacaaaggcccagacgcacgtgcacttagcctctgtgagccgtgacatggggatagtggtgcctcccttgctgggtgactgtgagcactgatgagctaaaggctgtgtgagggctgcacagatgcacattatcagctctctgcctagctcttggggtgggacagggcaggaatggcatctaattcatgcctttatggcaaaaggacaaatagatattctgtccaatgcctgttattgtccttctcccagccctacccacagggcagggaaaggcgccagagcatcagagtggaattcctacagcccaggtggctccagtcatcagcataagcagaggccttgtccactaggacccagccaggcacactgatgtccagggttaccccaaggccccttaagccccagtggccagaaaataggaaaagctacctcctcccaccacccaggcatgggttgagatgcttgggtgcccatcccatctctgccagtgactgggtgactggcaaggtacaattcctccctgagccccacttgagccttgccgaagggtgaaatgatatcaccccggcttcacagacaggtaaacaatgcttggaaggccagagcagcacaaaaccactggggaccacagtgcaggcagagggttccaggagccccagtgaaggcgcatgtgaggttgatggaggatgtggaaggccgacggagggagtggtatttgatctgagcttgaagggtgagccagatgttctcaggtggaaaaagggaaaaaagactttccagacagaggggacagcagggcttaagatccctgagggtgaagcagaaggggttgtgattcccctgccagagcatgggatgcccaagggatgcaggaaactgaggctcaatacgatatggaagttggagcccacactcagagggcactgaataccataagaaggaactttgatttcacttgcttggcagtgggatgggcagcagggtctcgggaggagaataaagactcttcagcaataggctgggtgcggtggctcatgcctgtaatcccagcactttgggaggccgaggcaggtggatcatctgaggttaggagttcgagaccagcatgaccaacatggtgaaaccccatctctactaaaaatacaaaaattagctggtcgtggtggcacatgcctgtaatccctgctactcgagaggctgagacaggagaattgtttgaacctgggaggtggaggttgcagtgagctgaaatagggccactgcactccagcctgggcgacagggcaagactgtctcaaaaaaaaaaaaagactctttagcaataaacctttaatagtttttggagccattcctttcaaccttggtgaccatgtagccttggacaggttacttaatatctctagtcctcagtttcttcatctggaaaatgggggactaacatccaccttgaagtttgttgtgcagattaaatgcaacctacatgtgaaacatgcaacacacggcaggcactcaatattgtctccccccatctcaggaacaaacacattctcaactcagccacgtcccctaaaaggacctcctgctttctggcttcccatgtagaaacttcttgagcccctggctgttgcctgcccacctccttcccctctcagttcatgtctgtcccaagagtgcctaccttccatggcttgggcctggagccctgggcccagcagtgccactgccagcagcaggcaagccccccactctgccagcatctcctcaccaggggcccccacaggtctgccgagctcaggtaggccaggatctcagggtccggagcaagggaaagagaggtgaggctgaaagggcctccaagttaatggtggcatgaataattcaccggcccctagaattagtaagccgatccctgggtacttcctttactcactgtaaagtgacggatctggtgtcaccaggtttacacgttctgagatctgcaccgaccacactatcaggaagggaaggaactcaggcctggaaggaaagtgagtggaggagaaagggcataacttttagggccgggtagatctgggatcaatcccagttcagcctgtaacttgccaggtcaccttggacaagtcatttaactcccctggtctgggtcttctcatccatccagtggggctgttcagctccgacccaggggctgttgtgcaaatgaaaggagatctcacttgctaaagcacagagtaggtgctcgctacaggttcttcccatccccactccgagggagctgaaaggagcctgtatttagtgggacacgcaggacaacttccttcagacatgcggatttagctcagaggagggaaggaggttgctgcagacagttgagggaaaagtctttttcacgcaagaatgcagcaggaataacagaattggaaaatcgtattgtgcaactcttaatgcaataataggtctgggagccagtgtaacttccggccgagaatatggaatgcccgctcctttattgatcccaagccttgcttgaacatcgtatgtgccaggccccgcacaaggagctggcgctgcagaaatgccccggggactttgtgtccaacaggaagcgggctctttcttctcatctagagtcttttgatttggttcagttcagcccaacatgcatttctaagctccttctctgtgcagagcctgtgccaggcatggggacagcaggggaacatggcgcattcctgctctcccagtgaggatcctgggctgtttctggcagactaaggtctgaatcctggctccacccctgcctggctgtggtagcccgggaaagtaacccaactctgtaactctgaggccaggttcctggattgcgaaactggagcaagaattagcagcctgcagtttgctgagaggattaaacgtgatagtgtatgagaagtcttagccagtgcctggctcagtgcatagacgcactcaagatttctatttatcctagaggaacccagacagcctcttctgccagacagcatgtgcctctggcccatccttttgtcagaagtccccggggagccctttgctgcaggcataggaagactcgtggaaggtgttcagcggagcctcaggacccgtcaggcctgagggattggcttacctgtggaggttgactggcaggaaagaagtgttcagctgttccaggcagtctgagaaagtgggagtttctttattttattttattttattttattttattttattttattttattttattttattttatttatttttgagacagagtcttgctctgttgcccaggctggagtacaatggcgtgatctcagctcactgcaacctctgcctcctgggttcaagcgattctcctgcctcagcctcccaagtagctgggattataggcacctgccaccacacccagcaaatttttgtatttttagtagagacgaagtttcaccatgttgcccaggctggtcttgaactcctgaccttgtgatctgctcacctaggcctcccaaagtgctgggattacagacaagaaccaccgtgcctggccagatgggagtttcttaaacacctattgtgtgtatgagagaggaaggcagggaaaagtgccaacccagtacctgctgggtgcagggtctggtgctgggagcctcacatgtgggtgcagcctcccagctttcacagcattcggtatactcccaaaggacaggggaggaaactgaagctcaaagggctggagccactgttttgggttgagttccttcacacgaagaccccgggacaagtagtggatttgggaggtgatcccaggaagcacaggtaaggaagtgg

SEQ ID NO: 382 - DNA, 4001 bp, Homo sapiens
agaaagacgtaaaatatttatattaatttcaaggcaagttcccactatattaaaaatacttagagatagtattatgaatatactaataatgaaccgagaaaaattagtccagttttgctaatgacttaacattcaacgtattttattctccatgtatgctcaatctagacacagctttagtgtgttaaatctgcctttaatgtcaactgaatattagaatacattttgggctcacctgcgacatttggaagtacaaaagaacttcaccgaagaagcgttgttctaatggaaaaatgagggcaaagaaattaaatctcctttaagaaaaccacttacttaaaaaaatatggcttacattttttaagcgttttatctctgctttctcctcttgttccttccttcgtttcttttcctgaagaatttcatctaaagttttcactttccaagagtccttttcatcacccatttgagttaaaacactgcaaaaagaaaaataattcagcctacatcaggacacagcaagctatggtgctgaacacttgaacctagtcacttttgagggattcagaataaatcctcattaagaataagaagttgtgcccggcgcagtggctcaagacggtaaccctagcactttgggaggccgaggcgagcagatcgctggagttccggagttcaacaccagcccgggcaacatggcaaaacctcgtctctacaaaaaatacaaaagttagcccagtgtggtggcgcgtgcctgtattcctagctacaggaaggaggctgctagaggcaggaggatcacttgaatcagagaggtcaaggctgcaatgagccaagactgcgccactgcactccagcctagataacaaagtaagacttggttaaaaaaaaaaaaaaaaaaaggtaagctctaggctgaggcgggtggatcacaaggtcgggaggtcaagaccagcctggccaacacggcgaaaaccctgtctccactaaaaatacaaaacttagctgggcgtggtggcgggtgcctgtaatcccagctactcgggaggccgaggcagcagaatcgcttgaatccgaaaggcggaggttccggtgagccgaggtcgcgtcactgcactccagcaagaccccgtctcaaaaaaaaaaaaaaaaaaaaaaaaaaaaaaaaaaacaagaatgataagttgtaagccaggcaaggtggcgagcgcctgtagtcccatatactctgcaagctgagatgggagaccgattgagcccaggagttccaggctgaagtgcgcttgtgaacagccactgcgctgcagcatgggcgacaaaaaagagtgatgggttctgaaaaatgaccgcttgaaatcaagtctcgtttctgtcattcttgtatggtcttgggtaacgtaattcacctcagttcagtcttccgtacaaccagaataacaacacctacgtgatagtatcgatcgcggattaaagatcatccgtttaaaggctcttaactcaggacctgccactcatcaaacactgcttttactgtcagaatctgctagaaagaccgcttggactacgtgaagccactagcacactggacagctgcaccttgagaccggggagatgctccgagatgtgctcgcgaacaaggccacctgacccgggcactgggctatttcctcgggttcagtcccgcacacttgaggttcagcctggcagacgttggctccagacagcgtttggacccgccgcctccaccacccaaagttccgtgcgggatgagactgtccgcggaagcgagggtgtcgctcgcccccgggcccgggtccgccccgctccgaggcctgctcggaagaaagacctcggtgcgcagttctcgtcgcgctcccacacctggtccgcccagtcggaactcacccctacggggccgcggccggtccctgagcctgagaagaaacagcaaccggcgctcgccagaagtatcctcacttcctgtgttgacgcctaatgatgatataatagccgacctctggcccagaactcaagacgacaggggctcgctctgtgcggcacttcctgtgtctgcgcgggatgatgacgcataaaacagcgcttgctcaggtccaggactccaaaagaaactgcgccgtgagctgcacttccgacttcggcgcgggccggggcgccgagcagagcgacgccgacttttggagcagtttgcgcctgcgcggaacgcgtggccggcttccggaatcctaccgggacttttccggtagcgaagcccgcgcctgtgccaaggcttgcgagcagaatgccttcgcgatggacgcccgcattccacccccttgaccgctgggacccctagtggcgggtgggtggagcgcgctccatttacctgctggttacctcgtgaggcgcctcaggtctgtgtgtcttgtaaaggccgatctcggaatttaactctgaaccttactcagaaacaaagcagggagagctcttacgatgtgattttattttatttattcatgtatttacttttgagtcggagccttgctctgccgcccaggttggagtgcagtggcgtggtcttggctcactgcagcctcctcccgggttcaaggaattttcctgcctcagcctcccgagtagctggaaccacaggcccgcgccaccacgcccggctaatttttatatttttggtagagacgaggtttcgccatattggccaggctggtctcgaactcctgacctcaagtgatccgcctgcttcgtcctcctaaagtgctgggattacaggcgtgagccaccgcgccgggccttttacaatgtgattttgaagctgacactggcagtgggtcctcaaagtgcagactcactgggtatggtgcttcccccaactcccagggccccactccaaacccatggattcagagcattgcaggagaagaggataaaacgagcaattaattccctttccatatgtcaggttttcctcttgccttgaaaagtcacagaaaaatgctttagacatctgaatctcaggaaacaaacaatggaagataaacatccgcatttactgggcctgaaatgggaaaatgaaagatgtggcaagaaactgacaagggcccaagaagggcgatgggtatcggaattcttttcatcccggaatgaaatgctgcttgctttgtgtacccaagctctttttttatttttatttttttgagacggagtctcgctctgttgcccaggctggagtgcagtggcgcgatctcgggtcactggaagctccgccacccggattcacgccattctcccgcctccactccattcgcccgcattaggctcctgagtacctgtgactacaggcgcctgccaccatgcccggctaattttttttttattttcggtagagacggggttttaccgtgttagccaggatggtctcaatctcctgacctcgtgatcagcctgcctctgcctcccaaagtgctgggattacaggcgtgagccaccgcgcctggcctcccccaagctcttaatgttgcttcctgagttcttggtaactggggaaatctccctatttttttatttttatttttttttgagacggagtcttgctctgtcgcccaggctggagtgcagtggcgcaatctcggctcactgcaagccccacctcccgggttcaacgccattatcctgcgagcctcagcctgccgagtagctgggactacaggcacccgccaccgcgcctggctaattttttgtattttttttagtagagacggggtttcactgtgttcgccaggatggtctcgatctccttaccttgtgattcgcccgccttggcctcccagagtgctgggattacaggcgtgagccactgcgcctagctatttttattttttctgatagggagactcgctctggcccaggctggagggcagtggcgggatctccgctcattgcaagctccgcctcctgggttcacgccattctcccgcctccactccatt

SEQ ID NO: 383 - DNA, 4001 bp, Homo sapiens
aaaaattagtccagttttgctaatgacttaacattcaacgtattttattctccatgtatgctcaatctagacacagctttagtgtgttaaatctgcctttaatgtcaactgaatatttgaatgtttttgttaatttttagaatagattttgggctcacctgcgacatttggaagtacaaaagaacttcaccgaagaagcgttgttctaatggaaaaatgagggcaaagaaattaaatctcctttaagaaaaccacttacttaaaaaatatggcttacattttttaagcgttttatctctgctttctcctcttgttccttccttcgtttcttttcctgaagaatttcatctaaagttttcactttccaagagtccttttcatcacccatttgagttaaaacactgcaaaaagaaaaataattcagcctacatcaggacacagcaagctatggtgctgaacacttgaacctagtcacttttgagggattcagaataaatcctcattaagaataagaagttgtgcccggcgcagtggctcaagacggtaaccctagcactttgggaggccgaggcgagcagatcgctggagttccggagttcaacaccagcccgggcaacatggcaaaacctcgtctctacaaaaaatacaaaagttagcccagtgtggtggcgcgtgcctgtattcctagctacaggaaggaggctgctagaggcaggaggatcacttgaatcagagaggtcaaggctgcaatgagccaagactgcgccactgcactccagcctagataacaaagtaagacttggttaaaaaaaaaaaaaaaaaaaaaaaagtaagctctaggctgaggcgggtggatcacaaggtcaggaggtcaagaccagcctggccaacacggcgaaaaccctgtctccactaaaaatacaaaacttagctgggcgtggtggcgggtgcctgtaatcccagctactcgggaggccgaggcagcagaatcgcttgaatccgaaaggcggaggttccggtgagccgaggtcgcgtcactgcactccagcaagaccccgtctcaaaaaaaaaagaaaaaaaaacaagaatgataagttgtaagccaggcaaggtggcgagcgcctgtagtcccatatactctgcaagctgagatgggagaccgattgagcccaggagttccaggctgaagtgcgcttgtgaacagccactgcgctgcagcatgggcgacaaaaaagagtgatgggttctgaaaaatgaccgcttgaaatcaagtctcgtttctgtcattcttgtatggtcttgggtaacgtaattcacctcagtttagtcttccgtacaaccagaataacaacacctacgtgatagtatcgatcgcggattaaagatcatccgtttaaaggctcttaactcaggacctgccactcatcaaacactgcttttactgtcagaatctgctagaaagaccgcttggactacgtgaagccactagcacactggacagctgcaccttgagaccggggagatgctccgagatgtgctcgcgaacaaggccacctgacccgggcactgggctatttcctcgggttcagtcccgcacacttgaggttcagcctggcagacgttggctccagacagcgtttggacccgccgcctccaccacccaaagttccgtgcgggatgagactgtccgcggaagcgagggtgtcgctcgcccccgggcccgggtccgccccgctccgaggcctgctcggaagaaagacctcggtgcgcagttctcctcgcgctcccacacctggtccgcccagtcggaactcacccctacgccgccgccgctgccgccgccgccgccgccggtcccggagccagagaagaaacagcaaccggcgcgcgccaaaagtatcgtcacttcctgtattggcgcgtaatgatgatataatagccgacctccggcccagaactcgagacaacgacaggggctcgctctgtgcggcacttcctgtgtctgcgcgggatgataacgcataaaacagcgcttgctcaggtccaggacgccagaagaaacagcccggtgagcgcacttccgacttcggcgcgggctgtgacgcaggaatcgggactccggaggagcgacgcccacttttggagcagtttgcgcctgcgcggaacgcgtggccggcttccggaatcctaccgggacttttccggtagcgaagcccgcgcctgtgccaaggcttgcgagcagaatgccttcgcgatggacgcccgcattccacccccttgaccgctgggacccctagtggcgggtgggtggagcgcgctccatttacctgctggttacctcgtgaggcgcctcaggtctgtgtgtcttgtaaaggccgatctcggaatttaactctgaaccttactcagaaacagggcagggagagctcttacgatgtgattttattttatttattcatgtatttacttttgagtcggagccttgctctgccgcccaggttggagtgcagtggcgtggtcttggctcactgcagcctcctcccgggttcaaggaattttcctgcctcagcctcccgagtagctggaaccacaggcccgcgccaccacgcccggctaatttttatatttttggtagagacgaggtttcgccatattggccaggctggtctcgaactcctgacctcaagtgatccgcccgcttcgtcctcctaaagtgctgggattacaggcgtgagccaccgcgcccggccttttacaatgtgattttgaagctgacactggcagtgggtcctcaaagtgcagactcactgggtatggtgcttcccccaactcccagggccccactccaaacccatggattcagagcattgcaggagaagaggataaaacgagcaattaattccctttccatatgtcaggttttcctcttgacttgaaaagtcacagaaaaatgctttagacatctgaatctcaggaaacaaacaatggaagataaacatccgcatttactgggcctgaaatgggaaaatgaaagatgtggcaagaaactgacaagggcccaagaagggcgatgggtatcggaatttttttcatcccggaatgaaatgctgcttgctttgtgtacccaagctctttttttatttttatttttttgagacggagtctcgctctgttgcccaggctggagtgcagtggcgcgatctcgggtcactggaagctccgccacccgggttcacgccattctcccgcctccactccattcgcccgcattaggctcctgagtacctgtgactacaggcgcctgccaccatgcccggctaattttttttttattttgggtagagacggggttttaccgtgttagccaggatggtctcaatctcctgacctcgtgatcagcctgcctctgcctcccaaagtgctgggattacaggcgtgagccaccgcgcctggcctcccccaagctcttaatgttgcttcctgagttcttggtaactggggaaatctccctatttttttatttttatttttttttgagacggagtcttgctctgtcgcccaggctggagtgcagtggcgcaatctcggctcactgcaagccccacctcccgggttcaacgccattatcctgcgagcctcagcctcccgagtagctgggactacaggcgtccaccactacgcccggctaatttttttgtgtttttagttgagatggggtttcactgtattagccaggatggtcttgatctcatgaccttgtgatctgcctgccttggcctcccaaagggttgggattacaggcgtgagccacagcacgtttttttctgttttgagaaaaagtctcgctgtgtcacccaggctggagtgcagtggcacaattttgggtaactgcagcctccgcctcctgggtacaagtgattctcctgcctcagcctcccgagtagctgggattataggcgtgcgccaccacacctggctaacttttgtatttttagtagcga

SEQ ID NO: 384 - DNA, 4001 bp, Homo sapiens
agttgtgacgcactgcttggcgcacagtagatattcaacaaatggtggccactaaggcttgtctactctgcctctggcacccccgataagtttgggaagaacttcttctggcacgcgtggagagcttcttccattctcctggcagggtatggggagagtcctggggacccagtggggagagtcctgggaacccaatggtcaggtacaccccagattaagggtgggggaggggtcagccccacagcctcctcagctgcacaagaggtggctgggaaagggtaacccgagatagcagctttgctgtggcaaggtgaccctctctctggaacgccttcaggatgcaaacccggacctggagccagtgtcgccctgtactccaccgaccctcagcaccctcagcaccgttttcccaggcccctcccaaggccaggctaaaggcaggggatctctgaggacgtgccagtccaccaggcgctccaggcatcctctcaggcccgtgtccaggaatgtgctgcatgcccatgcccgggtggggaatgccacgcgaacatgccgaagctcactgggtgctgacacaggaggggcaagccggtggtgttagtgagtcacagggcccaggctacagctggggaactgccgagggctgggctaggggtggggaagaaggggagacagtagcagatagcgcggaagaggttccagggcctctcactcccacagtgtcaatcctcccaccccgactgccgggaggtgcccagagagaatgaagagaggcagggctggtgcctaggagggtgctgaccctgcagcacagaaaacccctcactgtttctgcagcccaactcccacccagcacaaggtctgcagacaccttcagggaatccccgccccccacagggcgaaaacagaggcctccagtccagacccgattttggatttcagattcctgatggtgtccctcaactacagcagaatcctcaaggcacatctccttagcccaacaggtcaccgcccactccccccggccccacccagcctcctttccctctgctgcattaaccctctgtcgcctgttgatgaggggtggaggggggcactgcccctttggtcttccggggtggaaagagagaagcagcagcattccccagacccctgcctcccccagaactgggacctgcagggcttcacgtgtccttccacgttcttcccagggctccggcctcccaccccctgcctgccgctctggaaagttcaccagagcccaggaagcccttcaaggcagcgatgtggccccacactctcgggtcctttggtccctggagactcctgacccttgcccttcccagaatgaagggagcttagaaagcgcctggttccggactgggtggaaaactttgctttgtagggttcagacgggagcccaggggccaaagtgatcccagatggagactccctaagggggcgcggggtctgagattgcaaaataaccctccctctcaagcacctggaacttacgagtggcctttcgagggcaccccccacccctcaacacacaacacagtatcacacagatcacgcctcgtgatctctgctctcccctcgccgctccggtatttccctccaacctctcgcctcagggcaaaagcaaaactgcgcctttaagagccgttccgcttacctttgctccttatacccggcgccgcggtgcccgctcctccgacctcccccttcctcccaggcgcaccgcccgcgggactcacagcgcgtgtcctgggggccgcggtgcgcccgctccctcccgggcacggggcagcttcccctgctccggaaaggtgagcagttccccagagaagctgcaacctgagctggccgaggaggaggtagaaggggaggggaagggagggagtggaggaaggtggggaagaggagggaggaggaggaggaggaggaggaggaaggaaaatgcccggcccccgccagagtttttcacatgtacaagttgactccgcccccggccctcccgccctgcccacagccgctaccaatccccagggctccctctgcccgggtgcccacccctttctcccactctgggaaccagggtccaagtgcctcttcctgtttcgtttctaaaaccggccctgagagccttggctaggggatgaggccttctggactggatcaccccaggacaccaaggcgccaggggtacactgagagtgcctgcctgtctctaaaagcggtgctcctacctctcctaggtacctccctgtacctggcgccctaggaacgaatgtgcatggacagattttggtggtcattttcttgacaatagtagccctcgggctccccttctaccctatccagtgggacttgtcacttacctttccggacaaagttcccacctctccaggacctgaatgaagcccttgttaccagccatcattcacatttccctccccgaaggataattcaacttgtccttttggaattaaactccacaggatatttgagaatcatccaagaagggttacagaatggctagttcagctagtggcactctcattttacagaaggggaaactgaggcccagcaaagcaattgaactggcctaaagtgccacaagagttcatggcgagccatgattagaactcaggccaatggccattgcacccacatcatctgacttcaaggatcaaaaaaaaaaacaaaacaaaaatctggggatgggggtgaagggcacagtgccccaccgccaggcccctctcatctctgcttcctcctgagggctgtgaggagaggaggtgtgccttggctctatggcacctcatcaaggcagtctgtgtcccctgccctaccagagggcttggctgctgcagtctggggtctcccacagggaaagtctccttaggagggggtgctccacagtgtacatgtgcttctacctgaaccctttccctggggactgtgagttgttgagaatagaacagtttccttctggaagacatgggcctgaggtcccactgtcagctggagacaggagaatgaaggaagacactgggcccatgcatgaaagtgacctgtgggtagttgacatctcacagagggcctcccaactcttttttttttttttacctcgctttctctgccaaggcatgcagatttcctgggcacagcacttcctaaaaatgaaactgccaagtgttgtcggggtgcatggatccagagcctttaggtgtgcagcaacctcctggctctgtagtccagtggatggtgagaagcctggggagcaggaggccataaagaggtttggaaggggcagggagggaaagggagaaggactatggccaaggaactgtttactggcggattagagagagtggggccaaagggtagaatttcaaggaactaggggggtgaagtcaagaggtctccacaaacactttctcaacatctcttatgtgccaaatgatagccagggctctgggcacataagatgagtataacccagtccctgccttcaagaagctcttggtgtaatgcggcagggaagcaaacagttaggatgctataggaggaggcttagtgttacggatgcctgggaggagctattctgcttgaggtgagggttacaggatgaggggacaagagagaggaggaaggattttccctgttttttccaggaggggtaatcccttgtgcagagtgcaggggtgacagaatatggacccacagttccatgaggtcagaacttaaagtctggggtggaggtgacactgtagaggcaggcaggtgctgggtcctgaagacccccaacgtggaggctgatcctagtggaaaatgagaatgagcttagaccacacagcggcagcagggaggagaggagggaactgatttgagagataggtaggagacagggtcatggagccttgtgactattggattctagaagataagggagccaacagtgtcaagattagaagcactgatgtgataggctg

SEQ ID NO: 385 - DNA, 4001 bp, Homo sapiens
tattggatttgaggagtttgttcaaagtacgtcattttgagaagttgcatccacttaaagatataaaatatggcaaccaactaggtttaaaaacagtgaaattttatgtccctgaaagcttaaaagctgtaaatctagaaacccgggtcacgtaggcaacattattgacttgttttccccacctctcttaataccaacctgcagcgcagtccttccaaatccattttgtgcattgacgtttacattattttgcaacaaactagtaagttgctctaggtcccccctggcagctgcggacgccaactcgttcccccaaggctcggccattctttagggtcctgacgatcaggaaaagatgaattagtcgtttttctttttcccctttcctttgctcctaaccaggctgcatgatggcatcggagactgacagaaggactgggatggttaatctggagtagagcttggtagtaaatactagtaagatctgcctgccaaaagcccgcccctcgattcacacgtgattattcagcaaaactgagccattggagaggggctcctcgcctcgcttttttagcttaacccctatgaagaattctgacgactccacagagagacacacagacacacatacattcctggttaatgactccggacgtcagatgtaggcagagctgtcacgtacctacgctacagatctctgtgaggagtgtgtgtggagactcaagggactatagatcggggcagaaaataccgcggaaggaaagacattcagggggaagaaaaggcattcacccacccttgttcacggtggtgacttgagccgtgtgaggcagaactgcaggggcaggtcctccagggggctcggtttccatccgtctcgccgaagggatagtcctgggtcctccgctgctgggagagcgccgcggtggctggatgctgacgtgctccggagggttaaaagatgatcgccaaaggcgaacgggagtagcagttcggtggccctcaagttacaggtcgtaacgattgcccagtgctctgggcttctccagaagagcctttggtcgcgtccgggccaagccgtgggctaatgccgctcaggaaagctccggagcccgcccgccaggcagccgcagccccgccgagcctcagaggccgtgggagccgggctcggcgcgcgtctccggaggctgccgggcgtgcggcgggcccccgagaagcccgtcatgccggccccgccaggtcccgggactcccggcagcccgaggaaggagagtgatgcggaaagcgtctacggagcccggactgctggggcagctcgcggcagcattgcggctgcactgggcagcccccccgggaacttcccgcctacgaccgagctcgttcaggctttctgctgtaggcactcattgagctgctgccgccgctgtcctttccttcctttcccggttttgtgggggcctctggagatggggagagtcctgggaaacgtaggccaagttctgagtagggagagtcgccgcagttccggggcagccagtccggtcgccgtctcggcgagcgctcagcagcctcggcgcccggtgccactttgccacctctcgcggtccccggcctgtgcccctttgctgcggacagggcagccgccagccagctgtgccctggagcagagcctggcagcactgcttcctccttggccgcaccgctcccagtgacagtttcttttgtagctgatccccccctagatcgccggtccctgctcctttcacccctacaggcacttgcgtgtcgcccccttttttgcttttttccttcactccctcccttgctgcttttttcgctgaaacaattgctgcttctgttgcctctcagagagggtgccggtttcttctcccttttttccgacctcatcagctttttttgaaaagaaaaaaattgagcgctttttgagttgaaaaacccgcccccattttaacggcagagttttaaggaggctcggcagagttgcagcgccgcgggagcgggaaggccgggcgccgcccacgccccgccctccgccctgctggcgctcgcgctcgcagtctcgcacgctccgcccgcccggtcccgcgccctcattcccgcctcccgctctccacctcctcccgtcaagtctctcgcgccggctccctcctgccggctaggcggcctgtccccagctggagcggggttcggccccgcgaagtccggcctgcccttctgctggcgggcttgagtctgtgacgcgaacccccagctgccccaattcctacgggggcgaggacaggggtttgttatttaagacggttgtggagggccgcagggtctttgaggctccgcagcgtacgctgcgggaaggcggacagcgagctggcataaagggagtcgttcctcagcgctagcggggcaggtcggcccgcctctgtgctcccccgccaggctcgcaaagttcgggcggccaggctgcggctgctgctgcctcctctaggcgcgcgcgctctgtaaactcggcgtccttcgctgagccctggcctcggcctcgcacctgccagatccatgcccgacggcgcggtgggcaggggtggccgcgggggtggagggaaaaatccggactgccactaagcacagtgctcacaaaaagcaagtcttgtgtagactgaattttatgaaaacttaagacatggcatatgtaagaacgaactctgaagccttaattaatcaaggactggaaactgcgaaatagtcctattattagagaaaaaggagaaaagcaattaaatttaaagcaaaatttaaaataagtcgtgtgaagtgttttctaacaaagccatttcttggttgccgaagttctctcactacttagaagtggcttggattttggggatgtggggttggggagggtgtctagaatggtctctctcctaatcctttatttaatcatccgacaccaatttccagtacttttaacttcctcttttagctatgtgagattaattaactattgctttctgtatttttatactcttaaaaatatccaacacggttgcatgatgcacccagtggtcaaaatgaaaccaagcaaaaaatgacaagtctaattagaaccggcctttggcaagcggatcctcaagcagtatctgtacccttcttgaagtacactgggagtattagcaacaaaacacaccagaaatatctgggtaatcatccagcaagagattggtaggtagagggaaagttgaaactgggaagaatctggcagtgttttctttaatgtaattgttgagaaaaaaactagagttcttttcttaggtaactaaacttgaattgtgaatcaaatgagaactacaaaacaagaaattaactctctttttcttacatatatgtagacgtttcaaatagaaacatttaagattccatttataccagtaagaaataaataataatttacttttgattattctgggaactgtgtaatcttttcatacagccagagggtgtgaggacatattagcactgttggctgataaaagagaactggtattagtccaatttatgaggattgccttctagcatttattatggtttcttgcttagagataaattgtaaagaggaagaatcttaaattgtatgattacataaagtacgggtaaacgtactataattttcatgaaataaaatgcttattgctgaacaactaaggaaaacttatgataatttaagatgtacacagagttgtattaagatttttggaggccctaagcactgaaaagattttgatgttctaccacctcttccttatatagaaataaaaagaaaaataacagaaccccaaaataacagtaaaaaagtccaacaaagttctgatttttttcccatgatggctacttcagtggttttgctgagatattaaattatttggcaaaggttttttttttttttttaacattctggttttgctggtgccctgaagcatatgcttcatctg

SEQ ID NO: 386 - DNA, 4001 bp, Homo sapiens
tcagagtcaggattatacatattgaaaataagccttgaaactccagtttctgtgtgtgtgtttcgttatatgtacaaggactaagccacaataagtgggtgttagtatcttgataagtatgtttaatataaacaagattgcaaagttgtattaaaaatgtttgtcaaaactttttaaaagaatattattaatttcccagtcttcctgttcgtcaaaaatcctgtaaaatcttatcatgaacatgggttaagtagttcattctttgtgaagtttatataatcttttgagttttcaaaaggaaacttttcaatatattaaatttgttactttgctatcatcactaaacctgttcaaaactactaggtagaaaaaggaaaaaaaatcattacttaatgtagcagcaataacaagataaataatttagtatctgtgcataaacttccttaatactgaaatttttgcaaggccagtgtattctgactgaaaatgtacagactgtatggactttgtttgttaatagtatatctcttggcacttaaatttttaattcttgtaaccgaaacaaagccctctaaaaaccctctccccactgggttttcaaaaacagcttcaagtgttgcatttccaaataagaatagctcataagaatatcatcagaactctgataaagcaactattttaaactattttgtcatttttctgtttctaagcctttcacctaagttacatgataacattcagaagaggaaaaaaattatcaggtacaatacttggcagctggacatgtgtcaattgttgcctgtaaatctaattactgaaaattagagcacaccacggcatgaccgtagagacaaagacactgcagctgagctctgattagaaaattcaactttttattcctcccgactcctgaatgagtggatggtattacattaactgtaaaatgtacatcctgtcccggtgcccaggccacccattccaaacgaggaaaggtcgtttgtcaaaacttgaagcatttgaaggaaaaacaccctcatcagtagtcaagaaaattaacgttaaagtctattattgggggcaaagtacgtaaaaccactaatagcagtgtatttacttcaaataataatcataataatgtgtttacagagctgtctttaaaaacaaaacaaaacaaacaaacctcggccctacactgactactttaaaatccccaccgtcacaaaaacattccaaaaactaagaccaaatctggaccccacttgatatcaaggatgttattggatttgaggagtttgttcaaagtacgtcattttgagaagttgcatccacttaaagatataaaatatggcaaccaactaggtttaaaaacagtgaaattttatgtccctgaaagcttaaaagctgtaaatctagaaacccgggtcacgtaggcaacattattgacttgttttccccacctctcttaataccaacctgcagcgcagtccttccaaatccattttgtgcattgacgtttacattattttgcaacaaactagtaagttgctctaggtcccccctggcagctgcggacgccaactcgttcccccaaggctcggccattctttagggtcctgacgatcaggaaaagatgaattagtcgtttttctttttcccctttcctttgctcctaaccaggctgcatgatggcatcggagactgacagaaggactgggatggttaatctggagtagagcttggtagtaaatactagtaagatctgcctgccaaaagcccgcccctcgattcacacgtgattattcagcaaaactgagccattggagaggggctcctcgcctcgcttttttagcttaacccctatgaagaattctgacgactccacagagagacacacagacacacatacattcctggttaatgactccggacgtcagatgtaggcagagctgtcacgtacctacgctacagatctctgtgaggagtgtgtgtggagactcaagggactatagatcggggcagaaaataccgcggaaggaaagacattcagggggaagaaaaggcattcacccacccttgttcacggtggtgacttgagccgtgtgaggcagaactgcaggggcaggtcctccagggggctcggtttccatccgtctcgccgaagggatagtcctgggtcctccgctgctgggagagcgccgcggtggctggatgctgacgtgctccggagggttaaaagatgatcgccaaaggcgaacgggagtagcagttcggtggccctcaagttacaggtcgtaacgattgcccagtgctctgggcttctccagaagagcctttggtcgcgtccgggccaagccgtgggctaatgccgctcaggaaagctccggagcccgcccgccaggcagccgcagccccgccgagcctcagaggccgtgggagccgggctcggcgcgcgtctccggaggctgccgggcgtgcggcgggcccccgagaagcccgtcatgccggccccgccaggtcccgggactcccggcagcccgaggaaggagagtgatgcggaaagcgtctacggagcccggactgctggggcagctcgcggcagcattgcggctgcactgggcagcccccccgggaacttcccgcctacgaccgagctcgttcaggctttctgctgtaggcactcattgagctgctgccgccgctgtcctttccttcctttcccggttttgtgggggcctctggagatggggagagtcctgggaaacgtaggccaagttctgagtagggagagtcgccgcagttccggggcagccagtccggtcgccgtctcggcgagcgctcagcagcctcggcgcccggtgccactttgccacctctcgcggtccccggcctgtgcccctttgctgcggacagggcagccgccagccagctgtgccctggagcagagcctggcagcactgcttcctccttggccgcaccgctcccagtgacagtttcttttgtagctgatccccccctagatcgccggtccctgctcctttcacccctacaggcacttgcgtgtcgcccccttttttgcttttttccttcactccctcccttgctgcttttttcgctgaaacaattgctgcttctgttgcctctcagagagggtgccggtttcttctcccttttttccgacctcatcagctttttttgaaaagaaaaaaattgagcgctttttgagttgaaaaacccgcccccattttaacggcagagttttaaggaggctcggcagagttgcagcgccgcgggagcgggaaggccgggcgccgcccacgccccgccctccgccctgctggcgctcgcgctcgcagtctcgcacgctccgcccgcccggtcccgcgccctcattcccgcctcccgctctccacctcctcccgtcaagtctctcgcgccggctccctcctgccggctaggcggcctgtccccagctggagcggggttcggccccgcgaagtccggcctgcccttctgctggcgggcttgagtctgtgacgcgaacccccagctgccccaattcctacgggggcgaggacaggggtttgttatttaagacggttgtggagggccgcagggtctttgaggctccgcagcgtacgctgcgggaaggcggacagcgagctggcataaagggagtcgttcctcagcgctagcggggcaggtcggcccgcctctgtgctcccccgccaggctcgcaaagttcgggcggccaggctgcggctgctgctgcctcctctaggcgcgcgcgctctgtaaactcggcgtccttcgctgagccctggcctcggcctcgcacctgccagatccatgcccgacggcgcggtgggcaggggtggccgcgggggtggagggaaaaatccggactgccactaagcacagtgctcacaaaaagcaagtcttgtgtagactgaattttatgaaaacttaagacatggcatatgtaagaacgaactctgaagcct

SEQ ID NO: 387 - DNA, 4001 bp, Homo sapiens
gttggccaggctggtctcaaactcctgacctcaggtgatccacctgcctcggcctgccaaagtgctgggattacaggcatgagccaccacgcctggcctatcattgacagtctcttaatcaaggagcagatgaatgaacgctggcctctctaaacacagtgactgctgcatgggtcactctgaatgctcaaggctagtgggctgctagttgctcctcctacttaaggtagaaactcatcctgattcagctgggtttgctcccaaagcagtttatatcaattatgcttgtaataatgaaatttgattaaacatgtaaccaatgaaatatgagttcagaaagagagtcgttatttatatggaaacaaagttaaatgcttggaagagactggatcaccatgactcttaaaaaattgctcttgaagtagtgtctgtgagaaaatggaaagattggatgggctcataactcagattgctttgtgaacgtctcaaagttactgctctgctttaaagaaacgggtttgtagataagatatggggcatggcttatatgaaaaagacagttaagaactcaaaaaattgtttacatagtctaagataaaatctttactatatatatatgatttaaaataatttctttataaccaacttttcaattactcggtcccaattacatcagataaatgagatttcactatatttgtttatgtcaatgtaaactttacacatttctcttaaaatccccaccattaacacgtctgagtaatttacacctgtgccccacttggcagtttagtcttgataccactatgattatatcaacttaagaaaacatttttttcattggtaacattgatttgcctgtggttaaagattaatctgcgcaaatagcactgattggttccttaaagcaaggaatgtttgcataggtagtcttgaatggttcctagactgatggtacatttgtaaacaagcctctgattggttaatagagtaatactatatttgctgcctatgggcagtggggaggggacagctccttactgcagctggaggaggcacctctccctccactcccaaggttggccaaggccacagaaatgtatctttttttttttttttgagacagagtcttgctttgttgcccaggctggagtacagtggtgcaatttcagctcactgcaacctctgcctcctgggttcaagcgatcctcctgcctaagcctccccagttgctgggattacaggcgtgtgccaccacacctggctacttgtgtattattagtagaggcaggtttcaccatgttggccaggctggtctcaaactcctgacttcaggtgatctgcccaccacagcctcccacagtgctgggataacaggcatgagccactgcgcccagccggaaatatatcttattgctaaagttgcctgtgctgctctctgagtcccatcaatactcactttgccagcacaatagacgccatggtggaagggcaaaggggagatgtaaagggagtggggcagggacggggagaagtacagtgtggtcaactcacctgccagggccagctgttgggcctcgcttcttcaccgccaaccaccctagtcacataaggtgggtaagtggggtccccacaactgagggctgtgaaaagagaaagggtcttgagtcaggaagcagcgacccacacaatgtaaactacacttgctgcgcattctgaccccccaaatagaaaacccttgttctagaaggatcccaagaggtcatagaatcctgctctttgctccaattctttgaaactccattccaatgttcttatgattataggtctgaatgcagtaggggttgggtgggggcgagaggggaggacaggaagatcccatttccagccccaccagggcatgggaaaccagtgcctctgggtaacaggacttacctccagccaccaaagtggacagcagcagcgtccttatcatggtgtgtccgtgggagttctgtaagcgtggccctggataaggccctggttttatgagcggacttatcagtgagagatacagtaagagcacgcaagatggggttttctcaaagcccagtggaaaaaagagctgtgtccaaatattttttttttcccatttcctcccaaatgtcaccctagaaatactttgaaaaagatgccaaaggtagatattggaatatgggttccatctgttttgaagagattatgttgtgtgttagggaaggaagaaaaatactaattgttggtgctcggagttgtttttttttttgtttgtttgtttttgttcccctccctgggtaagactgaggagaggagttgtgttttctttctttctttctttcttttttctttctgagatggagtcttgctctgtcacccaggctggaatgaagtggcgtgatctcagctcactgcaacctctgcctcctgggttcaagcaattcccctgcttcagcctccctagtagttgggattacaggtgtgtgccaccattgctggctaatttttgtatttttagtagagacggggggtctcatcatgttggccaggctggtgtcgaactcctggcctcaagtgatctgctcgcctcggcctcccaaagtgctaggattacaggctgagccaccatgcccggccaggagttgtgttttcaatgaaaagattaaggtggcatgctgagcccacagcattctaaggcagtatttctcaatggggctggttcagcccaccaggagacgtttgacaacatctggagagaattttggttgtcatggctggggttgatgtaaattggcatccagtgggcagggagcagagagcagagacgctgctaaacacccgacaatgcactgggcaataggactcgccctgccccaaatgtcaatggtgctgagactgagaaagcctgttctaggccataccaggggttgcaatgtgaccttggctgagtcatgtaagtctctagacccatctgtgaaacagggagagaaacccatgcccagtattgtttcacaacattgtggtaaggatttgtataatgtggggaaggtgcacatgtagcagaatttgcataatgcggggaaggtgcacatgtagcagaaggcaaggccgacatgcacaattaggatctggccactctaatgatggggggaagcagaacgctggcagaggagggcttcatctggtggatgaaaatgcactttacggccgggcacggtggctcactcctataatcccagaactttgggaggctgatgcgggcagaccacctgaggccaggagttcaagaccagcctggccaacatggtgaaaccccgtctctactaaaaatacaaaaattagtagcgtgtggggctgcatgcctgtagtcccagctactcaggaggctgaggcaggataacctctcgaaccttggaggtggaggttgcagtgagctgagatcgcaccactgcactttagtttgggcaacagagcaagactccatctcaaaaaaaaaaaaaaaaaagaccagctccacactcttaagacttgatatcaagtgttttttttttttttttttttttttttttttttttttttttgagacggagtctcgctctgtcactcaggctagggcgtagtggcgcgatctcggctcactgctacctctgcttctcaagttcaagtgattcttctgcctcagcctccctagtagctgggactacaggcaccggccaccacacccgacttatttttgtatttttagtagagacggggtttcaccatattggccaggctggtcttgaactcctcacctcgtgttcgtccgcctcggcctcccaaagtgctgggattacaggcatgaaccaccgcgcccagccgagttcaagtctttgatccatcaattttgagtgtggtggtctggacaagccacttatcttctgggccttactttcctagataaccatccaggcctggattgcaggattgttgtacgggtaagaaaa

SEQ ID NO: 388 - DNA, 4001 bp, Homo sapiens
gtcttgaactgctgacctcaagtgattcacccaccttggcctcccaaagtgctgggattacaggcctgagccaccacgcctggcctatcatggacagtctcttaatcaaagagcagatgaatgaacgctggcctctctaaacacagtgactgctgcataggtcactctgaatgctcaaggctagtgggctgctagttgctccttctacttaaattagaaactcatcctggttcagctgggtttgctcctaaagcagtttatatcaattatgtttgcaatagtgaaatttgattaaatatgtaaccaatgaaatatgagttcagaaagagagttgtgaaacaaagttaaatgcttggaagagactgaataccatgattcctaaaaaattgctcttgaattagtgtctttgaggaaacagaaagattggggggaaaagtcgtaaaagtcgggatgggctcgtaactcagattgctttatgaatatctcaaagttattgctctgctttaaagaaatggacttgtagatgagatattatggggcatggtttatatgaaaaagacagttaagaactcaaaaaattgtttacatagtctaaaataaaatgtttacagcatatatgatttaaaataatttctttataaccaacttttcatttagtcagtcccaattatatcagataaatgagattttactatatttgtttgcgtcaatgtaaactttacacatttcttttgaaattcccaccgttaacacgtcttagtaatttgtgcctgtgccccactcggcagtttagtcttaatatcactattatatcaacttaagaaacatttattttccttggtaacattgatttgcctgtagttaaagatgaatctgcatgaatagcactgattggttccttaaagcaaggaatatttgcataggtagtcttgaatggttcataggataatggtacatttgaaagaaagcctctgattggttaacagagtaagactatagttgtaaatttgtttatgggcagtggggaggggacagctctttactgcagctggaggaggcacctctcccttcactcccaaggttggccaaggccacagaaatgtatctttttcttttttttgagatggagtctctctttgttattcaggccggagtgtagtggtgcgatctcagctcactacaacttctgcctctcaggttcaagtctttctcctgcctcagcctcccgagatgctgggattacaggcgtgtgccactgtgcttggctaattttttattattagtagagacggggtttcaccatgttggccaggctgggctcaaacttctgacttcaggtaatctgcccaccacgaccttccaaagtgctgggataacaggcatgagccactgtgcccagctggaaatgtatcttgttggtgaagtttcctgtgctgctctctgaatcccatcaatcctaactttgccagcacaatagacgccatggtggaagggcaaaggggggatgtaaagggagtggggcagggacggggagaagtacagtgtggtcaactcacctgccagggccagctgttgggcctcgcttcttcacctccaagcatcctagacatatcaggcgcgtaagtggagaccccacaactgagggctgtgaaaagagaaagggtcttgagtccaggaagcagcgacccacacaatgtaaactatacatgctgcattctgaacccccaaatagaaaacccttgttctagaaggatcccaagaggtcataaaatccttctgtttgctccaattctttgaaactccatttcggttttcttatgattataggtctgaatgcagtaggggttgggtgggggcgagaggggaggacaggaagatcccatttccagccccaccaggggatgggaaaccagtgcctctgggtgacaggacttacctccagccaccaaagtggacagcagcagggtcctaatcatggtgtgtccgtgggagttctgtaagcgtggccctggataaggccctggttttatgagcaaacttatcagtgagagatacactaggagcacgcaagatggggattttctcaaagcccagtggaaaaaagagcttgtgtccaaattttttttttccattttctcccaactgtcaccctagaaatactttgagaagatgccaagggtagatactggaatatgagttccatctgttttaaagagattatgttgtgtattagggaaggaagaaaaatactaattgttggtccttggagttgtgttttcttttcttttctttttttttttttttttttcccctccttgggtaagactgaggagaggagttgtgttttctttctttttttttcttttttccttctgagatggagtcttgctctgtcacccaggctggagtgcagtggtgctatcttggctcactgcaacctctgtctcctgggttacaagtgattcccctgcctcagcctccctagtagctgggattacaggtgtgtgtcaccattcctggctaatttttgtattttttagtagagacagggtttcgccatgttggccaggctggtctcaatctcctgaccttaaatgatctgctcgcctcggcctcccaaagtgctgggattacaggctgagccactgcgcccggccaggagttgtgttttcaatgaaaagattaaggtggcatgctgaacccacagcgttctaaggcagtatttctcaatggggctggttcagcccatcaggagaccttttgacaacatctggagacatttttggttgtcatggctggggttgatgtaaattggcatccagtgggcagggagcagagacgctgctaaacacccgacaatgcactgggcaataggacttgccctgccccaaatgtcaatggtgctgaggctgagaagcctgttctaggtcataccaggggttgcagtgtgaccttggctgagtcatgtaagtctctagacccatctgtgaaacagggagagaagcccatgcccagtattgtttcacaacattgtggtaaggatttgtataatgcggggaaggtgcacatgtagcagaaggcaaggccgacatgcacaattaggatctggccgctctaatgatggggggaagcagaatgctggcagaggagggcttcatctggtgggtgaaaatgcactttatggccggacgtggtggctcactcctataatcctagaactttgggaggctgatgcgggcggaccacctgaggccaggagttcaagaccagcctggccaacatggtgaaaccccgtctctactaaaaatacgaaaattagtcgggtgtggtgctgcatgcctgtagtcccagctactcaggaggctgaggcaggataacctctcgaaccttggaggtggaggttgcagtgagctgagattgcaccactgcactctagtctgggcaacagagcaagactccgtctgaaaaaaaaaaaaaaaaaaaaaaaaaaaaggaccagcctggacaacatggtgagaccacctgtcactacaaaatttcttttaaaaagttagccaggtgcggtggcacacgtatgtggctccagctactctggaggctaggccgaggcagagggtcacttgagcctgggtggcaatggttgcggtaagctgcaatcgattctcctgcctcagcctcccgagcagctgggactacaggcgccggccaccacgcctggcttatttttgtattttattagagacggggtttcaccatcttggccaggctggtctcaaactcctgacctcgtgttggcccgcctcggcctcccaaagtgctgggattacaggcatgaaccaccgcgcccagccgagttcaagtctttgatccatcaattttgagtgtggtggtctggacaagccacttatcttctgggccttagtttcctagataaccatccaggcctggattgcaggattgttgtatgggtaagaaaatgggtgggaaagaattctgtaatc

SEQ ID NO: 389 - DNA, 4001 bp, Homo sapiens
ggggctggagtgcagtggtgcaatcttgtctcactgcaacctccaactcccaggttcaagggattctcctgcctcagcctcctgagtagctgggattacaggcgtgagccaccgcacctggcctaatttaattaaatttaaatagccacagcacatcaagtccagccttctgagcttccctccactggccttacaagatccctcactcccttattgctttcagacctcaaagccctgtagtatcatcctaggaatctagaaatgagtctctcaaaatctcacttcgtcaacacagtgcctgaaattccaccatcagtgtgccaactccttgagtttagcatttccttcacccccgattccaattttaagttgcaaatagcccagtgagggttacagatgaaacgggcaaaacctccccgtgaagtagatggtccaagggctgcctggtctttggaagctgaagtggacattgcaaagggagcaatggtgtcaaggctggatgccacgccattagagcttagggtccagagcccacggtgggaatgagggcagctgctattgctcttacctgccagggccagctgtaggggaccgcatcctcaccatggacaacgcggctggaagagtgagaggaaggtgggccatagcctgaggctagaggggagaggagagctgtcaatcagctggagggtccccaaaagcaaagaggaggccagggtcccagtccaagccatgccttcaactggctgtgtgaccccatgcaagcccctttcgccctctggacctcagtaaccacatatgaacagtgaacatttaaactagagcagggctttccagaatcccaggagtccagggatagagattcaaatgtggcctccttcattgggaggattgaagagcttgatacacttagaacaatgcctggccctcgatgagccctcaaaaagtgagagctattgtcatacagagtggaggctttaaagaaggacttcctgggttcaaagtgcagctctgggctgtgtgtggtggttcacacctgtaatcctagtgctctgagaggccgaggcgggaggatcgcttgagcccgggagtttgagaccagcctgggcaacatagcaagacctcatctctagaaaaataaagtacaataaaataaagtagccaggtatggtggcatgtgcctataatctcagctactcaggaggctaaggtggtaggattgcttgaggccaggattttgagaccagtctgggcaacaaagcaagaccccatctctacaaaaaaaaagcaaaaaataaaaacattaagtgcagctctgccttttgttctatgataagctactttacttccttgagggtcagtaaaatgggggataatgatagtactgatctcctgaggctgttgtgagaattacatgagaaagtataagaaaatccctaaacattctgcctggcatagtaagcactcaatcaatgttatctgttaccattattgtcagtcaagggaggctgtttggaagaggtggccctgagctggaatgtaatatggcagagagaccaggaaaaggccagagcatagaatatggagccaggtagggggagtgagaggagagttggagtggtaagtagaactgtggaaattccaacccaagaagtccaaccacacagtccaaactcttaaccgtttgactttgtttactgcccccatcaaggacttccaccacagccctttgggggtctttcaccatccacagcttcccctccactctcctgctccatcataagctgaaagcccctacagtcatgcccccgggtacaagctgagaccccctcctgtggaaccaggcatagcatgtcatgggactcagagcgagtggtagatttcaaggattcctagtccagggcagcccagggagcacacagacaggttggggtcttaccaacggccacaaggaggagggaactgagcagccggagcatcatgagttttgtgatgataggaaaagggcacagagcctggggctctaatatagggcagaaggtaagcaggggggctgattgggccccactcccagaacaggtggtggaactccaggtctcccatggtccaaggccacagtcctcgcctgctgcagatggacaagtgacagccaaagggaggacctagcgttccctccaacaggtggctggacaggtggtgtggagtggccaactgataacaagagttcaggaagaaaagctcatgtcaggacaagacctcctctttcggaaagaacaggggcactggaaccgggcagaccacggttcaatcctggttctgccaccttcaagctctgcgactttgggcgcatggcttaacctctctgagtctcagttttctgctctctaacatgagatttatattagtacccacctccacaaaaaaattcttgttgagcactttttctctatgtatcaggcactgttctaggggatacagctgtgaaaaatgcatggtctcagcccttctagagtttgagtctaggccaggagcggtggctcacacctgtgatcccagcgctttgggaggccaaggtgggaggatcacttgaggtcagaagttcgagacatgatgaaaccctatctctactaaaactacaaaaattagccaggtgtggtggtgagcacctgtaatcccagcacctgtaatcctagctactgggaggctgagggaggagaatcacttgaacctgggagcggagaggcagaggctacagagagccgagatcatgccactgcactccagcctgggccacagagcaacactgtctcaaaaaacaaaaacaaaaccaaaaaaaaaaacagagaagaaaagaaaatgaaacataggtgattggggtaggaatgggagtaagtcatttagatgggggggacagagaaagtgacatttgggctgaggaggtcatatctgatggagtcctgaggataagtaaaagccagccacgggaatccctgaaagaaacgcgctctgaagggaggcgacagcaggtgcgaagttctggaggctgcaatgggcttgacttgttcaaggaaggggaggccagtgtgacaggagcttggtagtcaaagtagagaggggtgggagatgaggtcaaagagcaggcgaccccgaaagtggaattcacaggtgatccagccgtttccctcctaggtctataccgtgagaaaaccttaggcatgtgctccaggaggtgtggatgagattgtttgccgcagcccctgttctcaaaactcaacagcaaagacctagaaacaactcccacgtccatcaaggttcataggtcaatatgtgtagcatattcacacaatagatttttttttttatagtggtgcgatcttggctcactgcaacctccacctcacgggttcaagcgattctcctgcctcagcctcctgagtagctgggattacaggcgcgcaccaccacgcccggctaatttttgtatttttagtagagacggggtttcaccatgttggccaggctggtctccaactcctgacctctggtgatccacccacctcgacctcccaaagtactgggattacaggcatgagccactgcatccggccagacggggcaatttaaatagatccctcctgggggaaagtcaggcatcttgctgagcaggttttgttttaggagtgaaccccctccaatcacagcctagccactctgatagcctgggttcgtggaacgtgtgtggacacaagggaagcagctgtgaaaatcctttatactgtgataaaaatagccatgccctcccctaccctctgttccctatgtgcccggacatgtttgctcagcttgaaagctctgagccattccccagaccctacgccagggaagaaggagggaggggcccaggaggtggctggggagagatagggttaggtccgataagcccagattccactgtagagtgtctgaaacccacagggcctaaaacgcgatctaatccaacc

SEQ ID NO: 390 - DNA, 4001 bp, Homo sapiens
acaggcgtgagccaccgtgcccggcctaatttaattaaatttaaatagccacagcacatcaagtccagccttctgagcttccctccactggccttacaagatccctcactcccttattgctttcagaccccatagccctgttgtatcatcctaggaatctagaaatgagtctctcaaaatctcacttcttcaacacagtgcctgaaattccaccatcagtgtgccaactccttgagtttagcatttccttcacccccgattccacttttaagttgcaaatagcccagtgagggttacagacggaatgggcaaaacctccccgtgaagtagatggtccaagggctgcctggtctttggaagctgaagtggacattgcaaagggagcaatggtgtcaaggctggatgccgcgccattagagcttagggtccagagcccacggtgggaatgagggcagctgctattgctcttacctgccagggccagctgtaggggaccgcatcctcaccattgacaacgcggctggaagggcgagaggaaggtgggccatagcctgaggctagaggggagaggagagctgtcaatcagcgggagggtccccaaaagcaaagaggaggccagggtcccagtccaagccgtgccttcaagtggctgtgtgaccccatgcaagcccctttcgccctctggacctcagtaaccacatatgaatagtgaacatttaaactagagcagggctttccagaatcccaagactccagggatagagattcaaatgtggcctccttcattgggaggattgaagagcttgatacacttagaacaatgcctggccctcaatgagccctcaaaaagtgagagctattgtcatacagagtggaggctttaaagaaggacttcctgggttcaaagtgcagctctgggctgtgtgtggtggttcacacctgtaatcctagtgctttgagaggccgaggcgggaggatcgcttgagcccgggagtttgagaccagcctgggcaacatagcaagacctcatctctagaaaaataaagtacaataaaataaagtagccaggtatggtggcatgtgcctataatctcagctactcaggaggctaaggtggtaggattgcttgaggccaagattttgagaccagtctgggcaacaaagcaagaccccatctcaacaaaaaaaaaagcaaaaaataaaaacattaagtgcagctctgccttttgttctatgataagctactttacttccttgagggtcggtaaaatggggaaaatgatagtactgatctcctgaggctgttgtgagaattacatgagaaagtataaggaaaaccctaaacattctgcctggcatagtaagcactcaatcaatgttatctgttaccattattgtcagtcaagggaggctgcttggaagaggtggccctgagctggaatgtaatatggcagagagaccaggaaaaggccagagcatagaatatggagccaggtagggggagtgtgagaggagagttggagtggtaagcagaacagtggaaattccaacccaagaagtccaaccacacagcccaaactcttaaccgtttgactttgtttactgcccccatcaaggacttccaccacagccctttggggtctttctccatccacggcttcccctccactctcctgctccatcataagctgaaagcccccacagtcatgcccccgggtacaagctgagaccccctcctgtggaaccaggcatagggtgtcatgggacttagagcaagtggtagatttcaaggattcctaatctagggcagcccagggagcacacacacaggttggggtcttaccaacggccacaaggaggagggaactgagcagccggagcatcatgagttttgcgatgataggaaaagggcacagaacctggggctctaatatagggcagaaggtaagcaaagggggctgactgggccccactcccagaacaggtggtggaaatgcaggtctcccatggtccaaggccacagttctcactcactgcagatggaggagtgacagccaaaggaaggacctagcgttccctccaacaggtggccgcacaggtggtgtggagtggccaactgataacaagagttcaggaagaaaagctcatgtcaggacaagacctcctctttcggaaagaacaggggcactggaaccgggcagaccacggttcaatcctggttctgccacctccaagctctgcgactttgggcgcatggcttaacctctctgagtctcagttttctgctctctaacatgagatttatattagtacccacctccacaaaaaattttttgttgagcactttttctctatgtatcaggcactgttctaggggatacagctgtgaaaaatacatggtctcagcccttctagagtttgagtctaggccaggagcggtggctcacacctgtgatcccagcgctttgggaggccaaggtgggaggatcaattgaggtcagaagtttgaaacatggtgaaaccttatctctactaaaactacaaaaattagcaggcgtggtggtgggcacctataatcccagcaccggtaatcctagctactgtgagcctgagggaggagaatcatttgaacccaggaggcagggaggcagaggttgcagtgagccgagatcatgccactgcactcctgcctgggccacagagcaagactgtctcaaaaacaaacaaacaaacaaacaaaacagaaaagaaaatggggcgggcacggtggctcacgcctgtaatcccagcactttgggaggctgaggtgggtggatcacgaggtcaggagatcgacaccatcctggctaacacggtgaaaccccgtctccactaaaaatacaaaatgttagccgggcgaggtggcgggcgcctgtagccccagctactcaggagagtgaggcaagagaatggcgtgaaccccagggggcagagcctgcagtgagccaagatggcgcccctgcactccagcctgggcgacagcgagactccgtgtcaaaaaaaaaaaaagaaaatgaaaatgggtgattggggtaggaatggagtaagtcatttagatgagggggacagagaaagtgacatttgggctgaggaggtcatatctgatggagtcctgaggataagtaaaagccagcaacgggaatccctgaaagaaacgcgttctgaagggaggcgacagcaggtgcgaagttctggaggctgcaatgggcttggcttgttcaaggaaagggaggccagtgtgacaggagcttggtagtcaaagtagagaggggtgggagatgaggtcaaagagcaggcaaccccgaaagtggaattcacaggtgatccagcggtttccctcctaggtctacaccgtgagaaaaccttaggcatgtgctccaggaggtgtggatgagattgtttgccgcagcccctgttctcaaacctcaacagcaaagacctagaaacaactcccacgtccatcaaggttcataggtcaatatgtgtagcatattcacacaatagattttttttttttatagtggtgcgatcttggctcactgcaacctccacctcacgggttcaagcgattctcctgcctcagcctcccgagtagctgggattacaggcgcgcaccaccacgcctggctaatttttgtatttttagtagagatggggtttcaccatgttggccaggctagtttccaactcctgacctctggtgatccacccacctcgacctcccaaagtactgggattacaggcatgagccactgcacccggccagacggggcaatttaaatagatccctcctgggggaaagtcaggcatcttgctgggcaggttttgttttaggagtgaaccccctccaatcacagcctagccactctgatagcctgggttcatggaacgtgtgtggacacaatggaagcagctgtgaaaatcctttatactgtgataaaaatagccatgccctcccctgc

SEQ ID NO: 391 - DNA, 4001 bp, Homo sapiens
aggggtagactctctgccccagaagtggggcagacacctggaggcctaaatactggtggtgatgggagagggaggacacttgggctgtcaggagatgggctttgtgtagggagagaaggaccatgtgaccgccagacaagtaagagtagtgtggctttctctcctgctgagctgttctcctttcccctctctccctcacctccacctccctccatcttgatcaccatcatccctctcttctcccattttccctatttcctcatctctccccacctccaccataggcaggtggaggacggagagtgaaatagagaagggaagggaagaacagttagttagccggaagtgcctcttccctgtgccaggtggagggggagctggtgtggcccctgggatccccggtgtgtggagctctccaagtgctgaccctgaccgcccccacttagccgcacagcccttggataggcctgaggagcaccctcccttctcccccactctcttaactttctaagcctcccacactttccagatctttaccaatctccagccttcatgccctgcttcctagtccctctctttagtcctggagctgccctgcccagtccagctccacgctttccacattgaacacctgaccctgtgtcctgacccccatcccaatattatctgaggctgctcagattctcagtcttgctgcacacgcacacacacacacacccctacccagctgcttatctcccaaaccagctctcttgtccctccattctttcttgagttcatcccatgacatcaacacacccatatgtctgggatccacatctttgcagccgtcttgacaactcttcagccaaaagaggccctccttagtccttcaccggggtttcctgatcactctagctgagttctttttcagctcctccatccactttcctcaggcctgaactcttctccttccacatcagcccttcccagccgctccacccctccagcctggcttaacttcccccagcctcccagcccaccccgaagcctcttcagcctgcccgacccctcacccttgtgcagcccggtgtacttgtccttgatgacagtcagctcaaagatccgaccaaactgttcgaagatgggcttcaggtccttctcctccagatgcctcgggatctgccccacaaacagcttgatggcatccggctccttcattgaggcggcccaggaggaggggccgaggggagcagggagaggcccaaaggccaaggggagctgcccagcaaggagataagtggtggggcccgggggcccagctggggctggctttccctttggcccccaaccacgctgctaagcagaggggcggctcttcacacaaaggaggcccagggagttgagtgctaggggtcaggggtctaggcagacgctgtcatgccaccagggggcatcgcctaaacaaacgatctccctcccagagatctggcaaatgtcccaggatgggggtgagtatggccaagacctggagggttaggtggtagccgggggtgctagggcttagagggctgggaactgggagttgagatgagagctggaggcggggaaagggcctgaggagggtgatggggaggagactgaggggttaaggggcctgctatggttgccagcagcgtcagtaaggggggcccactcctgatgtggggcaggtgaatctctcgttggcttccctgggaggacacctcccctgtggcggatccttctgctgggtccgaagatccctgatgccagatgcttgatctctgatggcggcagggctccaggggtcccttttgccctgccgccccccttcaggtcctcccctcagcccccctcccacccccaccccagtccccgggcctgggctgctgccggctgctcccgccgctggggctgcctgctttcccggtcacctgggtcccggagctctgctctccggccgcgctctcctcaacaaaaacctcccccctccacacccccctccccactcccacctcctttcccctgacatcagtgatgtcagtctcaggggtcgaatacaaattctctaccctggagagggacgcacaatccaggcacgagccacgccctctttctatctccatcctccctgactcccttcccgcccccagaagagcagctggtcctgttgataataacccttcccccatcttactccccagtcaggagttgggcaaagcactaagatggagaatttatagaggaaccctaaagtggggtccattgttccgggggctggagctgtccccggtgctggaagactcagcagatggggggtggcggggaaagaggggagcccggcatctggggagccccaagagtagagagtcaaggaaagaaatcaggggaaagaaaaatgagaaaggacggttgcataggctgaagggaaaggagatatagatggagagggaagcaggtcgcagagtctgggggaaaaagaaaaaatgcagagaggaaaaatggaaagggacgtggagaaggaggagcaggatgagaagaatgcagaaagagaactgtatattttccagaaaaggaaccaagaaaaacgatagctttctggcatttgccgatgcccccttctctccctctggggggtttgtgtgtataagtgcgtgggcagggaggccgcggaggcggcgccgcgggcgctctcacttgtaagctccttgaagaccaggacaccgtttaattcagcatcttactgttcacagtgtctagcaccctgtcttgctcatgcgtagcaggagcttaacaaacactccatgcaaacaacctctgacaacagtggattcctgattccttcagtgggaagaaccacagctgtcaagcttccccttaggatgcagaaacccaattactctttcctttgcttctttcttcagttgggttctttgagttggactcaaattgagccaggtagcacagaagagcaggggaggcacattcggggaccattgctcccctgaccatggatacttctatggatgattggcaggctccacgatctggagggagcgtgacccctccatgcactgggcccactcagagcacgccctcagtgcagggattatctgtggacatcaaaccttgtcagtggtggtagcccttgctttctgtcagtgctcagcaacgggggctctcctggggctctgggcttttgtagagcaccctgtcttcctgtcattcccttcttctcccccggggtagggctgctgtttccacagaggcactcgtgtctctaaactgtgtcccagctgagtcccaggggcctccattcctgagctatcacggcaggcaggcttctcttctggaagggaaataatagtaacagccagtgcttacatggctcttacagtgtcccaggctttgtgccaagtgctttatatttactaactcctaaaccctcaccacccccctatgatgtagattttgtcatctccaaatagagaggaggtaaccaagacacagagctgaaataacttgcctaaagccatgcagctagaaagaggtctagctgagactggagcctgggcagtctggctcctgagtccacgcatttaactcccacatcaaacattcctcttgagaatgggagcagtggtgaagtctggcctttcttcctcttctgtctccatttaagccctggatgagagagagtctttctttttactgcttgattctgtggaccacctcccatccttccttagcctgtttttttgttgtggcctggagccacgctctggcaggtgcttgcatttgagtgaatgtgtatgtgtgtagacttgattacacttcatcacatggatgcccgggtcccccaagtagggtcccctaagatggggtggcagtggggggaggtgctagaggactcagtggtgggtgctcagaagaagcgaatgacggcagagccagggaatcaagaagggcacacacatcttgaaagtaactttccactcacc

SEQ ID NO: 392 - DNA, 4001 bp, Homo sapiens
ctagtgttgccccatgggcagcttgggaagtggggaaggggctgcatctgctcctggtaaaagtcatgtttacgccactaatcgctgctttccttctctccaggtaacaagaaatgcatgcatctacagcaagaaagatggatgctacagagagagagggggacttcctggtgatgagaggaggtggaaattatgctcagtgtcaggagggtggtgagcctcctgccacttctatggcccttctcagtcccctggccctgcaaagggcaggactcacccctggaagcgtcttctgttcgtgcagggcgctctgggccttcagggctgaatcccgggcacagtatgtcaggaaggcacatcctgaggaggggcaggggcagagaaacacggcggggggtgagtcctccatctcccctctctgaaaggctcccttccaaagactgacgactgggaagctttcccttcttgtcatcttctgcctgctggggtagagaggtgtctccaaggggtagactctctgccccagaagtggggcagacacctggaggcctaaatactggtggtgatgggagagggaggacacttgggctgtcaggagatgggctttgtgtagggagagaaggaccatgtgaccgccagacaagtaagagtagtgtggctttctctcctgctgagctgttctcctttcccctctctccctcacctccacctccctccatcttgatcaccatcatccctctcttctcccattttccctatttcctcatctctccccacctccaccataggcaggtggaggacggagagtgaaatagagaagggaagggaagaacagttagttagccggaagtgcctcttccctgtgccaggtggagggggagctggtgtggcccctgggatccccggtgtgtggagctctccaagtgctgaccctgaccgcccccacttagccgcacagcccttggataggcctgaggagcaccctcccttctcccccactctcttaactttctaagcctcccacactttccagatctttaccaatctccagccttcatgccctgcttcctagtccctctctttagtcctggagctgccctgcccagtccagctccacgctttccacattgaacacctgaccctgtgtcctgacccccatcccaatattatctgaggctgctcagattctcagtcttgctgcacacgcacacacacacacacccctacccagctgcttatctcccaaaccagctctcttgtccctccattctttcttgagttcatcccatgacatcaacacacccatatgtctgggatccacatctttgcagccgtcttgacaactcttcagccaaaagaggccctccttagtccttcaccggggtttcctgatcactctagctgagttctttttcagctcctccatccactttcctcaggcctgaactcttctccttccacatcagcccttcccagccgctccacccctccagcctggcttaacttcccccagcctcccagcccaccccgaagcctcttcagcctgcccgacccctcacccttgtgcagcccggtgtacttgtccttgatgacagtcagctcaaagatccgaccaaactgttcgaagatgggcttcaggtccttctcctccagatgcctcgggatctgccccacaaacagcttgatggcatccggctccttcattgaggcggcccaggaggaggggccgaggggagcagggagaggcccaaaggccaaggggagctgcccagcaaggagataagtggtggggcccgggggcccagctggggctggctttccctttggcccccaaccacgctgctaagcagaggggcggctcttcacacaaaggaggcccagggagttgagtgctaggggtcaggggtctaggcagacgctgtcatgccaccagggggcatcgcctaaacaaacgatctccctcccagagatctggcaaatgtcccaggatgggggtgagtatggccaagacctggagggttaggtggtagccgggggtgctagggcttagagggctgggaactgggagttgagatgagagctggaggcggggaaagggcctgaggagggtgatggggaggagactgaggggttaaggggcctgctatggttgccagcagcgtcagtaaggggggcccactcctgatgtggggcaggtgaatctctcgttggcttccctgggaggacacctcccctgtggcggatccttctgctgggtccgaagatccctgatgccagatgcttgatctctgatggcggcagggctccaggggtcccttttgccctgccgccccccttcaggtcctcccctcagcccccctcccacccccaccccagtccccgggcctgggctgctgccggctgctcccgccgctggggctgcctgctttcccggtcacctgggtcccggagctctgctctccggccgcgctctcctcaacaaaaacctcccccctccacacccccctccccactcccacctcctttcccctgacatcagtgatgtcagtctcaggggtcgaatacaaattctctaccctggagagggacgcacaatccaggcacgagccacgccctctttctatctccatcctccctgactcccttcccgcccccagaagagcagctggtcctgttgataataacccttcccccatcttactccccagtcaggagttgggcaaagcactaagatggagaatttatagaggaaccctaaagtggggtccattgttccgggggctggagctgtccccggtgctggaagactcagcagatggggggtggcggggaaagaggggagcccggcatctggggagccccaagagtagagagtcaaggaaagaaatcaggggaaagaaaaatgagaaaggacggttgcataggctgaagggaaaggagatatagatggagagggaagcaggtcgcagagtctgggggaaaaagaaaaaatgcagagaggaaaaatggaaagggacgtggagaaggaggagcaggatgagaagaatgcagaaagagaactgtatattttccagaaaaggaaccaagaaaaacgatagctttctggcatttgccgatgcccccttctctccctctggggggtttgtgtgtataagtgcgtgggcagggaggccgcggaggcggcgccgcgggcgctctcacttgtaagctccttgaagaccaggacaccgtttaattcagcatcttactgttcacagtgtctagcaccctgtcttgctcatgcgtagcaggagcttaacaaacactccatgcaaacaacctctgacaacagtggattcctgattccttcagtgggaagaaccacagctgtcaagcttccccttaggatgcagaaacccaattactctttcctttgcttctttcttcagttgggttctttgagttggactcaaattgagccaggtagcacagaagagcaggggaggcacattcggggaccattgctcccctgaccatggatacttctatggatgattggcaggctccacgatctggagggagcgtgacccctccatgcactgggcccactcagagcacgccctcagtgcagggattatctgtggacatcaaaccttgtcagtggtggtagcccttgctttctgtcagtgctcagcaacgggggctctcctggggctctgggcttttgtagagcaccctgtcttcctgtcattcccttcttctcccccggggtagggctgctgtttccacagaggcactcgtgtctctaaactgtgtcccagctgagtcccaggggcctccattcctgagctatcacggcaggcaggcttctcttctggaagggaaataatagtaacagccagtgcttacatggctcttacagtgtcccaggctttgtgccaagtgctttatatttactaactcctaaaccctcaccacccccctatgatgtagattttgtcatctccaaatagagaggaggt

SEQ ID NO: 393 - DNA, 4001 bp, Homo sapiens
atctggtaggtgatgacactatgagcatcacggtccacagctgacaccgtcaccacgctggtgcccacagctgcatcctcattgagccgcactgtgtactctggttgggtaaaggttggattgttgtcgttgacatccaggacagtcacgctgacactggccgaggcagtgagtgctggagtgccatggtctcgagcttctaccccaaagctgtagaaatcaacttcctcccggtccagttcagcagccacagagatccagcctgtgccattgttgatggtgaaggggaagtcatgtcccaccccagcaaggcggtattccaggcgggcattgtcaccagcatcagcgtcgatagcctggacatggagaaccaggtagcctaaggggacactctccaggacagtagcctggaaaggggtgctgacgaagatgggggcattgtcgttgatatccaggacctgtactgtcaccaagccagagacattagagagtgggggacggccaccatcctgtgctcgcacccgtagggtgtactccttggtcgtctcatagtcaagagggctcaccacatccagagctccagtctgggcatccagataaaactgtccccgagcattgccactcatgatgctatagtgcaccacggcattgctccccttgtctcgatccgaggctgtgactcggagtactggggcccctggagtcacatcctccctcacctggaccacatagcgcttctcactaaactggggggcattatcattgtcatcctccacagaaaggaaaacagcggctgtggtactccgaggacccgggtcccgaccctggtcacttgcctctaccgtcagctggtaggattccacctcttcccgatccacagggccacgggttcggatcaccccagagcgagggtcgatctcaaagacttcagaggggctgcccccagacccctccagcaggcggtacagaatattggcattgggaggggcatcaccatccgtggccctgacagtgagcacctcatagccaacctccaggttctccctgaggctctccttgtactcctgctgctcgaacacagggtcatggtcattggtgtcagtaaccaagatggtgagtgtagccagggcacttcgtcggggcatgccgtggtcctgcgccgtgaccctgaagacgtgggtgctcttggtctcacgatccagctcctcggctgtggttactgcaccagtgactgggtccagggagaagaactggttggagcggctatcaaagagggcatccatggtgtactccagtcgacctgcctcaccctcgtccgggtcgatggccctcagggatgcaacaggggtgcctgctggctggttctccggcactgtggcctggtagctggggggctggaactggggggctgtatttacattccttttccgacgcccacccagggactcttctggtgacctttcccctgccctgagcccgggggcctgtgccagcttgcaggactggcatctgagccgtggagcctttaagcacgggtgctcctcgggcagtgtgagcttgccctgtggggaaaggtggcctccaatgcccaggaggcgacagctccaggggcagccttcaggagctggtggtaggggaatatgggcctcggattctggacaccaaaccctcaggccatcgtggtggggtaccaggtggccagtcagctcagtgcccgcatccctgcagcggctggtgtagagccagaggttcgacgctgaggatggacagagccagcccatgggggcgcaggcccccgaagagcctcgtcccctggaccccaaggaacgacagggccccacttggtctcccaatagtggcggcggcagcagcagcagcaacagcagcagcagcggcggcggcggcgttgggagggggacgccggtggccgggctccgcatctctcccagctcccggccggcggccgggtcaacggcggcggcggctcctcctccggctcctgccggccccgccgcgcctcatgcccgggccagggcgccagtccccgggggcctcccgtgcgccccgcggggcctgcgtctggatggctcggcgggaccccgcgctgcaccctccgacgagcccgggctcccactgccccctgagccagacccgctcccgggtcaccctgagcaccgcgggctgccgccgcgcctccacctgcgctccgggcactcaccacctgcgcccgggggccccgcggcgcccctggccttgccgggccccgggttccggagccggggtgccccctccgcccctatgggatcgcccacctgcgcccgcgtagccgtgcgccccgaccccggcccggccccggcggcccccgacggtcccgcgccgcccgctcgcgccccgcgtccccgccgcggctgctgcctgtcgccgcggccccgggcccagccccgcgctccctcgcctccccggcgggcgggcgagctctgcagagtcgcggcggcggctcattaccatagacctgctcgcgccgcggccgccttaaagcggcaacgccggccgcgctggaggaggtgggccccacccagagcactcctccgcccaaagcgccaggattccctccagcaggaccctccatcccaatttccccaggccggcctcgccagatgcccggtgcgaattagcgatcggaagccacacagccgatgataatcatggtggaagtaccctaagtatgcctagaggtttccaaaacattttaagggctctcagaggccaagtttccagttcattccagtcataaaagccctcgttgctgtcccctcccataggtcagacagagttaaaagggccctgagcaacacaacaaagcctccaaaatcccagagaagcacccacaatgagtcaccgggcccactcgctccctaccgtcccctccaccccaccagcgaggctgttgtctgaccagcatgccccttggggtcgggctgttggaagaatgaccccagcctcatgttggacaccacttgggcttttccagggaagtaaattagaagggtcagagtgggtggaagccaggtggtgcaaacacactgtcaccagattcggaggccggctgcggtggagcctagctttaacacaggcttcctggattctagacaaggggcttacactgccccctgaggtcctgtctagagaggcggcctctcatcccctcctgcctccctgtccatgtcctgcggctaccccctccttccgccacagttttgtgaccagcgaggaggcctacctggtacccgggctcctgaccctctccaaggcagcttcatttgagagggtgtgcaggattccaggggttctccaagaggaccagacatgaagctggaccacacggagagccaggcaggagccgtgcaggcgacccagaaaaggcttccctacatcctggagcagccaggggcccagtcaggtagtccctggggggatgccctggcctggggggatgcctgggcctgggtcccagcctccaacaccacagctatgtgaccttgctcaaattctgtgcctcaatgtccctttttgtaaaatgaggggattgaataaggtgaatggttctcaaatgtttatttagcagtagaattcttttcttcaaaagaaatctgaagtggaaggccagaatatagaacagatgagtagtgctgctgggttgaagtgagggggtcagggccttgcccctctccaccactcccccaaccaagaaatccctgggctgctctgtgcaacttgagggtctggaggaacccatctgaaaagcactggatcaggtgctcccttctaccactgcccccggtcacagtggtgccactctcactgggtcacagcagaggatcccccagccccaggcccaaggagtgtctgtgtgaccacacagtgaggccaaggatgagaaatcagcttttctcttttcccctggggaaacaggaaaggagatgggccttgggtacagcaag

SEQ ID NO: 394 - DNA, 4001 bp, Homo sapiens
cagccacatcttaggaaatagaaatcagctggaagaaaatatagcaactttcctttattttagccttcagaacataaacaaaaagaaaaatcattcattttccagttacttaggcaagagtttgagaatttgtttttttactaaataaagttaacggccattttaatggtttttttcaatcgattttatcaatgaaactttttatcaaaacaataagcagttcatgaaagtactaagaacaataaaaaaaattaagagggagaagcaaaggtcttagacaacatataagttggatatcaaagccctggaaagctgtgttttgctaccagttttgtttttttttctagctctcagttcttggaacacagcatcttgtattccactcccatttatcccaaaactactgaaaggagtcacatgcctctcaaccaacaaaggacaactgaccctgtctcaatatcctccattccaatctagtttgtcaggagtcaaagaactgtacccagagacacacaactgtaattgccctaaacaattcagccagcaactgaaatcattacatcaagatgctatagccaacagaatataaaaaggagcaatttagaaagatgattagaaaatgaggggaataaacataaagaagactggcaagctgaatgcttttccattccaaagtctaagatagagaacaatatagatgtagaccaagctaactgtgattagagcagattttggcccattaagggatcagctatcagccacctgtattgggccattggggcaaaagaacaaaaaaataaacccagaagtttacttttgaggaacagggaatcgaggtggggagtgaagaaaagccctggatgaaggttcctgcatggaggacttgcaggactattgtcctttccagaaaatgctgtatctttatctcttaaatacgtggagggcactcttcatgcccgaactacccagtcccttagtccccaaggaagctcttgtgtgacctcctcctgccccacctccaccactgctttcccgttgtcagaattccccacctcctccaaaaagccagagtccccgtgcactgtaccaaggctgggtctgagaatgataaccctgccttctcctctaggtcaggctcaaggacacgacccatgccttttatttctgggtcctcattacacagccgagccgggcacacaggcgcgttcaaataaatgtggaagggaggaccgggcgtagtggctcatgcttgtaatcctggcacttacagaggccaaggcgggaggatcccttgagcccaggggttccagaccagcctaggcaatatagggaggcctatctctatttaaaaaaagaaaaaaaaaaatgtggacgggaggaagaagagaggggaaagagaaatgctcgcgtaactaaccataggcaccccacgtcgccaaccagatcaaaactcaagcttacatctactcaataaaacaaaggaccagggcctgaatttcaataaggttggttacgggactgggaaggcggcttggaaatacctagtcatctccaattcttttacggaggaagaaaatgatcccctaaagtgtgagtccgtgaccgagtagggtctgggacactaatccgagaccagtttgaacccgagcagaagggcgcagacacccctacgaaccacatcccggggcggattctccagttcggtcgggtgggagggggcggtccccggcacctacagggccgggagagtgatcccagaggcctccccgcccagtacccgccggcaaaaagccagcggcacccccacgccgcccgccgcctaccgcccgccgccagggccaggatccggacccagtcaggacgctcaccttgctctcggggacgggaaaacgacctctcggagagtacagttctggcgcggcttcggcgggctggagcccagagtctaattcaaactgcccgcagccgccaccggtgcccaattcgcccgcttctggtctcaaccaaacttacctccacgcctattggtcactctaagtagctgcggaccaatccgcgcctgcgcactcagactgccgcgtctgattggccctttcggatggattttaaaaacaagccctctactggaggtgcctgcgccggagtttactgttcttttttgttgttgcggggagacggagaccacgtgcttttgctaatgctagacgcggttttggaccgctatttccgcaaaagtcagggaatgcgcccgctgattaggaaggcgtggtctatcgcctacagccaggggaactgtgctgcctggtgaaacctcttttaaactgcacgtaccaatctacttaattaaacgtaaatttaggacatagatactaggtgctgtgtttgtcatgcattctttatccggtgtcgttcttaacaattctttgaggaaagtattatcctcattttattaaaaagttaacaggctcatagaagctaagtacagtaatttgaaattgaatctacgcaatgcaggatgtcgctcttaaatgctgtcctttatggttcatatttctaagacgtgattctgaacacttattttccgggattaaggcgtggggggaggacactgcatcagaatttaaaattcagaagaatcctcaaaacggggtgtaatgcttttcgtgaagcccactagttttctatgtatgttatatactcgttttatttccctattaaactataaataagcttctaaaggcagaagcaaaacaattaattgttaaagtaatagatctctaatgctgttgtctgcctcaataggtaccaaactttccagccccctgactttacctttcattagactgttcctgcagtacccaattcaagtgtcactttttttataaaacctccctaatcccacccactccttagagataattatttcctagacctttcctggaacttgcaaacttcatgtttaggattttcgccgtgtcttgtcttgtatttatgtctacgtctgactcccccatcagactcaaaaattcctttacagtaaaatctgttttaattcatttttgcatccctagtaactttgcacatagtaatttaaaatccagatcatcttgggagataaaactgctatttggggaaaggccttgttcttactatcttctaccttcgaatccccaaagggaggggagagagcaggtaggggaggaaaacttttgtcagacattgccatgatcagtctagtgtctggtagttttagaatttgaaccaaattgtgtctggcttcaacacaaattacaattccattgcttcccagagtaattattcaactatgtataggctgtttaaggaaaaataaacagctagaaagacagataatagaggatatttttaaggtttgaataagaaatttgcatttactattcattcattcgttcttcagcagatatctattgagtggccactgtatagtcaagccttgtgcttcgtttttctacaatgaacaataaagaaatacattcatttcttgaacaagggaaataggatggataccattctagtaactcctgtgatatttctctgactttaattttatgcttcccttcccctccctttatttttcccccggttggtttgtttgttttgtagggggaggatcccgtccaaccaaagacagatgttctctaagggtccatttttggctctctgctcttctctttttaagtcctttccctcagttagccagtctactctctctggattgttcatccactacctcgatattctgcttgtggaccagtgtctttgagtcttcccatcttttctacagattagactgcaggttcatcactgaaatcactcttttgccagtgtcctcaactcccttgcctcttgttctatctcccaaacttgtatgtgtgcaaatgtccatatcatcccttggtgcactattgctgcagaatggggctggaaaaaaatcccagcactgtgcaaatactttaaatgta

SEQ ID NO: 395 - DNA, 4001 bp, Homo sapiens
gcctccagttactaataaatattttactagaaatcttcagcaatctctttcttccatctatcactacaaagaaactgtactttcgaagatcattgtttttgccaaaaccatggccaaatactttgttcatcaagtttgttcatccttactcctctaaactttctgggaccttgtttcctctgacattccattttttaggggcttttctcctccttactttttatagttccaatttatttactgattctttttttttcctcatgttccaatagtaggtggccccagattctgaaaatcattcattctacataggaaaataatcattctatatgactcctaaatctctgtcttcagaccattacagctgcaacccagtcctgcatttccaacctccgtcaaactcattaagttcaaaactaatcatcgcttcacatcttattcaatctttctttgccaactactgtactctgttttgctcagtaataattccattcttccttttcattttctttccccactaaaaaaactttcatcatcttttactcttccttcaacatcacctttacatctaaaaagttaactttgttaactttatcatcaaattctcacatatttcttttttgaagacagagtctcactctgtctcccaggctggagtgcagtggtgcaatcttggctcactgcaacctccacctcccaggttcaagtgattctcctgcctcagcctccccagtagctgggactacaggtatgcaccaacacgcctggctaatttttgtattttttggtagagatggggtttctccatgttggccaggctggtcttgaactcctgacctcaggtgatccgcctgccttggcctcccaaagtgctggattacaggcataagccaccacacctggcctctgacatatttcttaaaaagatatacacttgtcctcttagatgtgggcttcactttcattctcaattatagctacttatcttgttcccaatcttagcccctttccctaatccatcatcagtctttcattgtcaccacttttatcattaccttgcttgagatcccataacagttcccacacatctatatgaagtcaaatcagaattcctgtctggctttcaaggcactactgtatttgatcttattatctgatcctatccaggttcattttctactacttcagttcttccccaagatccatcgacattagcctttccaaaatccaacattctgcatacacttcctctaaggttttgtatacaacattggggggtggggggatgggagtgaagaaagttccagtagacaattctttaagaggttaaatgacagccctatacccaaacatgcaccccctactctagacagatgatcactctactgttctccctgcctttttattcaccttatcgccaattaaaaacacttctctactcccgtttgtctcagtaaatcttatccattttccatgtgccatctcctcagaagttttcctgagcttggcagggctagttctcttgacaattccacttgcagttgtggttcacagcacacaagtaaagctttgttgtttctcttgtgattagtccgtgaaggggctctgacttgatcacttttctacattgccaccaatacctaaatccaaccgccccaatgccaatacttagccagtgttaagcacgtagtgtttaaacacacctcaacacgcaagtattgtaagataatgaccacacaacagggcaaatacaaagttaaagcaggtccgggaccaatacaaagcatctttaccaataaaatgccgtgatgacgctgtcacccattccggattcacgaatcattcttcaaaagtccggctccaaaactatgtggagactgaaatcccctgaagaaaaaaaaaaaaaaccgccaaaatgacagctaagacagaggccagactaacccctggccctcccaaattccctctcgctccacaagtgggttcacaagagacacaaacgcacccaggaagacctccgctccctcagacgcggggcgggccctgcgacttcactctgggagggacatttccgctcacccagctctgcgaccctcgctcctgcggagtcagcttctgctcgcggagggggaagggcaaaaggacagtgcgtcccaacccgtccctctccagctgagcctgtcagagaccagcccagctctgaaatcaagccgttgagaaaagggaattcggccctccgccgcctcttcagtttaaaatcgtttcccgactcgctctgcggccccacgcaggaagcctccttggcgcctcgccgattccgtatcagtgaagcaactaaaattgccattttaactgagggcaaggccgagccacttaaccactatcgtcaacctttccaatcgtgctcggttgctcctcagttttcctaccggtgcgaagctttctctcaaatttccgcccgtagtaggcatggcggcggcacctcaccactgattcgttgaattccttcccggtaatcttgggcactagcgggcggagttgaagggcgcttggaccccagcggcgatctgtgtttgggttcgcgctctgggagaattttggctttgctcgccttcctctttcagaagactcgaaatcggccagcaggtctgcgagatttgaaacgcgactgttactccttgttttccggttctggccgcgggagcctctcgagaagcgtggaaagaggagaagggcgtataccttgtgaccgcctctggttgtcttgggctcgcgcctggcgccgctacgtggagtcgctctctcgtcgtcacttttggctgccgacttgttgagtagaagtgcagactgatgctttaagactcagggagaggtctttcccttatctccaccccagcaagcaccccagagaccttggagatttgtcttgtttctagacacgtgtactccaatgttgtgcggaggaggccttaaatattcgagaagagagtgggaactcctggaattttaagggatttctgtgtatttccaaaactgacttttaactaccggcagcgtgggatttcgtgattgtttttcgccatcgtgtggctccaacatgtacttcccttcttggttaagtcagctgtacaggggtttatccagacccatcagaaggaccacccaaccgatctggggttctctctacagaagtctgttgcagagttcacagaggagaattccaggtgaaaatagcgaagagatctatcctatgaacagtacttcagcctgttatctacggccggagagcttttattccatttttcattttttcccccattattattattattattattattattattattatttgagacggagtctcgctctgctgcccaggctagagtgaagtggcgcgatctccgctcactgcaagctccgcctcccgggttcacgccattctcctgcctcagcctcccgagtagctgggactacaggcgcccgcgaccacgcccggctaatttttctgtatttttggtagagccggggtttcactgtgttagccaggatggtctcgatctcctgacctcgtgatccacccgcctccgcctcccatagtgctgggattacaggcgtgagccaccgcgcccggcttttcccctgttcttaactggatagccttatgtgtagaagcgaaattcactctcattatattcattatacggcagttttttttccctgagtttttagaaagaccacaaaaaggtaaccacgtaatatatagaatactctgcttttggttgatgccttaaaaaaatccttcttcggccgggcgcggtggctcacgtcgttaatcccagcactttgggaggtcgaggagggcggatcacgaggtcaggagatcgagaccatcctggctaacacggtgaaaccccgtctctactaaaaataaaaaaaaaattagccgggcgtggtggcgggcgcctgtagtccccgctgctggggaggccgaggcagga

SEQ ID NO: 396 - DNA, 4001 bp, Homo sapiens
tctttccccactaaaaaaactttcatcatcttttactcttccttcaacatcacctttacatctaaaaagttaactttgttaactttatcatcaaattctcacatatttcttttttgaagacagagtctcactctgtctcccaggctggagtgcagtggtgcaatcttggctcactgcaacctccacctcccaggttcaagtgattctcctgcctcagcctccccagtagctgggactacaggtatgcaccaacacgcctggctaatttttgtattttttggtagagatggggtttctccatgttggccaggctggtcttgaactcctgacctcaggtgatccgcctgccttggcctcccaaagtgctggattacaggcataagccaccacacctggcctctgacatatttcttaaaaagatatacacttgtcctcttagatgtgggcttcactttcattctcaattatagctacttatcttgttcccaatcttagcccctttccctaatccatcatcagtctttcattgtcaccacttttatcattaccttgcttgagatcccataacagttcccacacatctatatgaagtcaaatcagaattcctgtctggctttcaaggcactactgtatttgatcttattatctgatcctatccaggttcattttctactacttcagttcttccccaagatccatcgacattagcctttccaaaatccaacattctgcatacacttcctctaaggttttgtatacaacattggggggtggggggatgggagtgaagaaagttccagtagacaattctttaagaggttaaatgacagccctatacccaaacatgcaccccctactctagacagatgatcactctactgttctccctgcctttttattcaccttatcgccaattaaaaacacttctctactcccgtttgtctcagtaaatcttatccattttccatgtgccatctcctcagaagttttcctgagcttggcagggctagttctcttgacaattccacttgcagttgtggttcacagcacacaagtaaagctttgttgtttctcttgtgattagtccgtgaaggggctctgacttgatcacttttctacattgccaccaatacctaaatccaaccgccccaatgccaatacttagccagtgttaagcacgtagtgtttaaacacacctcaacacgcaagtattgtaagataatgaccacacaacagggcaaatacaaagttaaagcaggtccgggaccaatacaaagcatctttaccaataaaatgccgtgatgacgctgtcacccattccggattcacgaatcattcttcaaaagtccggctccaaaactatgtggagactgaaatcccctgaagaaaaaaaaaaaaaaccgccaaaatgacagctaagacagaggccagactaacccctggccctcccaaattccctctcgctccacaagtgggttcacaagagacacaaacgcacccaggaagacctccgctccctcagacgcggggcgggccctgcgacttcactctgggagggacatttccgctcacccagctctgcgaccctcgctcctgcggagtcagcttctgctcgcggagggggaagggcaaaaggacagtgcgtcccaacccgtccctctccagctgagcctgtcagagaccagcccagctctgaaatcaagccgttgagaaaagggaattcggccctccgccgcctcttcagtttaaaatcgtttcccgactcgctctgcggccccacgcaggaagcctccttggcgcctcgccgattccgtatcagtgaagcaactaaaattgccattttaactgagggcaaggccgagccacttaaccactatcgtcaacctttccaatcgtgctcggttgctcctcagttttcctaccggtgcgaagctttctctcaaatttccgcccgtagtaggcatggcggcggcacctcaccactgattcgttgaattccttcccggtaatcttgggcactagcgggcggagttgaagggcgcttggaccccagcggcgatctgtgtttgggttcgcgctctgggagaattttggctttgctcgccttcctctttcagaagactcgaaatcggccagcaggtctgcgagatttgaaacgcgactgttactccttgttttccggttctggccgcgggagcctctcgagaagcgtggaaagaggagaagggcgtataccttgtgaccgcctctggttgtcttgggctcgcgcctggcgccgctacgtggagtcgctctctcgtcgtcacttttggctgccgacttgttgagtagaagtgcagactgatgctttaagactcagggagaggtctttcccttatctccaccccagcaagcaccccagagaccttggagatttgtcttgtttctagacacgtgtactccaatgttgtgcggaggaggccttaaatattcgagaagagagtgggaactcctggaattttaagggatttctgtgtatttccaaaactgacttttaactaccggcagcgtgggatttcgtgattgtttttcgccatcgtgtggctccaacatgtacttcccttcttggttaagtcagctgtacaggggtttatccagacccatcagaaggaccacccaaccgatctggggttctctctacagaagtctgttgcagagttcacagaggagaattccaggtgaaaatagcgaagagatctatcctatgaacagtacttcagcctgttatctacggccggagagcttttattccatttttcattttttcccccattattattattattattattattattattattatttgagacggagtctcgctctgctgcccaggctagagtgaagtggcgcgatctccgctcactgcaagctccgcctcccgggttcacgccattctcctgcctcagcctcccgagtagctgggactacaggcgcccgcgaccacgcccggctaatttttctgtatttttggtagagccggggtttcactgtgttagccaggatggtctcgatctcctgacctcgtgatccacccgcctccgcctcccatagtgctgggattacaggcgtgagccaccgcgcccggcttttcccctgttcttaactggatagccttatgtgtagaagcgaaattcactctcattatattcattatacggcagttttttttccctgagtttttagaaagaccacaaaaaggtaaccacgtaatatatagaatactctgcttttggttgatgccttaaaaaaatccttcttcggccgggcgcggtggctcacgtcgttaatcccagcactttgggaggtcgaggagggcggatcacgaggtcaggagatcgagaccatcctggctaacacggtgaaaccccgtctctactaaaaataaaaaaaaaattagccgggcgtggtggcgggcgcctgtagtccccgctgctggggaggccgaggcaggagaatggcgtgaacctcggaggcggagcttgcagtgagccgagatcgcgccactgcactccagcctgggcgacagagcgagactccatctcaaaaaaaaaaaaaaatcatttttcacagaattataatagtgttttctagtgtacaagtggctgttaaacactagattcatactaaagctaaatagttcctacaccgtccatttctgcagtttctaaaatcctatttcatttgaggaagaaatgtgcaatattaagaattgggtaattaggattttaggtcaatgcaaatgctagaagatcaaaaaaattttgatttcctaacacaagacagaaatttacattcagttattcacttggcttttgacacatttgcaggtaaatttaatagtgaatgaattaaattacatactctgacttattttattttataaatttcccctgtagccctgacatacctaagatatattttgagaattttcatttttaagcaacctgcaagtgatgtat

SEQ ID NO: 397 - DNA, 4001 bp, Homo sapiens
tgcagtggcgtgatcatagctcactgtaaccatgaactctcgggctcaaatgatcctcttgtctcagcctcctgagcagctaggactacaggcacatgccaccatgcacagctactttttttttttttttttgtagggatggggtttcactgtgttgtctaggctggtcttgaactcctcccaccttagtgtcccaaagtgttgggattacaggcgtgagccgccgagcctggctagtctctgaacctaaccaacactctctgttacggctcgaagacataaatataggaccttttcagtcaaacagaagggtgtttccagtatgctatactgcccccaacaaatctaaaacaaagtactggcatttaagaaccagctaagagaaatgcacagggactgtggaggcaatgctattacctcagtctggtatttgaaaaggattccttttttagtctaccccctcccaaagaccttccagttgtaccctagggtcccctctgtgtaaaccttcaagtgttacataagatacttggaatgtcactgaaggatgccacttttaggctctataaaaatcaccattaacaatttgggaagaagcaaagctctgttgaacatccagttattggctggtcttcctcaccagaggcatgagggatccctgttgtcccaggggcagccatcgacatcccgacaaatgccagagtacatctctccccaggcagcgatgactccatggcggtctcatccctcactacacttttcctagtgctggcatggtaaaaggcaattaactataaattaaacggaaactcagtgtagcaacttccattttgttacaagactaggaaacaaaacttgtctctgattttctttttaagaagacttttaagtgtgactgcgcgcggtggctcatgcctgtaatcccagcacttcgggaggccgaggagggcgtattacttgaggtcaggagttcgagaccagcctggccaacatggtgaaaccccgtctctactaaaaataaaaaaattagtcgggctactcgggaggctgaggcaggagaatcgcttgaacccgggaggcggaggctgcagtgagctgagatcgtgccattgcactccagcctgggcgacagagcgagaccgtctcaaaggcttatgggtttctgatcaagtcatcttagcgactgaaagggcttcagagaaatctgaacttaagtgcaaacaaaacaaaacaaactccaaaacaaaaaacaaccaaccatcagactttaatctctatagggacagagcaattttcctcaaacttttgctcagcagaacacatctgaaactggccccctatgtgctacgcatccagaagaggaaaagccggatctgaaaacaatattccacgctaaatgggccgtcccggccggggcaggcggtcccagcacccgtgctgagctccccggcatacggcacgacggggccgcgccggctcttcggcgacagcaaggccggcatctaactccacaccgtccgcgcttgcaccgcgcacccaggcttcgtacccagctcccaggtggggaccgcgcccccgcggcgcccgcgccccgcgccccgcgccccgctccccactccggccctgggccggcgccgcagcggcccggaaggtacctgcttagagggaagggccccgactggcgctgccgcggccccggtggagagggcggctgggtcggagcggtgccgcggcccggggaggcggccaggcggcgcctcagcacccggaccccaggggcgtgcgggacccggctctcgtggacttcctcggcagccgccgcttcctcagacggaactcggggggcgccccttccgccgccccaggccgccttgcaccccaagctgctgcggcagtgacagggaagaagcagacccggccacctctgcccatagccccggccgcagcctccactctcatgacaaccaagcccagccctgggccagggcctctgcgcgtgcgcgaccccgccccaccccaggccgcgcctgcgcacaaggggagggctccgctactctggccctcagggttgtgtagtttccggggccacggcacctgggcacaccaggtggcgtcgcgcctttgctttcctgagccttctgagtaaggtaatgtggtgtccgtggggcgacgcctgcgcacaagaccgcgtcgggcctcacttttcccaggccttctgggtaatgtagtttccgggatcggcacccggcctgtgccagcttgcagagctcaccaggtgcagacccctgcggccagggcgaggacggatctgagcagctgggcagcaggtgccaccgcctgtgggacccagagggcttgaggacatctgcaatgctccagaagcccaagagcgtgaagctgcgggccctgcgcagcccgaggaagttcggcgtggctggccggagctgccaggaggtgctgcgcaagggctgtctccgcttccaggtgcccgctgggctaggcggggacggcccgtcggggaggcgtgtggggagaataggaggtgccgcttttcctcttccaaaacggagggtgcaggcggcgcccggggcgggtagttttcgttcgcctcagccgctaggaccccgggcccccgcagcctggggttcctgagcgtggcttcagaacgcaggggggttgggggacgacctggatcaccccttccctcttcccacctctcgggcaggacagccctgcatcagagctaggagacccgggtagagtgccaggtactggcacgcggggtcacggctgctctgcctgtccggcctcagcttccccttgagtaacatgaaaggcttggctaggtgggctctgcaggccccttccagccctcgcagctggggattgcaatcgtcaccttattctaggttggttttctttttagaccagtactagggttaccaggtgtgcattgccggggtcggtgcgggtggggtgggagtagccataaaatgcctaaaactgaccagtgcagagtaacagggaaccggactccaacaaattaacagtgccacgtgccggtcacacttgtgcacagaggcaaccaaccgttctccttcgtgtgccagcaccgctctggcggctgtgtgctggggatggtggtgttcagctcctggcagcagggaggcggcgctgtcaaagacaggctctatttgaagcgccctcaggagctcatttaaaaagggtgaatcctgcagagccagcagtcaccccctgatgtatgtttttcctgactcttcgtattttagaacggcccgcagtcaggcgcccttgctcccgctccctcatccttgcctgggcgttggagcgactgtggcatacaggcggcagcctgagcctgcttctttaagcacagctcattccggtcgtttgtgaggcctgcagatgcaaagccctcgtcttgagacccttcctcctcctgttgcttctcccgtccctgcagctccctgagcgcggttcccggctgtgcctgtacgaggatggcacggagctgacggaagattacttccccagtgttcccgacaacgccgagctggtgctgctcaccttgggccaggcctggcagggctgtgagtggcaaggactttggaggtgggcgggaagctggcactctccgaggtcctgggggcttagctccaggtgcccatcagggtggggaagagtcccccttactgtgaactctcgggtctcaaggaggaagccctctggaggcagaactggtcagcgtcgcttaggtggcagagtcctcagtcctctcgttcatgaacccagctgttcaattggtcgtctttttcttcaaaaaatcttttaattttatttgcgttcatttgaggtgtcctagcaattcccaagagcagagggagggctttggggttggggcctgcacagtttcatggggaaggtggagccaggaagagatgctgttctgttctgctgggctgagcacccttctggaagga

SEQ ID NO: 398 - DNA, 4001 bp, Homo sapiens
tttggctctgccttcgattaactgtctggcttgggcagacaagtcagttaactttctgagttttagtgtcttcctctgtcaagtgcacttgggctcttccgtgttatctacaaagttaggaagagctaaaggcagccctagttttactttttaaaaaataataacagaaaaatacataagttgctattcatcagtgtactgtttccagagctgaattcctaagtctctgaagcatacccagttagggttataccagtgaagatccagatactatagtcataatgtcactctctcctctcccattattcctccacctgctcctccccatcctgctttattctctcttctggtgtgttttaagaagcaacgccagcaaacggctgcatacattgtaagcttaaggattaaatcattttaaaatatgcattttcaatcaaatgtatcatctgcttcgccaaattcctcccaaatggctgaattttcattaagagaataaaaatgagttaacaacttcggtaacagaaatgtactgggccagttgttttgtttgttttacttgcttaaaaaataaacggaaagatgtatccattccctcaggaacataaatgcattacctgcccaatgaaaaaacaattctgcttgttcatttccctgacacaacagcttcgttgtcaggccctctctagcccaggctccaacgtcacctagtaattttatattgatcaccttggcagtgcttggactccagcaggcatagtccctgtcttccttacattcctcaaaataaataaataaataaataaataaataaataaaactctacgaaacaccaccgaacagagattctgtgacttagtatacaaatcccacgtcttcccgccctgtgttaggcagctgcaaatgttattttttcatcgcttgcataaaatggaagcgaaacgtaccaaaaccctacatctgaatcctaggacaatgaagccgacaggaagccactctctcctcccccgggtttactacagagccagagcctccacggggtgcagtcgccaggcagggtgcatgacaccgcgtcttccacgccctcccaacgcgtccaaaaggttgctcgcctgacctcgccaaccgcctcacaccccaaaaccaatcacacaaaagggattggcccggggagctgctccaatgggggaaaaatcccttccccagcggcagcgcagccattccctccaatgctccgcccgcacccctcgcaaactgctacggcggaggggggagggctgcacaaagccagtcgaaagctgaaaatgattcaatgcacttaggggatgcggaggcggcagcaaggggctcgggaaagccggggggccgcaggactggagctccggggggcggcgggtgggggatgggaagggtggtcccgtcaagccccgggtcccaggcgggcagagggtgggggtggcggcgccgcgcggagcacccgggaagcgcccccttcgcggtccagccccgcacccccgccccgcggcgggcggcgcccgagtcctcgccgcaaacccgaggagcaggatgtggaaagcagccgcggcggtggctgcggctgcggcgcctacaccgagcagccgatcgcatcacttaccccttaccgtggagagagggaccggacgggggaggcggggcgcgtcgcgtcccgtgagtctctcgcacgccgtcctccccccacctcgtcgtcgtcgtcgtcgccgctgttgtcgtcgctgccgctgcggtcgagctccggggccctcagctccgctgggcaataacgttattccacacacgccccacacatagcggtaacggcaaagaccgactgcctagtgcgcaggcgcctcgggaaagggcgaggagccggaccctatcccctcctgcccagttccaacgatcccttactgcgcaggcgccacacacagacaatgaaaaggggttgtgcgagggtctcacccacacgcttttccagcttgcccactgcgcaggcgtgccccgaaagaccagcttgaacaatgaagaggacctcggcgttaggtgggaccgcaaccaacaaggactacagttcccagcgggcagagcgccaactccaagtgaaggtccggttgctgggcatgctaggagttgtagtgtcggccgcctttacaatctaggctgtttggaagatttagagcttctatttcttgaagatttattcgaccgttttaaaaaatctcgcaactgaagcagggttcagagtttactatctgcgtccttgagtagcctggggatcaactgctgcatattagcaaatttcgaagcgtcaaggccttcagtgagccctttctgtcatttgggtggtccaggcagctgaagagtgggatggaggcgggactaaaccaggctgggctggaggaaaagggcggggcctgcaagcctgtctcttggcagcaggctctggcagccaaaccgtccaagctagcgcctggagcgcagtggtttctgggaattgtagtgtaactggaaggccctgaggattgtcgagcttgcaggttctgaacgtgaggactacaactcccgacgtgcaaagcgagggccagtgggtgggaagagcccccaagagctctgtgcgggattctaggctcccctgtgacagccgcggcaggaagcaggcgggcgctccccggccacaggcctgttgttctcggaagggagaaagctggacatttccccacgtaactcccagctctgggcctagagtgcgtgcatggcgaagtccccggagaactctaccctggaggagattctggggcagtatcaacggagtctccggggtgagttgctccaaacctctgtccctagccccgaggtgcccagggcctagtgggcgggagcagaccaggtgcgtttcctaacacctgggttctgccccgtccacgctacagaggagcaagatggatgttgctgtggtcttgaggaggatgaaatagtttgatttagtttttacagttaagcaacgatgtttcctcagattcccgtagttacctcaatcaactccttgatcttaacttggcatctttctcaaccggcgacagcagaaactcttggatagctctatgccatttttgttcagttcccatacgttgctatttaatccaataaaagtctgattcacagtttttacacatttaaattatggcacagtggattgaatgtgatttatgggatcagtggggggaaacactaataattattttaatcacaagagcccccttttaattgatttaggctatttacatacagtaaatcatctgcagcttacaccaatcgtgtgaatattttacacatggggaaagcgaagctcagagaggttgaattacaggccagagcccacacagctggttagttgcagagccaggtattatcaggcttgccttcaaagcctatgtttgtatttactaatcaagccataattactattatcaaaaccttattaatttagattttcttaccacattaccatatgagcaagtatctgtacaaataatgtctgtatttattttcctttaagctctgttggacttaatgtctgtacttttagatggcgctgtcaacttggacagcatatataacatctagaaatttcgattctgttataatggaagttatggaattgtccatagggttattgtggggagcaaatgaaataatccccataaagcagtgattttaagacttcttaaaatgtttacctatagtaagaaataaattttatatgggacatatgtgtacatataaactataagtttcactgaagaatttttattctactaaatgtaataaactctgctttctattctgttgcattttcataagcctctaggtcatgactgtttgcgacattgagaatactaagttatgaagcatgtgttgttctgcataatatgcctactatgtgtcagtgcctcctactatgtgttaagcatactaggtgctaggca

SEQ ID NO: 399 - DNA, 4001 bp, Homo sapiens
tcacaagatcactgtgaaaactaaataaaataatgtatatagaagcacaccaaaaactgatgtcagttattttagacttcttttttgctcccactataaattatagcaatttaacaaataaaattgattatagcagtacttcatctcctttcttctgctcatatatggtagaagtgttataaaatgggcaaaagactgacaatcagaagcagaaggaaaaaatccaaaaactttataattcataaattgattgccccacagaaggttggctgtttaagtattaacgctcttacatgacacacacaccaatttatctcagaaaatcaaagaaatatgttcacatacgtatgaaattttttacatatacaacttgccatctctacatacacaaaattttgctactgaggatgaagagatacagagatacacatgtatttatccacatatacaatgtattctagcttgaagtttattttcagattacagtatcttaaatttaatgcactgacagttcaaatgattcagatttatttcattacattaaataaaatttgtcaatttagcacaccgaaactaattattatacgcccatggctttgaagcaacttccagcatgggtctaacaatccctcaaagtcacaattccatgtcattagcagtgcatttccttgtttaaaaacaatatattaaacgaagaaattttcagaatggagggcaacttttagtattttatcattgtttctacagaacttttcagattgttactagctctgccaaagatagtctttcttttaaaactcttcaaatacagggcaggaggtatcgttaacatggcaacaataacgacttccccaaattcaaaacaaggatcaccatcaaaacaaaacaatcaggtggagtacatggatattgatcactatttctgacaacctgttttttcccatatgaaggatttgctactgcattaaaacattaaaatctatgcctatgtgcaactttctatctgaatatttaaaatccaggcaaattccaattcatatcttgtgacattagctaaatattacttagcatgttgagctgcatttaaaaggcagaggaaaatactgacaacttccaaaacataaagccttttaaatctttccccaaattatctgtgaataaactaccttcagcagccgctagactagagtagatcaaagttttccctatacttgagaatgtgatccccactgaaaaggaacagaaactgatcatccctgccactggagccagtccccggaatctccccaaatacgcctgatcgccagatgaagaagggacacttctccgggcagcaaaggctagaggtatcttacctctgcaggctagaggaggggtggaggaggcgggaggacactggcacgtaaggaaggaaattccgtcttcagcaggcactggtgggacccgaaacctaggtccccgaaaagcctcagaacccagggaggttccccgagggggacgccaagcagggccaagactctccgcgcccggccccgcctctcttgccgccaccggggacccgggaccgcggacagagacagttgaggctgagcgagactccgcggtcccagccaggtcctacaggagctcacctgagagtgtcgcctccgccctcggctaccacggtgcatcccgcggagcctggcggagggtgcagtgacgccgccccgaccggccccagggctgcccggcctggcctccccgctccggggacgcaccgggtgccctcctcgcaccggctccggggatccgccggtccgctgggaaggaagacaaggcggaaaggctgcctcccctccctcagggcaagccaccccccgagctgcggctccctgcagttctctctggcgcaggtctggccccgctccccggcccgggagtcacttcgtcaggggcggcccagtcgccattacagcccaacaactgacacggaggaggagcggcgccagcggcagcggctgtggcggcggcgcgaggcagggcgggagcagtcgggcccaggcaaacctcgcgagaactgtcccgagacagtgccacaggcatgccaaccttcggttagggccatgttgagtgtggccgaaaggtgggagcgaaataaaacaaggagcagaaccgcgaagaagccatgtttggtgcgtcgaagtttaaactcgtaggacttgggaggagccaaggtatatccgcagaagagaccacccctgccctttcgctttgacgctcattgggccttttggctgcgcatttcaccccgggctgagaaaacaagctggggattcgacaagaatgaactcaaagtctggaaacggcagcttctgagagtttacaatgtttcaccaactgtcgtccaaataagtcgtcacccctgtcagagtagttgcagctctgccgttacccactgctgtcactgtggccgttttattcgcgagggttacagttctgtttagcatgcatctaatgacttaagactccacgcaagtaaaacggagtttcctcccattaagtattggctttgctttaacagtgctttgagaggctctctgtggccaacatatcttctcatatctttgtcctcgtttcccaatctccgcgtggtgaaatcatctatcaagacttggcttaaaggacctctcttctgcaaataatgccatcttccgctaggtgctcactgcacacagactcgccgcccaccacttctgtccaccttctgaactccgatagttatttacccagagactgtttctcatctttaagtgtcgtgaagactttaagatctgttttatctctctataccccaaaatggcctagcacagtaactaggacattgtaggtgctcaataaatgtttgtcgaatatcaatgacagcaggaggcagtaaatggtccctctttgtagggcctacagctgtgcctgagtaggatgtacagaagtcctgcatacgtgtgaagtgtctccaggaagctgcactggaggggacaggaaatgtgggtaatcgtatggtgcaagtggtagcaaaaaagacaacataaggaaaatgttatttaggttttgcccagtcttgctgtttaaagccctgtgttagatgcttttcatgcgctattttactgaatgtaaacaaccaccttattaaatatactcacttttttaaaacgaagaaacacgtactggccggtcacagtggctcacgcctgtaatctcagcactttgcggggccgaggcgggtggatcacgaggtcaggagtacaagaccagcctggccaagatggtgaaaccccgtctctactaaaaatacaaaaattagccgggcgtggtggcgggtgcctgtaatcccagctactcgggaggcggaggcaggagtatcgcttgaacctgcgaggcggaggttgcagtgagccgggatcgcaccactgcactccagcctgggcaacagagtgagactccatctcaaaaaaataaaaaaaaagaaagaaagaaagaaaaagaaacaagtactgaaaaagctaagtaatttgcccaattttataccatcaataaaagggagctgtaagctttgggatctgctttgccccaaagcctgtttatactttttcagccccatgctatccccttgacaacagagaagacaccaaagttctgtcactgtgctcagagcagggttaccctggtatcagcctatgcacaatttctacttcttataccttgtgttggtctgtcttctcctcgcctcctaaattccccaagcacatcaatgtctttcttttctaatatcccgttactcttgtgtttaccctacagattggccctgaatctatcaagttttgtactagttgcatatagtttcatgagagtaattaatctctggaacaagattggaggtttactgtggaaaggtttgtggcccttcccagacgtctccgcagtgttaggccggtaataggtattcaatatggctcccttgtttctcc

SEQ ID NO: 400 - DNA, 4001 bp, Homo sapiens
ggatgactatctaaatacaaattactatgcagggtgacttctccgaaaagaaagaaaagctcttggtaacaaatcctagatagcccaaagccaagaattcacgtatccctcctaatacacaatcttctctttcctcccagcctaccctccgttacagcctggacaccctcagtcaccttttggagcgaatcgtatcgcttctgccaggactccatttccacttctggaccttctccactggtctcctccacagactgtttatcttgcaggctgaaagacagtggcctcttcaagaactctgaagttagacacaagtggctttgattcttggttctgctacttattgcacattttgaggcaagacacttagtccaagcagtagctggggataatacttgggtctgctgtaatatatggggtgccacacaaaagctgctcagtgtatgttaattctcttccctaagggccagaatctatacaatgtgacaccaattctctacctgcccaaggctcttgtgtattttgttttgatatttaaaaaatacatatttatcacatgtatttagattgtaagtcatacatgtacattgtagaaagtttggaaaatacaaaagctgttttcttggcacacacagtctggggcaaagccaactttgtcctctaaccccacttctgactctaaccaatggtttcctccagtgggtccctacaattacttatagcaaagcccatctgctgagataaacaacagggacactgtggttaaatatgggatgagaaatccaatctatcccattagaaactggatttggtccaagaggctgttgaaacacaccattattttcagaaactgctattaatatggagaaggctcccaagacatcctgagagtacattatggcatcttgttttgttctcagaacctgtcatggcaatggagaacaatccctagggctgaggagaaaggctcctggtagcctttagcctacacagctcgaactgtggataactctcagttcttatcaccagtacccacttttgaaagtatacagacacctcatttcccagtttacaaagtgctttcatttattcaacacatacatactaagaattatgtgccaggcactgggttagatccttacaaaggctatgaagataagcccccactgcatccatactccatgccaaagatataaaagccgcttcctggccgggcgcggtggctcacacctgtaatcccagcactttgggaggccaaggagggtggatcacgaggtcaggagatcgagaccacggtgaaaccccgtctctactaaaaatacaaaaaagattagccaggcgcagtggcgggcgcctgtagtcccagctactcaggaggctgaggcaggagaatggtgtgaacctgggaggcggagcttgcagtgagccaagattgcaccactgcactccagcctgggcgacagagcaagactccgtctcaaaaaaaaaaaaaaaaaaaaaagccgcttcccataagcagctttcctattattcacagtccaaagaaaacaaagctcagataagtaaaatgattttcccaaatcacccaaagtcacacaggtaagtgagcaggatggctatgacaaaaaacttaactctccactcctctcagtcccacagggttatttacctatgtccagcggaggagaattctgcttctctctgcctcaggctttccagttgaatctccttctctctgcagattgcctgggtctcctccagcaaactctccagctcagtcactttctcctgcagctctgtgctcttcaactcagaatccttaagctgagagacaggatcccatgtttaggtcaaataagccaagtgttataaatgcaaaatgcttgttcctcggtgtcacaaagaaatagcactcaaacctatatttaatttcctcagcaaggcaatttttactttctgcagaaagggtgctcctcgcagatggaacaatggtgagaacacaactggacaggggaggggaaggagttcttatttctgacgcaggtagtccctactgctatgtcgttcccctattggctagggttgaaccacacagtctaagctaattctgattggctattttaaagggaacaggtttatgagccagagtggtggggtgagtagtttggtgggaaggacagttaggaacaggtaattaaaggtgacttaggtcagagcaggtgaccagggtgactcaggtcaaagcaggtgaccgggatgagtcaggacggagtaggtgaccgggggaacagatgtgaactactgattaaaactggtggaaaaggttgtttactgaaactagaagcaagagggcgaagagaaccaggaagttaaactttaaaatagtgaatcaaagagtaagagacctgaacttactgattctttgaagagaaacttggggttcactttaacataaggaagactctgtctgggtacctcaaaaaatttgcagtctggttacaaatctgacaattatgaatctggacatgactgctttgggattctcctttcagcaagtcacaggataactgcatacagcagatgatgaaaaagttcccctgcctggccactccctgatcaccccaggcatgccaagacattgctgctacctgctggctctgcttctgatggtcttccagtgtgggcaggtcagccaggtagcgctccaaggtctcaatacgctgctgcttctcccggttctgctctgattccttctggcatttctttttcaaattattgatatgtttatcacgacctttgacctaggaaaataaatgtcaagtctgtctccaccattcactccactatgaccctgctggagtgcagtgctgtgatctcagctgactgcagcctccacctcccaggctcaagtgatcctcctacctcagcccctggagtagctgggactgcaggcacacactaccacggcaggctaatttttctatgttttgtagagacagagtttcgccatgtttttcaggctggtctccaattcctggcctcaagccatccgcccaccttggcctcccaaactgctgggattacaggcatgggccaccacacccagccacatcaactttttttgaagcaacccttgaggctgtgaatgttgttctactgcaatgaaggtaggaagctaaacaaattttgccatttaggatttgagtataaaactaaagaattaatgaactttcaaatcaaggacggagaaagtcttctagggcagtttttaaaaactggcagcatttctgttgtaaaatacagaatttgtctggtctctgtacctggttcctgggaggcctgtaacctctaagcccttggaatttcctgaattggacaggagtgggccagatcccatcatgagtaaatttatgccaatactatgactcagaatggatgcagatcaccagaaaaatcaactgctttaagcctaatctactatggggaaggcagagggacgggtgattgagttcaatcatgcctacatagataaaactccaactaaaaactctggacacagcagctcactggagcttcctggtaggtaaacacataaatgtgctgtgtttacatgctcttattccacaaggagagggcatggaagctctgctctcaggatgctcctggacctcaccctatgtcatttggctggtcctgaattgtatcccacccccctttttttgagacagtttcgctcttgttgcccaggctggaatgcaatggtgcaatcttggctcactgcgaccttcgcctcctgggttcaagagagtctcctgcctcagtttcccgagtagctgggattacaggcacccgccaccatgcccagctaatttttctatttttagtacagatgggatttcaccatgttggccaggctggtctcgaacccctgacttcaggtgatccacctgcctcggcctcccaaagtgctgggattacaggcatgagccactgcacccagc

SEQ ID NO: 401 - DNA, 4001 bp, Homo sapiens
ggcttcaaagccaggactgtactctaacgctacagtagtctagtcagcattctacatgtgacaaaacacaaaaaaagagatcaagcatggcaccacaagttggagtttctgcctcagacagctagagctgcaagcctcaattatatgagcagtaaaagctcataaaatttcttcactttgtccttggtcatcacctaggctttatttctcaagttgctacccaagaattagattttgactgccgtaagtatttttcccctataagaattacaatctaagtgtggccgggcgtggtggctcacgcctgtaatcccagcattttgggaggccgaggcgggcggatcacctgaggtcgggagtttgagaccagcctgaccaacatggagaaacgccgtctctactaaaaatacaaaattatccgtgcatggtggcgcatgcctgtaatcccagctactcgggaggctgaggcaggagaatcgcttgaacctgggaggcggaggttgcggtgagccgacatcgcgccacggcactccagcctgggcaacaagagcaaaactccgtctcacaaaaaaaaaaaaaaaaaaaagaattacaatctaagtgtggaacatcatgcttggcagctgttaagagaaccacatcaagacaagagaggatttgaagggatacacagacagctgacacagacacacgaaggatctcacaccattacactattttcaccgccttgatcattcattaaaccttgtgaaagagaagccaaatccttgacaagaagttgcctttacaaagaaaagtcgtgagacatacaaaaccaccagatcactataaagcagacaaggtttgagggcaaataaatgaggcctggctagcttcatcgtccttgtatcaccaccgccccctacttatcccagtgttcaattcatcaaccgaaatttactgcgtgcctactatgcgcctggctctgagccacgtgttgggaatgtactggtgtaaaggatcgctctcattaactgaggtgaagtaagcgttgaatatactgttgaacaaataaacctgaacacactaactttcagttcaaccaaagcaccagctccttctcgctgaaggaagcttcctcaccttccgccctactgacattttgggggatttttctttgttgttgggggcgtcctacacacagtaggctgtgtaacagcatccctggcttcttcgcactagatgccagtagcaagccctggagctgtgactatcaaaagtgtttccagacatcgaccaatgtccccagggaagcaaaatcgccccggccgagaagtaccggggtaaggccccgccaagtgctttccgtcccacaaccttaattctctacacagccttccaatctcggctcaaacttctcctcctcggggagggctccctgacctctccgactagatccgcgccttctgttttgcgctctttgtaagatttctccactctaccctcactgcgcgccgagggattaccccgcttaacgtcgactcccagggctgtgcgctccgcaagggcaaggaatgcgccgctcgctgtgtccctggctatcggcacagggcctggcacgcaggtaaagtgactgccgtggggtgaaccacggacggcaaagcaaggcaacgggggaagcgaggggaatgggacgcgagagggcgtatgccggggcactggcttcggagccgaggcgcatgcgcttcgctctccccggcccctcacggtggcaggtcgcgagcgtctgaggcttcgccggagctatgggaggagaggcaaggtcggccactaggactgaggctcccgaaggaggaaaacttacacgggcctgaaagcgggcggcgaaatccctcactcgggaagactgactgcagccaccacgtctgcggtgagcggtggttccctccctcagctcctctaacggccgttgcacgcccgccaggccgcgcgccacagaacgcgcgtcgtttggccccaccccgttctgccgcctctggccaatcgggagtcgagccgcgccggcttcccgcccctttctatcctcttctgaccaatcggcagccgagccgcgtcggtatcccgcccccacacgctaccctctgctcagagagccggacggatctttctgcgcatgaccacgtcgccacttggctccttctctgccccttgccgcgttttacctgtaggtggagctctgctcacctagacctggaggggccctgctgggcctgtgcaggttgggaagctggcggcccgcgggcggggctggggacacgagaatcccactcagcttgcctcaccctccttccattccaacgccggtctatcagttctcacacctgaagcaggggttcaggttgtgaccaggagttagggtgtggcctgggtcactgactagtcagggtcaaggcttggtctgggttggacgcagtggtcagcctgtgaccaaggttcaggttgaagggtaaaggatcagtcctgcctccctccccaaacttggtccacaggaaaaggaactgttaagtccatttgcattaatatgcgcttgaagagtcagacaggaaaattgtttgaaaggagaacagaaccatcagccaaaggaatgaatctcagatagtgaaattctgggtatctagaaacctgacttggcagggagagatactaaaaaattgtataggaggccgggcgcggtggctcatgcctgtaatcccagcactttgggagacagaggagggcggatcacgaggtcaggagatcgagaccatcctggccaatatggtgaaaccccgtctctactaaaaatacaaaaattagctgggtgtggtggcgcatacctgtaatcccagctactcgggaggctgaggcagcagaatcgcctgaaccagggagccggaggttgcagtgagccgagatcgtgcccctgcactccaaaaaaaagttgtatggaaaaaaaaagttgtataatttcttagctttaagagccagacaaagtgagttcattactgaataaaagtcactctagaggaaagaccctagggatgtgccccaaggttgtatcctttgtcctctcttttagtattttaagataagaatatagaagacataaaatagcagatttaatggataatgaaaatgaacctgggtatgatatgaaattaggaccagaagcctctgttaacgtaaaggctaaaaaaaaaaatgttaagacagggtgtctaaatgaataaatttatggactgaagggtagaaagctagaaagtgttagtcctggccgggcacggtggctcacgcctgtaatcccagcactttgggaggcccaggcaggtggatcacttgaggtcgggagtttgagaccagcctgtggccaacatgataaaaccctactaaaaatacaaaattagccaggtgtggtggtgggcacctgtaatcccagctactggggaagctggggcaagagaatcacttgaactcaggaggagaggttgcagtgagccaagatcactgcactccagcctgggcaacagagcgaggttctgaaagaaagaaggaaagaaggaaagacggaaggaaagaaggaaagaaagaaaaagaaagaaagaaagagaaagaagagtcagaaaacattgaaaggcttccatttcttttgtgaaaggcatatgtgaggagggagggaacaggggcatctagaggactgagaagaattaggaagatgtgaattgctgatacagaggatagaagagaaatccgactggaaacatagtggaagtgttgagatttaaatttacaaatagcaaacagtacatttgtacagttctttgtaatagatatctatagtttaaaagtaattccattatctactgtcaattttcttttttgttttgttttgagacagagtcttgctctgtcacccaggctggagtgcagtggcacgatctcagctcactgcaacctctgcctcccaggttcaagcaattctcctg

SEQ ID NO: 402 - DNA, 4001 bp, Homo sapiens
taatcagagatatttaattaatacctttactaaaaaagtctatcatgcaaaacggctgcatttatatcagctgaggataatggcatatgggctacattattcctgtgtggactttagcatggggaatgtctgacaagtatcacattaaaaaaaaaaatctctaactcctgagcagtgcataaggtaagcttacacaatacacaacctgttgtgtgaaattccagaatttccatccccgccatgtctaagggtgccaagttttgatctgcactgattcagcagtatgtttacagtcttttcacaggtaattggctacctaaagaaaaatactcatggctacactagcagaaaggaagggcaaattataaagaacaaggaaagaaaggaagaaaaaaaagaaaaagaaaactaataggatcacaggattaagttcagcattatttaacaagtgatacatagagcaagtttacaaaaacaaaagccttttcagcagacttggaagcaaaaacagggctgtgtaacacaacttagatttagcgttttgctgaagtgaaatattgcactccttaaaagaggaaatcactttcttcccccttaaaaaaacacacacacacaacataaaaatcagcaaaagcttggtattttataggttatttttctagccccttaaaaataaacacagcatgaccctcaaaaagaacatcagcacctttaaccagcttaaaaaacaaatctaaagcctagaaaacaaagaaattgtgcaataaaatgtaattggtgttaatataaggtagatttactaacttatttcttaaatgtgttggaaagacaagttgtgcagggggccttaactagtttttctcagcataaaacgaagaggaaactaaatgcttttagaacctcaatctcgaattttatgtgaatggcaatggctctaaattagtaatgctctaaatgcccttaccaaagtctaacttgtgttataagtcgttcaactcaacatctacggactggacatattcctaatagttcgagtaggaaataaatctttattctttgtccacatacaagacgagacactaacatttgttgaaagacaactatgaatttgcctactgtcatactatggatttactgattaaaagacttcaagcaaaattatatattcaatactaatgatgcaaaatggcaaaaatgacaccaaaatgccaagcactgaattggagaaaacaagttaaacatggctaaagatcccgttcatgcagtgtttctgggaatactggcaaacaccagcaactcttttggttatttctccttgcaagaatgctgctgaaataaacgccagctagcaatctcacagcttatcaatataggctgaaatttccagaaaagttgctgaccagaagcgcgtcccagccacaaacatcagcaccgcattcctaaggggagacaaacccggcagaggatgccacacggtgtgtggacttgccagcattcgggcaggagggtgtggacctgacaagcaaggtccgttcggcacgggtagcgctcccagccctcggcccgctcagcgctggccctccacggttcttcccacccctaccttgggctcccacacaacagccccccggctcccgcgccggcgctccgccaccccaatgtctccacagaggggcaagggggcagtctccacagaggggcaagggggcagtcgcccctcgcctccccacaaccccgcgcgcgaggccaccctgcgccaggaagaaggacggcgttcgcctcgcgcgagtccatacacagctatatcctaatgacccgccccagagcatccagtcctctctccactggcccctacaacgcccttcaaatccttcacgtccggtgaccgcgctccgcagccttaccctgaccccaacaagtacacccctagaaatatcgcctccgactccagccgactgggtgactgatcggcggcagcacgttcacgacactttcgcgattgccgtaaaggggaacaaggtttgaacgagcagcgccgcaggcgcgctcctcggtgccgtgagcgcgccccggggccggccggtctgctcgggagcgcgccccgtggcccagccctgtctccttttagcataggggcttcggcgccagcggccagcgctagtcggtctggtaaggtaagtcgaagtaggggagaagggacaggccccagcgcttgcagcccgctccctctagaagggtgcgtcagagggtgggatctggcagctcggggaagtgggcgcagcctggagcccccttacccgcgtcgcaggcgcgcgagactcctgctggccctcattgcctccgggggctaccttatgccaggcgccagaggggggctggttggggcgggagctgcgggggtttccgggggcggggatgagtgcagctgggctcagctccccgtgccctacctttctgttctcttccttggtttcccctactctcctcctgccccaagcagtgcctgatgccgagttccgtctctcgcgtcttttcctggtcccaggcaaagcggagcggagatcctcaaacggcctagtgcttcgcgcttccggagaaaatcagcggtctaattaattcctctggtttgttgaagcagttaccaagaatcttcaaccctttcccacaaaagctaattgagtacacgttcctgttgagtacacgttcctgttgtgagttctgggttcagatactttggtggctggagggagcgagggggaggggagagtttgaaattacgatccctggtgaccttgtgtttacacgaagctcagtcttctgcactcaattctatcgcagcgggtgggtcccacacagaaaggaaattgctggtcctgggtatcttcacaaccgtgctttcaagtaggatacatctgaaaaacacaaaacactgtagaaataatctttccagttctcccaaattttaatttataaatcagtaaccaaatgcaactctgtattttgcattgcattatcggattgtcctcatttctcttaatgtaacatttgatgcagcttataaaaaaacttaattttctagactctttaggatttaaccattaggagaatattatgtttgtcaggaggccaagttagagtttagaaaagtaagtatttttaaattatattttgatttgagcctgatggttctgtgcatctctaaaagcagcttagggctttctgaccgttcacttggaacttccagaatttcctttcttatttcttagcattcaccacttggcgaagacagcatgaggaattcattttattaccacgggtatttaaatatttgttaaaaaattgtaatcacagttttgattcatagaacttcaaagagagcagagaagataggttaggttagagatgcaagactttttcttttctttttttttaatggagtatcgctctgttgccaggctggagtgcagtggcacgaccttggctctctgcaacctccgcctcccgcgttcaagtgattctcctgcctcagtctcctgagtagctgggattacaggcgcccgccaccacgcccagctaatttttgtatttttagtagagacagggtgtcaccatgttggccaggatagtctcaatctcctgacctcgtgatccgcccgcctgggcctcccaaagtgctgggattacaggcgagagccaccgcccccggcctgcaagaacatttttataaacattcttactgccctgtgaaatttattcctgcatactctcaattattttgaaaggctttttgaattatgaatcattgaaattctaattttgttggtttggcaattactcagcaatgctttcaggtttcaaaggcaaaaacacattgacaattagtcttcctcacctagtccatgcatttaaattcctcagttgtcattcgcaaactggtaaaccatttcaagccctgcttctataaactgtcagtttaaacaactgggactctcaaagcctaa

SEQ ID NO: 403 - DNA, 4001 bp, Homo sapiens
ttcttcccccttaaaaaaacacacacacacaacataaaaatcagcaaaagcttggtattttataggttatttttctagccccttaaaaataaacacagcatgaccctcaaaaagaacatcagcacctttaaccagcttaaaaaacaaatctaaagcctagaaaacaaagaaattgtgcaataaaatgtaattggtgttaatataaggtagatttactaacttatttcttaaatgtgttggaaagacaagttgtgcagggggccttaactagtttttctcagcataaaacgaagaggaaactaaatgcttttagaacctcaatctcgaattttatgtgaatggcaatggctctaaattagtaatgctctaaatgcccttaccaaagtctaacttgtgttataagtcgttcaactcaacatctacggactggacatattcctaatagttcgagtaggaaataaatctttattctttgtccacatacaagacgagacactaacatttgttgaaagacaactatgaatttgcctactgtcatactatggatttactgattaaaagacttcaagcaaaattatatattcaatactaatgatgcaaaatggcaaaaatgacaccaaaatgccaagcactgaattggagaaaacaagttaaacatggctaaagatcccgttcatgcagtgtttctgggaatactggcaaacaccagcaactcttttggttatttctccttgcaagaatgctgctgaaataaacgccagctagcaatctcacagcttatcaatataggctgaaatttccagaaaagttgctgaccagaagcgcgtcccagccacaaacatcagcaccgcattcctaaggggagacaaacccggcagaggatgccacacggtgtgtggacttgccagcattcgggcaggagggtgtggacctgacaagcaaggtccgttcggcacgggtagcgctcccagccctcggcccgctcagcgctggccctccacggttcttcccacccctaccttgggctcccacacaacagccccccggctcccgcgccggcgctccgccaccccaatgtctccacagaggggcaagggggcagtctccacagaggggcaagggggcagtcgcccctcgcctccccacaaccccgcgcgcgaggccaccctgcgccaggaagaaggacggcgttcgcctcgcgcgagtccatacacagctatatcctaatgacccgccccagagcatccagtcctctctccactggcccctacaacgcccttcaaatccttcacgtccggtgaccgcgctccgcagccttaccctgaccccaacaagtacacccctagaaatatcgcctccgactccagccgactgggtgactgatcggcggcagcacgttcacgacactttcgcgattgccgtaaaggggaacaaggtttgaacgagcagcgccgcaggcgcgctcctcggtgccgtgagcgcgccccggggccggccggtctgctcgggagcgcgccccgtggcccagccctgtctccttttagcataggggcttcggcgccagcggccagcgctagtcggtctggtaaggtaagtcgaagtaggggagaagggacaggccccagcgcttgcagcccgctccctctagaagggtgcgtcagagggtgggatctggcagctcggggaagtgggcgcagcctggagcccccttacccgcgtcgcaggcgcgcgagactcctgctggccctcattgcctccgggggctaccttatgccaggcgccagaggggggctggttggggcgggagctgcgggggtttccgggggcggggatgagtgcagctgggctcagctccccgtgccctacctttctgttctcttccttggtttcccctactctcctcctgccccaagcagtgcctgatgccgagttccgtctctcgcgtcttttcctggtcccaggcaaagcggagcggagatcctcaaacggcctagtgcttcgcgcttccggagaaaatcagcggtctaattaattcctctggtttgttgaagcagttaccaagaatcttcaaccctttcccacaaaagctaattgagtacacgttcctgttgagtacacgttcctgttgtgagttctgggttcagatactttggtggctggagggagcgagggggaggggagagtttgaaattacgatccctggtgaccttgtgtttacacgaagctcagtcttctgcactcaattctatcgcagcgggtgggtcccacacagaaaggaaattgctggtcctgggtatcttcacaaccgtgctttcaagtaggatacatctgaaaaacacaaaacactgtagaaataatctttccagttctcccaaattttaatttataaatcagtaaccaaatgcaactctgtattttgcattgcattatcggattgtcctcatttctcttaatgtaacatttgatgcagcttataaaaaaacttaattttctagactctttaggatttaaccattaggagaatattatgtttgtcaggaggccaagttagagtttagaaaagtaagtatttttaaattatattttgatttgagcctgatggttctgtgcatctctaaaagcagcttagggctttctgaccgttcacttggaacttccagaatttcctttcttatttcttagcattcaccacttggcgaagacagcatgaggaattcattttattaccacgggtatttaaatatttgttaaaaaattgtaatcacagttttgattcatagaacttcaaagagagcagagaagataggttaggttagagatgcaagactttttcttttctttttttttaatggagtatcgctctgttgccaggctggagtgcagtggcacgaccttggctctctgcaacctccgcctcccgcgttcaagtgattctcctgcctcagtctcctgagtagctgggattacaggcgcccgccaccacgcccagctaatttttgtatttttagtagagacagggtgtcaccatgttggccaggatagtctcaatctcctgacctcgtgatccgcccgcctgggcctcccaaagtgctgggattacaggcgagagccaccgcccccggcctgcaagaacatttttataaacattcttactgccctgtgaaatttattcctgcatactctcaattattttgaaaggctttttgaattatgaatcattgaaattctaattttgttggtttggcaattactcagcaatgctttcaggtttcaaaggcaaaaacacattgacaattagtcttcctcacctagtccatgcatttaaattcctcagttgtcattcgcaaactggtaaaccatttcaagccctgcttctataaactgtcagtttaaacaactgggactctcaaagcctaaggagatacgaatccaagataattcgtacatagaaaaaaatcatacataaagttgtactccatacctgtggccttatgactacataattaataaatcagctatcattattatattgtatgcttattctactccactccaaggaacaactgtttgagtactgtaactcagaagctaagtaaattgcctgaaatcatagagttgggtagtagtaaaggtaggacttgtgtttagagatatctcatctcacagctgtgttctttacatcacatggacttgcaattgctttattttgcttaataatctattatttttttcctcatgtctctctataggagaagacgcaatgatatttcttttttcctctttaagatagtgaaggtgttggatgtgagaatgcatatgaaaatttatatcctggaattaaaacattatttaattccagatggtacaacatcattgtaaaaaactcaagtgtcaactcatcaaagaaaaataacctgttaacaatgctgtagcctagtattctgcccatgaacaatattggcgtgttgacttaaaactgtacatgtttaaaattgtgtgga

SEQ ID NO: 404 - DNA, 4001 bp, Homo sapiens
aggaaaatagaaaggagttgttgacaagggaggagtgacaaaggtcccaccggctccctgcttccactgaagaagtcctgaatagtcttccttgttgaaaactttcaggcaacagaagcaggtcatgtactagaagtctacaagccatggatggagccaatgagaggtgtgttatccctccaggctgcaggatgggcctcaaaataagccagattgtaaaaaagaggtgggtgagaggcagtcagaacagtagtcctcagcctcatctggcctacagcttgtctgcaaagtcccaccaaaggcctccacggaccaaaacactgcatgagactatggccccaggggcagggagacgccggtgggtttgagagacagctggggcggtgttgaaggacacagtgagggatcagccagcctatggccagtgacaggggtaaaaggaggcccttcctcccaggggaaaatctggccagaggccccagtgagggaagtgggggaccaggggagaaaaggatccctctctggaacagactgtgcagatcacggtatggtcagcgccaggtcctcagggacaggactgcaggcaagtccttacccttaggagcccctttacatgtgcagccactcacaccccggtgcggtcatcccgactccggtatgcggcagcaaccgccacccacccctgccccagcacagatatgggggtgactgcctgctggaggcctgctcggactcacttctccaggaacaggggctcactgcattcgccacgatcctcagaaccccctgaacctgggcctggcaactcaggtgactgaaaccaggttttgatgccaggagctaggcttagggagggagagactccaactgcaggctaaagatgagtgctctacacctgcagtcaacccacttgccacgggcctctagtgattaacaagctacggcccagaaagccagttccaccaggagctcccttgccagccatccacacctcataacggtatgccttagccctaccgggccggggcaggcgctccgggccgctccttcctgtttcccgttaagcacatggaagctctgacctcgcctgcgaggtgggcacggtgggccggtaggaagaaaacggggcagggccctcccctctcctcccacccaagccacaggacgcgtccaggccagggcaaccccgcgggccgctgccagggtggaggctctcgcgccaatggtcaccaagctcctccactccccaacaaagggaagcccacggctcggccccgtcgcccgcagcccccgcgtccccaccttccgccctacctgttgcccgggaaagcttctccggctcagggcggcgctgccgcggacaccgcggcgccaggcccgccggccccggccgctcccttgaggcgctgcgcccgccttacccggcggccgccgccatgagcgcccgcagcgccccccgccagcgccgcctccctcctcgccccggccccgcggccttcccagcccgacccctccgcggccccgcgacaaagcggcacccggggctcccaacttttccgcagccccttcccacccccgcgcggggctcgggcgccgggcgggggccccgactcacccggcggcagcgttggcggggccggggccgctgctccgtgtactccgtctgctcgggtggttgctccgaggccccgaggcctggctccccgcgcctctcctccctcttccgcccgcccgccggcccgcgcccgccctcgccctccctcctccgccagccgccggcgccgccgccgccgcccgccgagcccagtcgagctgagcccgagcccagccgggaaaaaaaggccgcgagcagcccaagggccgggaggctgggcgtgacgggaggggagggcggggcgggcctctgcgctgcggctgccccttcgccccggcgcgggaggccagaccccaaccctccgctcccggccccacagccgcgtccacgcccgtcaccttgcgctagagaaaccgccgacctggggaggcgggtgcgggctccttccgccacttcggtctcttttcggggtgggaggtctcccactgggaccgacacagacgcactggatgccgcggggtcccgggctccgagcggcggtgtccctgtccccttactcctacccacccccacccacccccaactgctgtgcggcccccggtccccgccagggtgggcacattcccacttccagccccacggggcgcgggcggaggagggtgcagcccggggatcctgcccaagtgcctcgcgccgaagctgaaaacctctccagggcagaccgaagcagccgaccctcgagacccagtcggagcctgcgatcactcgggcgaccctcgcctaccccgccgtaaaagccgcggcctttccacctaggtgctacgggacctacccccgtggcaaggaagagcaaacccgaacttgcgcacacccggcggccctgtctgaaagagccaccccaacttttgttttgtaaaatgtatgagttttcaaatgacaccacgtttatccgtattcgatttcgtgttaaaaagtgttttccggccgggcgcggtggctcacgcctgtaatcccagcactttgggaggccgaggcgggcagatcacctgaggtcaggcgttcgagaccaccctggccaacatggttaaaccctgtctctactaaaaatacaaaaattagccgggcacggtggctcgcgcttgtaatcccagctactcgggaggctgagccacgagaatcgcttgaaccctggaggtggagtttgcagtgagccgagatctcgccactgcactccagcctgggcgacagagtgagactccgtctcaggaaaaaaaaaaaaaaagtgttctccccttggcctggcgccgtggcttatgcctgtaatctcagcactttgggtggccgaggtgggcagatcacttgaggtcagagttcaagaccagcctggtcaacatagcgagacccccaactcctttataaatttaaaaaaaaaaagttttccccttgagtcgtgtggtaaaattactgtttcagaagtaattactgttggaagatgcaacatggttttcctagaaagctggtcttaactcctaacgtgaacgagtggtgactaagatgtatttgagggctcctatacagggagagctgcagcttactccatggagaggtacttttgtcaaatttctcacctagatgaagtattgccttttttatgctgttgcaatcagagcctctgacagtagcttgtttccccgtttatctggtcaagtactcgtaggaaggagtgcaacccccactaatccagttggagggcccatccctcatctcaggccctttctggagggtaaggaggtagaggctgtccgacccaactgtttgttctgcctctcttttcagggggacccgcagccctgacacaccatgggaaagatgagagtggtggcccctaaccagctcccagggtttctctaggcttttctaagccccaggcctgcctgatctcccagtttccagcaacccctccagctgtgtttttctcctccctcccttattagcatatcttccattgtatctttctttcctttcttttttttttttttcctttggagaggaggtctcactctgtcactgcagcctcgaccttccaggctcaagctatcctccacctcagcctcccaagtagcagggaccacaggcgacgccaccatgcccggctaatttttgtatttttgagatttcaccatgtcgctcacgctggtcgtgaactcctgagctcaaaccatccacccgccttggcctttcaaagtgctgggattacaagcatgagccaccttgcatcccaattgtctctttctacccccttggaactctcctccttcagccttctaattccaaagttccctcttcctttcttcagtgctctccccagagtccttatctgctacacacctacacaccttttttccag

SEQ ID NO: 405 - DNA, 4001 bp, Homo sapiens
atcccctttactctgccaacttaaattccacatccttaggccgagtgtggcaaaggagtacccactgcacaaatgtcatcacctgaaggctttcatttatacagatcattgatcaatttaagaacttctgaagggtgctaaacacaactctatcctgctgggtaagctggccggaagttcaggggctctcacattacaacatgaattagattaaactttaattttcccgataatggctgtgagagactgcacatctcccagttctgtgccttaattatttgactttcttgataggagtgaagatagtatctcaccttggaacggggcacagaaggcagtagatgaccacgatcgttggcaataatttgagtgtagccttcatgagaagagatgctctggggtacaagtgggagagataaaggtttgtgaggggaaaaagggaagtatttggggagcttggtcagagaaggatatgggagtttagagaatgctaaaaggagttaattgacagggagagcatgaggctatcttgtaggtgcactgaacatggaatacctcttttgttggcttagtgggagaccagttctgcagatacttggatgagaaagccttttcatactgtggagagaaagataagtagccctatgagacttcaaggccccaaacccaggaaatgaagactaggcacaattctttagatttgaagaccaaaggcctgaccaaccatgtaggctttaagtcactatgacaagggtgtaatttgtttggtctagatgtgtgctgtccagcatggagccgggagccacatggagctgttgagcacctgaaatatgactagttcaaattgaggtgctttgtaaatatgaaatatgctgaatttttaagtttttttcttttctttttttttttgagataggatcttggtctgccacctgggttggagtcagtggcatgatcctagctcactgcagccttggacacctgggttcaagcgatcctcctccctcagactcacaggtagctgggactacaggtgcatgccaccatgtccagctaatttttaaatttacttgtagagacgaggtctcaccatattgcccagggtggtctcaaacccctggcctcaagcgatccttgtgcctcagcctcccaaagtgttgggattacagacgtgagctacaacacccagcaggttttggagatttagtacaaaaaaagaacgtaaaatgtctgattataattttttaaatactgattaaatgttgaaataatatttggatttattgggttaaattcaatatatttaaattttatgttttaattttttcatgtagctactagaaaatttaaaattacatttgtgggtcgcactctttttgttgggcagcactggtctagatcaggagttggtaaactatggcctatgggccatatccatattgctgcctgtttggggatggcctgagagtaagggtgatttttatagatgaacatttacaattgattcagtcaaatggaacactaactttgaatcccagttaagtgaaatgttttctcaacccccaaaattccattattttcattagtagtacaaaaaattgtactcagttatattttgaatttgtcaaaaatgttatggaaaaatgtttttctttaattatgcaagtagctacagaatatttttgactttgccacttggcctgcaaagcctaaaatttttacactccgcccttttacagaaaaaaaattgccaacttctggtttacaccctacaaatttaaccaagagatacctttggatcgcccctgggctctctctatccctgaggaggtaaaatattatctcactccactctcagctatctgttcaaagatcagaatcctatgagaggggacagtccaaagatagaatctgaaaaacaaaagtaaacgttaaagaaatggagaatgggaacttacctggttggcactgtagttagtggccatgatcttgtgctgtttacactcgttgcttggcaactgcagaaggccgacctcctgggactaccaatgagcagaggctgcctttctcttctgcttattattattcacttccttggctcacactgcccccatttgttttctctggaacttagattcatttttattttacagacgggaaagactgagtaaatgtgagaaaattagctgaatagccactactttttttctggcataacctacccctgcttaagaacttccacgggcctttgattggggtttttaaccactttaacaaaccatgtaaccctgagagctatgcttgttggacaacatggtgtaatgtaccacaggctgtagagccagatactggggtttgaatccttattcaacatgggaacataggagctatatgacattaaacaactgtcttgtcttcactaaatttctatcaactcatttgtattgtggggataatagagcctgcttttacagggtaagtgagataaaatgaataaagtgtctagacaatatcatagcatagtaggtattcaatcctggtgagatcctgtttataaggcccactactttgtcttatcaggcagaataacaaaggaacaatatttaaaaagcaactagctcaaatctgtccccagaaggaaaaacatatcttgtccttggtccttaaaaaatttcctctgtcactgtctagaatcagcacctaagaacacaggcgtttagtgttgactggaataaaatggaatcgggtgctggtgcagggagattgagcagggatgaagagagaaaatcacagagtggaaaggatcaggtttggagagttcaatggggggctgccaggacataagcctaatatgtgtgggacaaggaaacccctctgaaactcataaaatggtattgtaatacccatctatgaggtggttaggagaattaataagtaagtagaactgtgctttgtgaattgtaaagtgaatttatatataaggtgtcaagatgaaagggaaaaactaagaaataagttgcccaaagatatcattaggaccaggagaccattataaagtatatccaggccgggcacggtggctcatgcctgtaatcccagcactttgggtggccgaagcagacggatcacaaggtcaggagttcgagaccagcctggccaacatggagaaaccctgtctctactaaaaatacaaaaaattagccaggcatggtggtgcatgcctctaatcccagctactcgggaggctgaggcaggagaattgcttgaacccgggaggcggaggttgcaatgagcagagatcatgctactactgcacttcagcctgggcgacagcgtgagactccgtctcaaaaaataaaaaataaataaagtatatccatcagtcccttctcttttccttcttcccccaaaatcctcatcttaaccaacacaccaagtataagagcactcctatgcttctgcagatggagggaagaacagctcttgttttataggctctggagttaatacctggataatgtgagatctggaaagataactcatgagcttagtccctgtggttcttatcactctctagagaagagttctttaaggaccaaggactatctttgctctaggatatccattttggccctttaatctgcaatgataggctagcattatttctcttagaatttgtcttcagttggtatgcctccctctgcctttctgataggaatgtaatgataaatgatgactgcactcatttttaaaagttaaccagtttttgttcaattgaaaaagtaatgtacatggaaaaaatttcatgtttacaggatgttcagtgaaaagcaaatctccatttgatttcaactctcagtcttgctcctcagggcaactgctgttactcatttcttgtgtctccttccagaaatcttctctgcatacaaacactaatgagagagctgtccacattgctttttgatttgctttttgactatcttggggattatgtttttatc

SEQ ID NO: 406 - DNA, 4001 bp, Homo sapiens
tcaggcttcaaactcttggcctggttctacttccctttctgtagactttggttaccaagaaagggagattcccatgcacgagaccccttgccttttactctgagtgatccacgcaattatcctctttcttcaattgggaccaagttggccatctgtaggatgccaccagaagataacatcctagtcagtactgaggtccccatctctccttctgcaggattttaatcattatttttgtaagagttctggaagtctgcctaattgtgaccctcaccaccactactatctcttctcatgcctttaaatattctccaaacctagtgagtagcactatacgtacacgaacacacacagctggcctgccagagatcactaacttagacccactgcttctcaaaggtgtctatatgcccagtcctgtcccaggaattacagaggggctcagtgagtgagtcaaacccctgccctgagtggctcctggatggggaatccctgatctgggtgctctgaagcccacaggtcttgcccaggtgcaacttatgccctatgagagcttggaaataggaaatttttaaaagaggacaaaaggggaactaacatttaccatatgcccttagacaccaggcatgacagtaggtgttcacatacatacatacgccactgtgtttgtaaggtgctgagagaagatgggacactgaatcaaatagaatacataagtgaaaggggacgctcccccaccccaattacaacactgcagggagtcctcgaaagtcaggaactgctctttgttggagacttatttaataattaacaaaattcttctgaggtccactgagccccagaaaagcaatgcagcccctgggcctgaagtctgtccacaagtacatccaagtagcaacctttgccacctgttgtgccccagacattctaggtcagttccaataacccaagactccaacacttatcatctgcccttcccctcccctctgggaccaacacactcaagcccaggcatccccttcatggttcctcccaggctttgctggccttctcagccctcagtaccctgacagccctccccatcccagcaaaccccaggctgccagtcctgtcccaatctctctcccgggccttgcaaacctgagaccctcctcactcactcactcatttattcattcattcattcactgccaaatatttattgactaactactgagggatacaaagccctgctaacagaagaaaaacctgaggctcgggcacattagatgacttacccacagtcaccttgctagttagtggcaaaacaggtaccacgacccattatctggcctcctcaccagtgctttttttttttttttttttttttgagacggagtctcgctgtgtcgcccaggctggagtgcagtggcgcgatctcggctcactgcaagctccgcctcccgggttcacgccattctcctgcctcagcctcccgagtagctgggactacaggcgcccgccaccacgcccggctaattttttgtatttttagtagaggcggggtttcactgtgttagccaggatggtctcgatctcctgacctcatgatccgcccgcctctgcctcccaaagtgctgggattacaggcgtaagccaccgcgcccggcccaccagtgctttttcccacaccacatccacaatctttggtccacagaggccccgctgtaatggcaacggggagagggttggggcatccctttctccccaactcctccgctcagcgcgctccacatttccaatcgttatcgatgctatccctaattcctcttttgaacccacctcaggatctcccttgcttcttctagaggtgttctccttactcctgggccctcctgacccctagacccaactgtgacctcccctaggcccccactttccccactcagagcccccacccaattcaggacacaaggggcccatctgaggttctccctcaccatctcctcagccacacgccctgactccggacttctgctgccgcctcggcgccgccaaggccctagtgttgacgcgttaccttggcaaccactagcccgcgttcttcggctcaggccccgcccccggccccgcccctcccacctccagcgggcagttgccttgtgctggtggcttaggaaccggagcccgtcgctccaaccgttgcagctccacgctccagcccaaccgcggctctgaaggattgacccgccctggcgtgccctgctctccactttggctttggccaaacttttcggtcagaacccgaacctaaagaacttactatgggccgagggggttctaactgtcagcggccccaggagcctggcccagggtcacagttttcccctgggacttcacctaggttgctatgattactcttgccccattgcccaggaggcgccaagccaacccctgatgagtgtagtctgcagagaagccagcaggatcaggacaaaccagttccacagcaggagagaatctggtcgggtcaacaaagaacttccagccctgaggatgtctatgcagtctcaagagcagtttcttaaattgcgggcctcaaatctgcagctaagaatcacctgggagagtttattaaaaatggaggccctacattagaataagtcaaaagctaaggaactgactttggggagcttgtcttttaacacttcctagctggtatgtattgttctagaaagtacataggggttttgtcattttttccaatttggtttggcctctctacctcccaacttgcagggctggcactgagctcactttggtaggctgcatgctccaagcctcacgaagctgtcccaccagaccaaggacatttgtcttcctccagtgctgattagctgattagctaagctcttggtgtgactctgtgagtctctgagctgctttctcaaacctctctccaaaccctcacagccagtctttctgaagctcttactccaacttgggcactgaaggctattcacaagccccgggggaatggaaagagggagacaaggtcacttcttgctgcttttaaaaggacttactccaacaggcttcacattccttccctagatttcccagcctttatctcctttgggatcaagagtacaaaattgtgtcccctgcccagtcccaccaagtgttgaaggcttaatcagagggagaagggaaggcctgaagaggaggagcacagtccctgggaggcttgggactgagagaaggggctgttttgttcgtgggaaccttccttactaagccttggcattagaaccccgttccctgcagctcagaaagaagggaagacaagtaaccggcccactgtgaataaggtgcttcctgtattcaccccattctcccaggcacatctgcatgacatagttactatccgtgtaaccaaagaggaaacaagccaagaaaaaactgtccaaattgaaaatctattcttttctcagcccagggtaactctctgaagaaaaggtgcaaagttgaggcagaaagggctgggcgcggtggctcatgcctgtaatcccagcactttgggaggccaaggtgggcagatcacgaggtcaggagttcgagaccagcctggccgacatagtgaaaccccgtctctactaaaaatacaaaaaattagccgggggtggtggcaggcacctgtaatcccagctactcaggaggctcaggcaggagaatcacttgaagccaggagggggagattgcagtgagccaagatcactccagcccaggcaacaatgcaagactctgtctcaaagaaaaattaaaaaagttatggcaggaaggagggaatgacagagtgcagtgtaagggacttgcctcccagcaggcaattacatgcctgtaatcccagtactttgggagcccaaggcaggaggattgcttacatccaggagtttgagaccagcctgggcaacatagggagatcccatctctacaaaaaatcaaaaattagccaggcatag

SEQ ID NO: 407 - DNA, 4001 bp, Homo sapiens
aactgtatttaatacagcttattccaacagaatattatgtggttgataaatttgactttattaaaactaataatttttgtccatcaaaagatacttgtaagatgggagaaaaatgccccaaactgaaagaaattatttgcaagacatatatatatatctgacaaattattgatatacagaatatataaattgtgcatgtaaatcaataaaattgcccaaaaatatcctgcacaacaaactgtaaaaaacaagtaaaagacttgaacaaggcatttaacatacgactaaataggaatagcccataaacagatactcatcatcattaatgatagcaaaatgcaaacgaaaaccacaattccttttctcaaccattgggttagcaaaaaattacgaagttggacaataccaagggttggcagggttgctgaggaataagaactcttatgcacttctagtgggagtgtaaattggtactatcatattgctcagtaattttagtcctggctgtgtgccctagagaatctgcacaaatagatgaatgtatatgcatgcaagaatgtttatagtagtatagtttgtaatagcaaatgattgttatttcccaaatgtccctcaatattagagtgaatacatatatttgagacattatattcatatgatggaacactacatagcaataaaatgaacttggctatatgtatcgagatgtgtgaatctcaaaagcatgacattgaactgatgcagcaagacacagaatacagggagaagcactagaactggtaatattctgtttcctatgctgggtggctgggttcacagatctacattctattgtaattctttaaatatgacatatatgtagggtacattcttttgtatgtatatgtcacaataaaaggtgtcaatgcaacaaagaatgggaaaatggattcggttgttgaaataatgaatatcattaacaggaccactgtgaacaaaaataagggctgtaatgctatacaaatggttatttgcgacttgggataaagtttacagtgtcttcatcatacttggattcaaacggtgatataatgaaggtggtgtgctcaggaaaactgttagacaactcaaaaagtggctctggtgatgacaaaggcagtgatattgaagacaccaaaagaggggttcttaacatattttcatgaaattacagtgaaaaaagtacttttaaattaacattttatatgtgattttaactacatatgcgtgactgattaatctagtttcataatacaagtcgccatttatttcctctacatttataatactgcatatatattcaaattggccaaaatctttctttccaatcatcatgctgggattatggggttatatgtggcacataccattcctgtatatgtcaggatggaaaaagttttacctggaatgaatttttgccatttctgatccacattgtacttcacacagtgatttcctgaaggaaatataatgatctgttcatcgaagtagaagatattgttggccacgtgggatcgaagaccaaaaacatgcagcgtctgagctaccacggctgacatgatctcccgccaaacagttctgctgaagaccaaggcagcgcttcagagtggagagcaccgccccgctccgaccccgcccccggcccggactcgccctccccgccctttgctcctccccttgtctctcccctttctcctccccttgtccctcccctttcccctccccttgtccctcccctttcccctcccccggggtcctcctccgcgccaccccacccccgcggctcctttttctgccttttcctttgtaccctcactgctaccagctccttctggcgacccccaggtaccccctcccacctttcgtttctctctgggtcagcagaccacgcatgtatccagaggcgctacctgtagggatcctaagcaacccggacactttcaaacgccgtagcggttcctatagcaacgacaaaccggaagtatggtttgccgccggaagcggaagtcccaatcaaaagttgagcagtagctgtgagttgctggcgctggagcgattcggtggcacgtggagccacggcgtgggagtagggggctgaaggcaggcagcagcggccagggccgccctctgctagccgcttgggtctcgggataccccgtttcttcctgtaggtgtgggacgtgcgtgcggcgagatggacactcccccgctctcggattcggagtcggaatccgatgaatcccttgtcacagacagagaggtaggtgtcagccgagctcgtggggctgggcgtgggagagggggccttacacccctgggagtgaccgtgattgtgtcctgcagttgcaggatgcgttttcccgagggcttctgaagccaggcctcaatgtcgtgctagaggggccgaagaaggccgtgaacgacgtggtgagcgtgggcacagggtcgggggtactcggacatgggatgcgcttcaggcgctgttgggcttgggagaccgattcttgtcccaggaaagatgcaccctgcgcctcgccaagagggtcaattacctgtctgggtattggggattagcactttgtcccttcgcctaacagcctgtgcttgggaaagacaaactcagagttcccttcttgtgagctcagtgtctggatttcctagaatggcctgaagcaatgtttggcagaattcaagcgggatctggaatgggttgaaaggctcgatgtgacactgggtccggtaccggagatcggtggatctgaggcgccagcacctcagaacaaggaccagaaagctgttgatccagaagacgacttccagcgagagatgagtttgtatgtttgttttcaaatgttggagaagttgaggatccttgtgcaggagagtgggaaagaggggaaattagtaagtctgcactcagaataagcctaggagtagagagagcggcttcttttgactaagaatagctaggagattcttcctgtttgagagaagagctctttggtccacggtcacgatccaaaatccactttatgggctaatttgaaatattcatgttaaaactttttgtgcatgcttcagttattaggaaaacaaacaaacaaacattgcttatgggatgttcttgtgtggaattgctttagtaattacataagaatccataatcgacattcgtttgtgttaatgggtacctttagagtagtcattctcttaaactatttttagcaacacccctcccctttttaaaaactagtatacggctacatttcttttagatactaaatcagtgagacagtttttgtttgtttgttcttgctaatggaggtcagattttgagagtccttctgagcttggataactcatgattggcggtgaaaaggaacgtaaggcctcctccttcacctcattacacattttgtcctacgattctcagctatcgccaagcccaggccgcagtgcttgcagtcttaccccgcctccatcagctcaaagtccctacgaagcgacccactgattattttgcggaaatggccaaatctgatctgcagatgcagaaggtaagaaatagaagttttcctctggaaagtcaaaactttgtacttaagcatattcagctggcttagaaagatagctatgagcccaataacggggagccagttgtcagaggacaattattacctcttccatagattggctacttcagagtcatgccagttaccaccaattagatgcatataaaaatgacattttttctaaaatcagcaattaaggagaggaacagtgctgtgtgaagtgtggtccccgaggtgaagatggcccagtgcatttcctagctggcatggtcatgacatggtgtgcagagaggacagcattcttgtgcccttgccactgtcagtgctagaacttgtagacaattacttttctctgggcctcagttttctcctctgtaaaatgagggattcttagatggttcagatatagta

SEQ ID NO: 408 - DNA, 4001 bp, Homo sapiens
cagacgaaaccaaatggagggactttctccaaagtaattggcccatgaccttcagaggtgtcagggtcatgacagccaaagcaaggccaaggaatgttctggactgaaggggaataaagaggtatgtgagaattcagtgcaaagtgactctaggctggatccttccacgctggggccctgatgcaatcaactggcaaagcgtgtttgacaggctgaggggtaaacacggcaacaggcctgtgtcctctcctgactcgggccatgtgtggctgtgttggagaatgtcctcgtttgtggaaaatacactctacaagggtggggggcgacagagcatcatgaaggcaacttactctcaaatccttcacgagaagtttttttgtgctgagcttgcaacttttatacaagtttgggattgtttcaaaaaatgttaaagaatgtatgtggtattacataaagtttatatatattattaaacttatataaaccttatataataccacacatattctttaaaattttatataaataaatttatataaaatttaaaataaatgaaagttggctgggtgtggtggctcaccgcctgtaattccagcactttgggaggcggaggtgggtggatcatttgagatcaggagttcaagaccatcctggccaacacgcggaaaccccgtctatactaaaaatacaaaaattagccaggcatgctataatcccagctacttgggaggctgaggcaggagaatcgcttgaacccaggaggtggaggttgcagtgagccgagatcgccctgctgcattccaacctgggcaacacagtgagactctgtctcaaaaaaacaaaaatttaaagaatatatgtagtattatatgaagtttaatatatattattaaacttacataaaactatatgtggcattatatatagtctatatatttatattatatattgtttatataacaccacatatattctttaaaattttatataaagtttatataaagtttaaaataagtgaaagttaactatattgtttagggacacatgcataggtagtaaaactaaagaaatttatatatcatctttaaaattttatataaatataaagtttatataaagtttaaaataagtgaaagttaactatattgtttagggacgcatgcataggtagtaaaactaaagaaaaagtcagccatggtcaagaagagcgggtctgtgagtggcatgggggagagactttggggtgctgatgaggttctatttcttaacttgggtagtggctactgatgttcgatttataaccaatctctaagtcgcacatgcgcatttatgcaccatcgttatgcagagaatatcagtccatttcttttcaactgtgggccctacagcaggcctgcttactacctcagtacctggcttatgcagataaaaggagtattcctttaagaaaaacaaaatactagaggcaaatcagcttccaaaactaggttatacatactaaaactaaatgactttggggctatggaccatgctctcctttttagctaggcagacactcacgagtcttaactgttcaccagacaggctggcccttgatttttgtttaatgtttttgtaaatgtgttataataatactttattataacatctgctgcaaagtcaggggcgggtccctcaacagaggctgtgccagcgccggggttccctgaaacgaaccagggactagaactattaacaaagtcatttttctggcacagctttccgggaaaggcgtttcatatgggacggagttctgcctggggggcgggggtcaaacccttccagctcagccccagggtcaaacgcatccgcccccacacccacctctggctggcctgggtcccaggttctcgggctccggaggcacagacaccccgggctgctcaggcaggcggcggtccttggcgattgccctccgcggcgccggcggcgtggtttggggcgggcagctccatggcaacggaagactccatcgtggccggagggggagcctcgcccgttctgctccccggctggagcgggtggtttggtccgacccaccaccgaccgcgcgggccggggccggggcaaggaggtcgcgggccccgaggcgcggctgaagggccaggccacaggccgcggggcggggacgtctccggggtcccagacagccaggcctggcccagggccaaggcttggaggtgacagacagacttggggggcctggaggagctcagcaccggcgcgttggcccagaggaccggggcgggtgcatgatggtttggagtcgtttgtcaacctaaaaaactaggaggtttcccgtgaaaatggggattttcctcttctcttgcaaatggaagatcgggctgggcgcggtggctcacacctgtcatcccaacaatttaggaggccgaggtggacggatcacttgaggtcaggagttcgagaccagcttcgccaacatggtgaaaccccgtctcttctaaatatacaaaaattagcagggcatggtggcagctgcctgtaatcccagctactcaggaggctgaggcaggagaatcgcttgaatccaggaggaggaggttgcagtgagccaagatcgtaccactgcactccagcctggatgacagagtgagactccggctcaaaaaaaaaaaaaaaaaaaaaaagacttctgaatgttatgttccagcaaaggctccaactgaaaaattgtaaaagtaaatagcaaagtcagtgagctatgatggtgccatcacactctggcctgagcgaaatcaagaccctgtttcaaaattaaaaacagcaaaaacccggttgggcacagtggctcatgcctgtaatcccagcactttgggaggctgagttgggcagatcacttgaggtcaggagttcgagactatcctggtcaacatggtgaaaccctgtctctactaaaaatacaaaaattagccgggtgtggtggcgcacacctgcagtcccagctaccccagaggctgaggcaggagaatcgtttgaacccgggaggtggaggttgcagcgagccaagattgcgccactgcactccagcctgaacgacagagcgagactctgtctcaagacaaacaaacaaacaaaaaacaaaacggaagatgggcccaacatgccaagccggttccgacgttccccattgcctttcccacagtccccatcccccgctgcccagcccatctcactgtgcatcctgttacaccggagcctcttctcgcaccgctggtccgtgggggccgtttgcaatggagacatgggagtgtgaggaaagggagtggtctctcaccgggccactctatgccaagaactgggctcacgagtgaattggacgcgtcccctaccctggcagtctttcagcccgccatgtgtagggcttgcagggtggccggctcctgatgccacagtgaggcctgggaggtcctttggttttatcctggcccataacctgatccatcagaggcaagacaccttgcagaatgcccagcacccgtgagaatggctgtggaaagtagctgggtgacaccacagcacctctgcactcacccaccttccgcagtgccagatcgctttcctcctcagaatctgaggaatagaaccaagccaccattaccagcccaggttcgcttttataagagagattatacttcttcccgactccacggaaatgatagggcttcttccttatcaactttgcctccctggacctttcccaatgaactgttaatatactttctaggaaagggccgggcacagtggctcacgcctataatcccagcactttgggaggccaaggcaggtggatcacctgaggtcaggagttcgagacccgcctggccaacatggtgaaacccctgtctactaaaatacaaaaactagctgggcgtggtggcgcatgcctgtaatcccagctactcgagaggctgacacaggagaatcacttgaacctaggaagc

SEQ ID NO: 409 - DNA, 4001 bp, Homo sapiens
atacaaagttgtgctttatcttttaggaaataatcagatttatatcattttcaccataacatatatagtgccgatgttcaattcaccagtagaaactgataccacatttaaacacacattgatgaaaaataaaataaaagtgaaacaagtcagcaataatcaattatgtaaataagatgtttaaatcactattgtttaattatcacatatactttgatgtactctattttaataatatttcaaattcaactttttaataacttaaactgtttattaaacttgccattgattcttgattttaaagattagaaataaaacaaatctcccttatatgacaaatggtatctatgtaaaactggagcaaacagtatgtaggtatgaaacgttagaaacattcccataaatttagtaagaaaagacagaaatatttacacaaagaaacagaaaaagatgtcttttacaataggtaatattgacattgttctggaactgtttgtaaatacaaaaaggtttcattttaaaatactaattataatatttatatgtacaaggaaataattgttttcttcatttaaaaagtggctacatataaagtttacaagccaaagaacaagcaataacattagaaaatataactgaaaataattcaacctttcaaaaggtattaaacatatttgaatattttttaaattaccaaagtgtataactataagaatatatctgcttttattttctagattggaagactgaaacagagatttgtattatttgctaatattcttcagttcctagaggctatgtaatggtcactcaatcaaaatttctttactaagtgaaaagattttagaaattatgaataatatgtaattcattcagtttaaaaatgtttaccaaatatctatcacataactggttacctatcaaaaactaggaaagcaaacctcctccaagaataagctttttaatctatcaagaagcagtgatataattaaattttattatgaatccagaaattgtcttactgaggtcagaaaaaaactcctacattcatattcactactccaaaagactgctcttcaagaatatatgttatatacaactacaggaaaaaaatctctattgaacaacttaactgttacaaatattgtatattcaattgggtttcaaatttatataatatttttattctgataatacaagtaatacttgtctacaagaattctaaggtcatgacaatatcagttgtaaatgataaatgaatttttatttaggaagagttaaaatcatatttgaaataaatctaatcattatgatttgatggcttttattgactatgtatattcacatccttcttaatgctttcacataatacattttggttatactcctaagcaaaaaagtaaattacattttatgataattacaagggaaatgattattccagatcatagtttttcagaaatgtttattaaaacattttattctattttatattaaatataattatgatgaatatttagatataccattcaaataaggttcttacattttttaaactcaacaatgtcaaaagccactcaattgtcaagttacagaatacttaagcacattttctaaatcaaatttttattactcctgtgaaaagcatcattagcaaatgtttcataatacagttttcagaaaagagtctcttttaatcttaccttctgctacacaaatagcccataacataaggcaaataatctttgctagaagtctcattttttggatcttttaagaggacatttaccagctaactctgttcacaacgtccagttctcctcttccaagaattgtgattagtgcaggaaagaacttgctgcaaaaggaagttgaaactagatgctccgcctatcagaaacttttgcaaagtaaataaaaaatcaaccacaagccacaagcccagaaatgccagaagttaaacccaattctcactgcactcccactaaatgttaatgctgtgaccggctcttggactttttcttattaagctagggaaattctccgttggaaaatgttcatgttcttggtatgtgcaaatcagcagctggtgatatcctctggatttcataaacccttcaattattcaaactctattcgggtctattgtgtataaacctcagaacaggaaataagagaaactttaaaagaaatcacatacaaaactttggtttaggcaatgttttcacaatcagcacccagacaatgtgtacaaactttgccaagaatgcagtgcttgatgaatttgggggtctgcttttctagcaatttatgaaattagttttctaaatactttttgtatatgtgtatgaagcaactggctcactctcatttgacgtaaataggtttaataatccaaaaatcaacaaattgaaatgctgatttttaaaactttgtattgtagtgtaatatgtataaggaaaacataaatcatatgctggatattgagaaggtaaagatacctgtgaaaccaccaccaaggtcaaaacactgaacattattacatcccagaaaaccccagtactccttttcagtcaatacgcctctcaaccctctcccacaccccccacacacagagaccacgattctgatcttcaagaacatggaatatatttgtctggcttttgtactttgtataatgaaaaagaagcagtttattcttatgtttagagtttttcaccaaaaattgtgtttggaccattcaaacacattgttagatgtagttacagatagttcattcttattgcgatttaatactccactttttgaatagttcacattttatttatctgtgtgcctgttagtgagcatttgagcagattttagtttggagctggtatgaatagtgctgctatgggccttatattatgaggtttttggtaaacacaatccacatttctggtaagtgcatacttggtagtgaaacactgggacataatttatgtttaggtgtaatggataaaattagacaattttccaaatggattataacacttgacatcacttgacatttctatcagcagtgtccaagttgctccataccctcagagatacttggtaattttaatccttgtaattttagcttttctggtaacacaaagcaataattctccgtggttataatatgaattttcctgatgactaattgaaatgtgagagatccctgattccccttgaaggacatgcaacaggtgtgcggcttgccagttaggtcgccctgcagctcaaaccccttacggggagggggagcacacagatgcaccggtgcgggaaccggagtgagcgctttcgggctctggcctcacagcagcatctaggggtgggtgtctgcgatttccgaagcccaagtgggcgtatgttacagtgtgctcctttagctttgccatctgcaaatggtttatgtgttaatcagctcaacaaaccctcttccttatctcatgggtagtgggacagtgaaatagccctctatatccccagctgttgcccagtgtcccaaaagaatcggatcacacgggggctcgagggatgagggcaactttttattgagtggtggaggtggctgtcagcaagatggagtgggaaggtgaccttcgcccagtgtcaggcctcccagtggccagactcttctccacccgtccctggccaaactcccctcggagtccagatgtccctcctctctttctctgctgtgtcattctgccatcgcaggcctgtttgtcggcttgcctctccgtctcctcacttgtaggtctcttctggagcttggagtttgggatttatatgggggtacgacagcggggcatggcgggccaaaaggcaactttttgggtgtgaaacctgaaatgcctgtcctcatttagggccacaggtcttcaggcttgagggtggggcctttgcttggggaccaccctcttctacccagtatttccctgtctcctgcccttaacatgaagttgagaaac

SEQ ID NO: 410 - DNA, 4001 bp, Homo sapiens
gtcacctatatatagccttgcaatttatttgcctatttacattttgcttttctttaggacactgtaagttgcagtgaggtgtggttagggttgtcattttcttccagcttctttgctacatgaagcacaacatagtgcttgataaatattttgctactggaagcatgcagctttctatgtatacaaatgtgttgcttcagtgtgttgtttttgctgtttggcaggtctctcagtagacacctaaatgacagtgtaacacacacttacagatcatttaacatctaggcaacctttagatagaatttcactgaagtttctcccagagactggattgaagcttgaacttttttttggtgggaggagggttaggaattgtcaaaattctacatatttctctcatatttttcacttattttcctctgctacccccctatttagaaatcctcatgtaatgccatgtgtaataggtgtataagccacttaataaataccataaacacagacttaagaaaaatcaaatacactcatacaatcacactcctgtgattacaactcagcactaaaagtgaaaacaaaataaaacgaatttcaagggccaggcgtggtggcttatgcctgcaatcccaacactgtgggaggccgaggcgggcagatcacctgaggtcgggagttcgagaccagcctgaccaacatggagaaaccccatctctactaaaaatacaaaattagccaggcgtcgtggtgcatgcctgtaatcctagccacttgggaggctgacgcaggagaattgcttgaacccaggagatggaagttgtggtgagccgaaatcacaccattgcactccagcctgggaaacaagagtgaaagtccatctcaaaaaaaaatgaatttcaagcaatagaaataatattttgcaacatttctaagggcaaatatttaaaggaaagcatgttattgttcatgttgttctgttatgtcaggactgatgagaaactgttcaaataaaagttcaaaggtctggaaacattaggaaacagccaaacagtaaagtaaaaactttttggaaatcaaagggtaaagcataatgatcgaaactccatgtacagacatagtttaattagtatcctagaccttggtagagattttgtttgcaattcctttgatatggtggccttaatttcaacatgaaataaaatgggaccgtttataaaatatcataagaagcagtttgtagtattaataaagaggtgatacattacttcattctcaacatttaagagctcagaagaagcaatttcttgacagttcactggtttatatataaatgatattttctattgtttcagtaaaatatatttccctctgttgaaggataattcaattgaaatgggaattcctccattttaatgacctttaaaatttaaatgatcaaatctaggaaactaaaatccaaaaagcattttgaaggtggccaaatctttttgagattgattgttctagttagtggcattgcagagtgtatgcagaattacactaatacttcaccttgccaccgttagtatagcaggttttccctcatttaattcctctttacattctctatttggtggccatttacctttgcaacttagaggatggagagaactaattttattctattttcctgctaattgcatgttagaaagtatttccataaaatagattaatattataactcatttaaaatattttcatccatttattcatttaaaaatatgtaagcatacacacaaaaaccgataaatgtatctgaaaaaggaactaaatattcaggtctgttttgaacttaccttctcccccaacagaggatatccgtgagattagaattacactgaccaggagccacatgcttggtagttccaatcttatataactaaaaatacttcagtggtggtggtgttgctttgaatctgctttcattaacagttatgagcatgactttgaatttcagtgtactaactggaagctagtttagtaaagtcctttgtggtaaacatcaaagttcatggagggttgtgcaaaataagcaaatagtgtctaatcagtgttttcacaataatactctgagtttatcatgtaatattaacttgagcaaaataaaagctgttcaatttccttgttgtggtccctgagtctctgagtttggaatattcagaaatgggccattgaagaggaaagaggaagccccttcttttttctagccaagagttcagctacatcagtaggcaagcaagtgaaggtgatcagtcctcatcttaacataacagcatcactgttctagttataaattccacttaaaactggtattaagaatgaggtaacttcagaccatcctggctaacatggtgaaaccccatctctactgaaaatacaaaaattagctgggcgtggtggtaggtgcctgtagtcccagctacttgggaggctgaggcaggagaatggcgtgaactcgggaggcggagttcgcagtgagctgagatcgcaccactcccctccagccagggtgacagagcgagactccgtctcaaaaaaaaaaaaaaaaaaaaaagaatgaggtaacttcttaatagttttcatatttttagactataaaaagtcaaatcaagaataatttttggtatgtaatggttcccaaaattgttgaacaaattttacttcaaaataattttgttctgatgggactttgagaatgggtatttctgggtcttggtatattcactcaccaccaaaaggcagcaataaaactggataaaattataaaaataatctctagaaattggccaaagagcatactgttgggaaatatttattccagaaagtccacataaatctcagtaaaaaagagtggatgcttttatccacctttgtctcacagctcagttctgtggctcagaagttgaaccctgggtaggcaagcagtctgtgtggactggaaactctgctgctccactggaggggagtgactttatagcgtggaaaattccctgcccaaggatcctattgaatataaagaggttacagtgggaagcaagtagagaagattagtatgtgtagaggatattagctggggcaagcaacaaagtggccagtcagtcaaaaatttaatggcaaaatttggagaaagggacagcctaaggacttccactaagatgaaacttactgatggtggttcagaagtcaatgggaatgcatatagctatgttcaatcaagaaaccagagaagtctctgtgagctactagtctccactattgattctagtctatctaaaccttatcatttccaattaaactacctaaattatctaaagtgtcacactctagaccatttcaacaatctttttagctcacttactctactaaatttgttccaaccattcaatgacactgatgctttttcactattcttttcccttcactttctctcttcccaccatacccaaattagattcaatggttcatcactgtaagtcaatcccttgcacacactctcctgcccattcctttctttctatctgtaatccaagttttagaaaacctcaaacctttgcaaataaattctctgcctgccctgtctctgaactgaagcagcagagtgtgtctacaagaaaaacaaatgcggtcaccgctccaagatggctgaataggaacagctctggtctgcagctcccagcgtgaccagcgcagaggatgggagatttctgtatttccaattgaggtacctggttcatctcattgggactggttggacagtgggtacagcacatggagggggagccgaaactgggcggggcattgcctcaccctggaagtgcaaggggtcaggggatttccctttcctagccaagggaagccatggcagactgcacctgggaaaaatgggacattcctgcccaaatactgcacttttccgagggtcttagtaaacggcagaccaggagacactctcctgctcctggttcggt

SEQ ID NO: 411 - DNA, 4001 bp, Homo sapiens
cacacacacacacacacacacacacactcactcacagtcacctatatatagccttgcaatttatttgcctatttacattttgcttttctttaggacactgtaagttgcagtgaggtgtggttagggttgtcattttcttccagcttctttgctacatgaagcacaacatagtgcttgataaatattttgctactggaagcatgcagctttctatgtatacaaatgtgttgcttcagtgtgttgtttttgctgtttggcaggtctctcagtagacacctaaatgacagtgtaacacacacttacagatcatttaacatctaggcaacctttagatagaatttcactgaagtttctcccagagactggattgaagcttgaacttttttttggtgggaggagggttaggaattgtcaaaattctacatatttctctcatatttttcacttattttcctctgctacccccctatttagaaatcctcatgtaatgccatgtgtaataggtgtataagccacttaataaataccataaacacagacttaagaaaaatcaaatacactcatacaatcgcactcctgtgattacaactcagcactaaaagtgaaaacaaaataaaacgaatttcaagggctaggcgtggtggcttatgcctgcaatcccaacactgtgggaggccgaggcaggcagatcacctgaggtcgggagttcgagaccagcctgaccaacatggagaaaccccatctctactaaaaatacaaaattagccaggcgtggtggtgcatgcctgtaatcctagccacttgggaggctgacgcaggagaattgcttgaacccaggagatggaagttgtggtgagccgaaatcacaccattgcactccagcctgggaaacaagagtgaaagtccatctcaaaaaaaaaatgaatttcaagcaatagaaataatattttgcaacatttctaagggcaaatatttaaaggaaagcatgttattgttcatgttgttctgttatgtcaggactgatgagaaactgttcaaataaaagttcaaaggtctggaaacattaggaaacagcaaaacagtaaagtaaaaactttttggaaatcaaagggtaaagcataatgatcgaaactccaagtacagacatagtttaattagtatcctagaccttggtagagattttgtttgcaattcctttgatatggtggccttaatttcaacatgaaataaaatgggaccatttataaaatatcataagaagccgtttgtagtattaataaagaggtgatacattacttcattctcaacatttaagagctcagaagaagcaatttcttgacagttcactggtttatatataaatgatattttctattgtttcagtaaaatatatttccctctgttgaaggataattcgattgaaatgggaattcctccattttaatgacctttaaaatttaaatgatcaaatctaggaaactaaaatccaaaaagcattttgaaggtggccaaatctttttgagattgattgttctagttagtggcattgcagagtgtatgcagaattacactaatacttcaccttgccaccgttagtatagcaggttttccctcatttaattcctctttacattctctatttggtggccatttacctttgcaacttagaggatggagataactaattttattctattttcctgctaattgcatgttagaaagtatttccataaaatagattaatattataactcatttaaaatattttcatccatttattcatttaaaaatatgtaagcatacacacaaaaaccgataaatgtatctgaaaaaggaactaaatattcaggtctgttttgaacttaccttctcccccaacagaggatatccgtgagattagaattacactgaccaggagccacatgcttggtagttccaatcttatataactaaaaatacttcagtggtggtggtgttgctttgaatctgctttcattaacagttatgagcatgactttgaatttcagtgtactaactggaagctagtttagtaaagtcctttgtggtaaacatcaaagttcatggagggttgtgcaaaataagcaaatagtgtctaatcagtgttttcacaataatactctgagtttatcatgtaatattaacttgagcaaaataaaagctgttcaatttccttgttgtggtccctgagtctctgagtttggaatattcagaaatgggccattgaagaggaaagaggaagccccttcttttttctagccaagagttcagctacatcagtaggcaagcaagtgaaggtgatcagtcctcatcttaacataacagcatcactgttctagttataaattccacttaaaactggtattaagaatgaggtaacttcagaccatcctggctaacctggtgaaaccccatctctactgaaaatacaaaaattagctgggcgtggtggtaggtgcctgtagtcccagctacttgggaggctgaggcaggagaatggcgtgaactcgggaggcggagttcacagtgagctgagatcgcaccactcccctccagccagggtgacagagcgagactccatctcaaaaaaaaaaaaaaaaaaagaatgaggtaacttcttaatagttttcatattttgtagactataaaaagtcaaatcaagaataatttttggtatgtaatggttcccaaaattgttgaaccaattttacttcagaataattttgttccgatgggactttgagaatgggtatttctgggtcttggtatattcactcaccaccaaaaggcagcaataaaactggataaaattataaaaataatctctagaaattggccaaagagcatactgttgggaaatatttattccagaaagtccacataaatctcagtaaaaaagagtggctgcttttatccacctttgtctcacagcccagttctgtggctcagaagttgaaccctgggtaggcaagcaggctgtgaggactggaagctctgctgccccactggaggggagtgactttatagcgtggaaaattccctgcccaaggatcctgttgaatataaagaggttacagtgggaagcaagtagagaagattaatatgtgtagaagatattagctggggcaagcaacaaagtggccagtcagccaaaaatttaatggcaaaatttggagaaagggacagcctaaggacttccactaagatgaaacttactgatggtggttcagaaatcaatgggaatgcatatagctatgttcagtcaagaaaccagagaagtctctgtgagctattagtagtctccactattgaatctagtctatctaaaccttatcatttccaattaaactacctaaattatctaaatattaggtgtcacactctagaccatttccacaatctttttagctcacttactctactaaatttgttccaatcattcaatgacactgatgctttttcactattcttttcccttcactttctctcttcccaccatacccaaattagattcaatggttcatccctgtaagtcaatcccttgcacacactctcctgcccattcctttctttctttctgtaatccaagtcttagaaaacctcaatcctttgcaaataaattctctgcctgccctgtctctgaactgaagcagcagagtgtgtctacaagaaaaacaaatgcggtcaccgctccaagatggctgaataggaacagctctggtctgcagctcccagctgcagaagatgggagatttctgcatttccaactgaggtacctggttcatctcactgggactggttggacagtgggtgcagcacatggagggggagccgaaactgggcggggcatcacctcaccctggaagtgcaaggggtcaggggatttccctttcctagccaagggaagccatggcagactgcacctgggaaaaatgggacattcctgcccaaatactgcacttttccgagggtcttagtaaacg

SEQ ID NO: 412 - DNA, 4001 bp, Homo sapiens
ttaatattcttttaatacattgtgtaaatatcatagtattcatctgctagagctaccataacaaagtactactgatttcatagaaatttattttctcacagttctggaggctactagtttgagatatagctgtcaacaggattggatgcttctgagacctcctcctttgccttgtaaatggttgttttctctctatgccttgcgtgatctttccctatacggtgtgttcttattttctcttcttatatggacaccagttatattggagtaggacccacctgaatcattgacctttaacttaattacatcgctaagcactccttctccaaatgcagtcacattctcaggtattgggaatttggactttaacaaatgaattttggcgggatgcagttgagccaatgctactgaattcacaaagatgtttctctctacccaagatgttattccactaaatgagttactttctcctttgagaaatataggtgcaacccaaatttacaagacattttgctcaagtttactcttacaaagagttcattggaggaggcaagttttccactggaatatcagataagaaagaatttgtcatcattcttttctatagtgcttttaagaaagtaagtaagaaaatatagtgcatatgcttctctaattccagtcatttcaaaatagtagtattttcttctttgcattctactttaatctatttagtctttatttgaagaaatgtacctgtaacagttcagttaaaaaaggaaataactggtgaaattcctttttttttccattttggcacagatcaagtttgattttgcgcaacaaataaaactagcaaatcatgtgatagataatactataaaacttaaagctctttccctagaatcaaataaagtggcatagcttcgcgaagagtggttgagggaaaagatagtctcataaattgataatgggatttccagtattaccctccattacattggctgaaatatgaagttttggataattacaaaatttgtattcttcattaatggacacacacccttgattgtccatgatttttgacccatgtggttccactgctaatgttaccatatagttctttaatatgcaaggcctgcattcaaaaagataattaatacagaaaatatatgactatctaggagaaatcagtgaacaatgacataacgctatgaaaagtattttctgtatatttacttattgaacatttgctagtgaactcagaaatgccaatcaaaacttactatctttccaatgtaagtttatattctattttttcattatatatgtatgttgctaattttgttgacgtagtaagttgatattaatgttaattagttttagcagctttcttaagctataatagaaatataagaaactgcataatttaaaatgtattatttgattttttgatatataaatctataaaaatcaccatatgtaagattatgaaaacatcagtcactcccaatgttccccttgtattacgtataggaaaattctgaacattttaagcttagaatctgtctaatgacatgtttcctacttaaagtttcatgagtatattcacatatctccataatcaatattaaatgccttttacactgtagaacttagaaaacaaataaaacattattcattttttctttaagttaaaatgagataattttttataaaattaatttctgttatactctcacaaaatatgtcacttctactagcatagtgaataaatcctctttgattcataaaataattatagacatacaaagctagatattacatgaagttacatttaagagggaagctgagtgtttagatctcttttaacttaccttgtccattagcacaggaaacccacaaggtcagaatgacattgattagtaacaacatgttagatattctcagtagtatgctaatacaaaagtttcagttgcactgtttggggtttgaaatctttcattattagttaccaagtgtggttctgaatttaagtgcactaccatgaagctaggggctttaaggtcatttagtaaatatcaaagttcagagagttttacaaaatgcttcaataattccagttagtggtttcacaatcatctgtggatttgattgcctgatatgtactggtacaattttatttaggcacagtaatggactgaatgcaaaagtaacataaaacattaatttactttatttctcattttttgagtaaagagagtttccataaagggaacgaaaggcttctgcaactattggaagaactgagggaacaaaggtcaaaaatgctatttccagaaaattctgatgttcaagagtcttagtgatgccctcactaattatctatggtgctgcagtggatgtttctcagcaaaacgtccagaatcaaagaaagctactgttggtgatctcagctgctaccagcagctgctaccagataatcccttgtctttctcttcttccaagtcttctttaagtacatctcatgggggaatctaagggagaagcaagctatggagaaaggaacttcagaaactgtagtttcaggctgatcttctgcaatgcagaagaaaatgaagataggaactgggttgatttcaagttgaaaataaacatctggcacactcatctcgtgaaaatcctgctgtttggcatggcaaggtttttttccccccccccacaaatggtcaaaatactcttatcccacatactcttcttaaaatgagaacactaattttaaaattaaacactggaaaataggtgagtttcttccacatacagatgaatcattaatgagtaactctcagggtccatgtctctaaaattttctgttgtcctttgctttccagtacccaacttaattacataaggttgtatgaaaacaaaccggtgtgtctggatcccattccactctctgtatttttatgtgtttagagtagcatactgattttcagaactcacaatagatcatactgagtacaaaagtttcagcatattcttgatatttaaatgtttttaaagttgtgttttggggtatcttttatttttagtacaatacattcatatatatatatatatatatatatgtatatatatatatatatatataaaattttctgttttgttggaagaatataactcaagtccacacatgttctctcattgacttcttctgtttattctttattttacattactatacttgccgtggtttaagatactgttcattaaaataagagaatcatggagagaataacatcagcaaaactgcagtgtaggagttctccagcttctctccctcctacagaaacttaaaagcaaccactgagagccaagattaccaccctgaatatcctagaacttagaaatgaagctataatatagcaaacaattaaaaataatagctacaaaattggttagagagtatgcaatttaaaaagttgtgagttgtaacatcaaaaattcaaaatgtgtgataaggtagagtaaaaatgtagagttgtttttttcttttaaaaagtgaatcacaagttgttatctggtaaaataagctgttataaatataagaattttgtgggcctcagaataaccacagcacaaatccataataattgcactacaagtaaaaagagaagagtcaaacaacactgatagaaaaaaatcatttaaccacaaaagagtgaagaagaaaggaagaaaaaaaatctgccaaatgactagaatataattaccaaatggcaatagttaatctttatctatcaataattaccttgaatgtcaatggattgaattattcaattaaaagacatagagtcggttagtggattaaaaagaaaacactcaactctatgcttgctacaagagacacatgatacctctaaggactcatagtctgaaagtaaaaggagagaaagagatattccatgctgttggaaaagaagagcaggagcagaaatatgtaaatgagataaaatggactt

SEQ ID NO: 413 - DNA, 4001 bp, Homo sapiens
tagaaatttattttcttacagttctggaggctaatactttgagatgtggctgtcaacagggctgcattcttctgaggcctcttcctttgccttgtaaatggttgtattctctctatgccttacgtggtctttctctatatggtgtgtccttattttctcttcttattgacaccagttatattggagtaggtcccacctgaatcattgacctttaacttaattacatctttaagctctccttcttcaaatgcagtcacattctcaggtattgggaatttggacttttacaaataaattttggagggatgcagttgagccaatgctactgaattcacaaagatgtttctcactacccaagatgttattccactaaatgagttactttctcctttgagaaatataggtgtgacccaaatttacaagacatttttctcaagtttactcttacaaagagttcattggaggagaaaagttttcaactggaatatcaaataagaaagaatttgtcagcattcttttcttatactgcttttgagaaagtaactaagaaagtagagcttattctaatctaatttcagtcatttcaaaatagtactgtttttctctatttttctgctttgcattctactttaatctatgtaatccttattttaaaaaatgtgcctgtagcagtttagttaacaaagggaataacaagagaaattccttttttttcattttggcacaaatcaaggttgattttgcacagcaattaaaactagcgaatcatgtgatagataatactgtaaaacctaaagctgtttacttagaatcaaataaagtggcatagctttgagaggagaggctgagggaaaagatactctcaataattgatagtgggatttccaatattatcctccattacatttgttggaatattataaagttttggataattataaaatttgttttcttcattaatggtgacacacctttgattgtccatgatttttgacccatgtggttccactgctaatgttacatacaatatagttctttaatatgcaaggcctgcattcaaagagatagttaatatagaaaatacatgactatcgaggagaaaacatatcagagaacaatgacataaagctatgaaaattatttatgtatttatttattgaacatttgctagtgaactcagaaatgcaaattaaaatttactgtcattccaatgtaagttaagtatatattctgctttttgattacatatatgttgtgatttacatattgctaatcttgttgaaatattaaattcatattaatgttaattagatgtagcagctttcttaaggtataatagaaatataagaaatggcataatttaaaatattttatttgctgttttgatatatgaatcaataaaaaatcactgtatgtaagattatgaaagtatcaatcactcccaaagtttcccttgtattatgaataagaaaattctgaacattttaaggttagaatctatctaatgacatgtttcctacttaaagttttatgagtatattcatatatctccataatgaatattagatgctttttacactgtagaatttgtaaaacaaagaaaatattattcattttttctttaaattatgagatattttttcataaaattaatttctgttatactctcacaaaatatgctacttctgctagcatagtgaatatatcctatcagatttataaaaaaattatagacatatgaagttagatattacacgaagttacatttaagagggaagctgagtgtttagatctctttcaacttaccttgtccattagcacaggaaacccacaaggtcagaatgacattgattagtaacaacatgttagatattctcagtagtatagtaatgcaaaagtttcagttgcactgtttggggtttgaaatctttcattattagttaccaagtgtgattctgaatttaagtgcactaccacaaagctagggctttaaggtcacttagtaaatatcaaagttcagagagttttgcaaaatgcttcaatgattcttgttagtggtttcacaatcatctctggaattgattccctggtatgtacatgtacagctttatttagtgacagtaatggaccaactccaaaagtaacataaaacattaattcatttttatttcttattttttaagtaaagagagttttaatacagggaatgaaaggcttctgcaactattggaagcattgagggacaaaggtcagaaatgctatttccagaaaattctgaagttcaggaatcttagtgatgccctcactaattatccatggtgctgcagtggatgtttctcaggaaaacttccagaagcaaggaaagctactgttggtgatctcagctgctaccagcagctgctgacagataatgccttgtctttctcttcttccaagtcttctttaagtacatctcatgggggaatctaaggaagaagcaagttatggagaaacaggcttcagaaactgtagtttcagacttatcttctgcaatggagaagaaaatgaagataggagccgtgttgacatcacgttgaaaataaacatctggcacactattctacttctgaaaatcctgctgtttgagcatggtaggttgttttttttccacaaatggtcataatactatctcctatcacacacatactcttcttacaacgagaacactaattttaaaattaaagactggaaaattgtttgaagttcttccacaagcagatgaatcataaatgaatatctctcagggtccatgttactttaatattctatcgtcctttgcttcccaatacccaacttaattatttaaggatcgtatgaaaacaaaccagtatgtctggaccccattccactgtctgtattttcatgtgtttagagtagcatactgattttgataactcacaatggatcatactgagtacaaaagtttcagcatattcttgatatctcaatctttttaaacttgtgttttggggtatgtattattttaaggtacaataaggaacaatggagataaccattaggtctggctgcctgagagctgggaagaacagagccacatttctcttcttacaaaagcaaataggagaaatatcactgaattctttctctcagcaaggaacagccctgagaaagagaatgcattactagggggagatctctgaaatggctgctctgggaatgtctgtcttatacggttgcagataagggatgaaataagccctggttttgggtagtgctcccaggcttattaggacgaggaaatcccgcccagtaaattttagtcagacgggttgtttgctctcaaaccctgcctcctgataagatgttatcaatgacaatgcatgcctgaaaattcattagcaattttaattttgtcctggtgctctgcccccatttgccttgtgatattttattggcttgtgaagcatgtgatctctgtgacccacaccctattcgtacattccctcccctttgaaaatcactaataaaaacttgctggttttgcagcttggggggcatcacggaatctgccaacatgtgatgtctcccctggacacccagctttaaaatttctctcttttgtactctttccctttatttctcagaccagctgacacttagggaaatagaaaagaacctacattgaattgccaggggctggtttcccccgataagccccaaaatctattttaagagcatttttcttaattcatttatactaaagcatttatgacaatgctagtaataaaacaggtcactacaggtgtatattacattttaaagaaaatcataacagaattttatacattaaaagtccaggctaaattgtagttgagacatatgtaaaaagggaaaaaaaggattaaaaagatgaattcctttgttatacaagacattttctctttcataataagaaaatcttaaaagaataattaataaaaatttactaagatttttttatg

SEQ ID NO: 414 - DNA, 4001 bp, Homo sapiens
ttattgtaccttttatatgtttaggtaaacacattcttacatttgtgctacagttgcccacagtattcagtacagtaacatgctgtacaggtttgcagtctaggagtgacaggccgtatagcttagttaggtagtaggctatacaatctaggtttgtgtaagtacactctatgatgtttgcaggaggacgaaattgcctatagacacacttctcagaacgttttcctatcattaagtgatgtatgagtgtacacacacacacacacacacacacacacacagacaattacctatatataaaaccttgcaatttatttgcctatttacattttgcttttcttttaggacactctaagtagtagtgaggggtgggtggcgttgtcatattctttccagcttctttgctacagcatgaagcacaatatattgcttgattcatgttttgctactggaagcatgcagttttctatttgtacaaaagtgttgctttcgtctgttatttctgctgtttggccagtttctaaatagacaccaaaacaaaagtgtaatgcacacttacaggtcatttaacacctagacaacttttaatagaatttcactaaagtttatcctgggactggactgaagcttgaaagttttgtggggttaggaattgtcaaaattctacatattatcctcataattttcacttatcttcctctgcttccacccccctttagaaatccttgtgtaatgccatttgtaacagatgtttaagccacttaataaatatcataaacacagacttaagaaaaatcaaatacactcatgcaatcgcactcttgtgattatagctcagtactaaaagtgaaaacaaaataaaatgaattttaggcccatagaaataatgttttgcaacatttgtaagggcatatcttaaaaagaaagcattttatggttcatatttttctcttatgtcaggactgagaagaaagtgttcaaaaaatttaaagatctgtaaacattagaaagcagtaaagcagtaaaataaaaactttctggaaatcaaagagtatatagcacaatgattgaaacttcacgtacacacatagtttaatcagtatcctagaccttgttagagattttgtttgcaatccttttgatatagtggctttaatttccacatgaaataaaatgggatagtttataatgttataagaatcagtttatagtattaataaagaagtgatatattatttcacttttgaaatttgtggaagagctcagaagaaacaattttttggcagttcactggtttatatataaaaataatattttctattgtttcattaaaatatatttccctgttgaatgataattaggctgaaatgagaattccttcattttaataacatttaaaatgtaaattatcaaatctatgaaaataaaattctcaaaacataatgaaggtggccaaatcttttggggttgatttttctagtcagtggcattgcagagtttatgcagaattacactaatatttcaccttgtcatctttattatagcagattttctctcctttgatttctctttacattatctatttggtgaccatttacccttagcaaactagagaacggagagaattaatttcattcaattttcctgctaattgcatgttggaaaatatttccagaaaatagatgaatattgtgataccccttcaaattatcctcagctatttattcatttaaaaatatttgtatgcatacacacacacaatcaataaatacatttgaaaaggaactaaaatattcggatctgttttcaacttaccttctcccccaacagtggatacccatgagattaggattacactgaataagagcaacatgcttggtagtctcaatcgtatataactaaaaatactccagtgatggtggtgttgctttaaatctgctttcattaacagttacaagcatgactttgaatttcaatgtactaaggggaagctagtttagtaaagccctttgtggaaaacatcaaagttcatggagggttgtgtgaaataagcaaatagtatctaatcagtgtcttcacaataatattctcagctcgttatgtaatatttatttaagcaaaataactgctgttcaatttccttgttgtagtcaccgagtctctgagtttggaacaatcagaaatggactgtttagaggagagaggaagctccccaccgccggccccctgggttttttttttttttctagccaagggttcagctgtttcaaaaggcaagcaagtgcaagtcatcagtcctcatcttaatacaacaatatcacttttgtagttgtaaattcccttttaaaactggcactaagaattaggtaccttcttaacagttttaatatttcataaactataaaaggtctaatcaagaattatttttgctggccgggcgcaatggctcaagcctgtaatcccagcactttgggaggccgaggcgggtggatcacaaggtcaggagatcgagaccatcctggctaacacggtgaaacccgtctctactgaaaaatacaaaaaaaatttagccaggcgtggtggcgggcgcctgtagtcccagctactcgggaggctgaggcaggagaatggcgtaaaaccgggaggcagagcttgccgtgagtggagatcgcgccactgcactccagcctgggcgacagagcgagactctgtctcaaaaaaaaaaaaaaaaaaaaaaagaataatttttgccaagtaacgtttcctgaaatgtttgaagaacagaattataattcaaaatcattttgttcaggtgggacttcgagaatggctatgtgagggtcttggtatattcactcccaaccaaaaggcagcaataaaactggataaaaatttaaaagtaaccattggttgtctctggaaattggccaaacagcataatgttgggaaatattttttccagaaagtctccataaaattcagtaaaagagagcggatgctttcatccacctctgtctcgcagcccaattccgtggctcagaagttgaaccctggatgggcaggcaggctatgtggactggaagctctgctcccctgctggagaagagtgactttatagcttggaaaggtccatgcccgaggatcctattgaatacaaagagattacagtgggaaacaatcagagaagactagaggatactagctgaagcaagcaacaaagtgcccagcctgagagaaatttaacatttaatggggaaatttacagaaacagcctaatgatctcactaagaggaaacttacttatggtggttcagaagtcaatgggaatgcacatagctatgtccaatcaagaaaccagagaagtccctgtgagctattagtagtctccactattgattctagtctatctaaaccttgtcatttccaattactacactacctaaagtatctaaatattaagcatcacactctagaccatttcaacaatctttttagctcacttactctactaaatttgttccaaacattcaatgaccctgacactttttcactattctcttcccttcattttctctcttcccaccacatctaaattagattccatggctcatcactgtcagtcagtcccttgcacacactctcctgcccattcgttcctttctatctgtaatccaagtcttagaaaacctcaatcctttgcaaataaattctctacctgccctgtgcctgaattgaagcagcagagtgtgtctacaagaaaaacaaaggcaactgtgctgacttgccttgctttaaattaatgaacacggtcctaaataatttccacactgcttttcccctctcctgttttcattatctccctccttaaccaccaatcctcactttgtgctttgctaatgacttcatttattttttcatctagatatagaatcaatcagaagaaaactacctgctgttcacacgcatccttttctgcattgtctcttgcttcactggatgtt

SEQ ID NO: 415 - DNA, 4001 bp, Homo sapiens
ctgcccaggtccgctgaaagagcagaaacctgagagccaggctacagctgcttggccagtagggaaaaaaacacaatgaggaactgggcccctgcaaactggctggactggtttgagaggcaaggggaaggggagggccggggaaactacactggcagcttgtaaagcagaccagagaaattccacaccacggaggaggcagaggggcaagaccacaggcaggggctctccagccttgatggcaaagccaaagctctgaaggagaggacagagggcagggagggaacaggcaggaggagcagatgaacaggaacctggtgacaggccagtatgtgacagggagactttgtctccctccacccctccctttgaggttcccaaagttgcattcctgatcccacacttgctttggccacctccctggtcctcagtccgcccctccctggcacaaagagaagagccctacacccccatcacctcccacaaggggaatggcatgcaggccagcctgggaaacacaggaagggttctaggaagccagaatcctcttagagtcgggcaaatctctggattagcagtcccccagagccagcccccagactcccaaacatccaggatgaaagaagagatgcataggcatgtgtaggcagcccatctacaaacatagcggttgctaattatttcccaattacaacaaccttcctcaggcagggcttcaaaggggccaagctaaggttgactctagttcctttacctgcctaaggcaaagaaatttgcctccagtcttgtctgggccccaaggtgcacctttcatctgtcctggggatttggagttgtaatttccctagtctcgtggtctcctgatgagtcctgcctatttcctgccccaatagtgcctgctgccattctgacagccaccgcagttcaggagtcagggatgcctggagggcgttcagggagtaatggggattcctccagacatcaaggaaattggttgggctcccaaacctcatccaatggtccccatctagaaccacagaaaaaatatgtgggtacttggagaaagggtttgacatccgcccccagaaaggggcctcctgagaaataagtattaatatttatcaatattttgcaggaccaggcagggctctttgcttcctcatatccctctcttggggagtactctctctctctctcaagaggaagaaggaacgattctccctggcacgaaagcaaaggacacaaagtgaaagcctaatggttgtacacctggtgaagagatgagggtgccctctcatctgcccctcagtgtctctgattcgcaactgccttcggccggaggtgaagggctggggaaaaaatcccacacctcagagtcatctcaaagccaccagggtgctgacaacggccagctgagaccgcaggacgcaggaaagaccctcaggcgagcagcacctgcagatgccctcccctggcgagtctgcacctcaggcagcagcagttcccgactcagctggaactaactccttccccgcgccaccgctgtctccaagagaaattctgcccctagggctggcgtctgacctccagagacatctggcgctgaaacgctttcatgcgctgggaacagccttcgccccaggtgcccctcgcctggcaccttcctagccacctgcatctggcacctcagggtaggggtcggctcttaatcagtaccccaccccgccccaatctcccctcctcccgtctcccactcggcaccggtgccctggagaggggcatctcacaccgcctcgatgcctgcccctcaaaggtacccctgaaggctcgctttcctctcgggtgccctggcccgcaccgggtccactcaccctagccgggctccgcgctcccaggcttgcgttcgggctcgggctcgggctcgggctcgggctcgggctcgggctcgggcaaagcagcacgcgcagctccggccctccccctcgtcctcggagctccctcctttctctccctcccaccaacctgttactccgctgcggagctccacccccgcgggccgtcagtgcccgccccgcctttccccgctccggttggtccgcttcccgtagggggcggggcctccggtgcggggaccgggacccggggtctccagccgcgaagggcgggccaggtcacgtggacccacgggctgcggagcgtcggggcggggcggcgaggggcgcggaggccattttgggggcgtcgcggatggtcgcgagtgaccgccggccaagatcccgggagccgtcggccagagcatcttctgggctctgctagaaaacagcctcctgcctcccgtttactccaagggaatcgccggccagggccctttctgtccttcacctacctctgcaggaaccagaatgctctttcgtcactttctgcagaaaatatctccgttgtcccccgacgtcagagcctcctgcacctcagctcgtctcccttttccctgacccgaaccagaaccctgatcttggattctcttttatcttgtggcctccgcaatcattttgcagcctgacatctttttctatgtaatatttatcaccttctagttaataacataattttaaaaatcattttcatcattttgcctcccgtcctacgataagcttcaccagagcaaggatctcttgttctgtgccttgcttcaccccaaacgcctacaacagggactggtacatactacatgcttaataaatatttgttgactgaatgaatggaaaccggggacgcaaatttaccaaaataggaatgaccttcgttctaaactgaaagggactcagttgtaaatttacctcagagttagcctctcaaaaagtagggatgctgatcccagttcctagaaaagagtaaaaactaggggctctgcaaactgcaggaccgctcataccagctgcagttaaaacaacattaaagctggcatcctagctgttaaccgttgagatatgtaaaaaagagattgacttcgtttacgttgctgggctccggattttgttctcatttagttacaacaaatatttaccctgtatctattggagtagaagaggaatcttcgatgcagcacagattccggtgtattctcgggagctggtttccgcccctccccaagccttcaaaagctaggtgtgggtcctacagagtaaagtccacttaccagctcctcagctgggatgcaaagtctctgcattccagagcaagctgtatataaggattagggccatcaaaccggcctgttccctggggaggaacagcaaaaaacatgtagtgggggtggggacagaagaggaaatgtccttccaggagcgcacctcctgaacactgggtggcttttaaaagacttttttttaaaaaattttttcttatttttcttttattgtgcagcctcctgaaccagaataggttcagagacactcccatgggatggtttttggtttgggttttttttgttgttttttttttttaagacggagtcttgctctatcgcccaggctaaagtccagtggcgcaatctcggctcactgcaacctccgcctcccagattcaattgatttccggctaatattttgtattttttaataaagacagggtttcaccaggctggtcttgaactcctgtccttaagtgatctgcccaccttggcctcccaaagggctaggattacaggcgtgagccaccacacccagcctgttttgggtttttttgtttttgtttttgctttagttttgtttttttcattgagacggagtctcactctgtcacccgggctggagtgcagtggtgcaatctctgcttactgcagcctcagcctccaaagctcaagcgatcctcccacctcagcctcctgagtggctggaacttcaggcgcccaccaccacaccgggctaattttggcatttttagtagagatggggtttccatgttgtccaggctggtcttgaactcctgaactcaagcgaacc

SEQ ID NO: 416 - DNA, 4001 bp, Homo sapiens
cctccaccagaaagtaaaagaaattatacaggatagagaacatgttaacagtaaggagattatggagattaatatttattttctttatgcataggctatttccctgaatgttttactgaaaatacgtactacttctgtaaccaaacgaaaaaaaagtagtaagaatttttttaaccaactcatgaagaatagtttctcataacactagtttattctggtaaacagaaatagaaattacaagttataatattcagtagccattcctttgactctgcttttctattttccttctccactaccaatttatccaagttgccacatttgcctacttaattctgaatttactcactccattccatccactcaaacttgcaacctcttgtctcctcattttcactaaaacacttgcccatatgtacgtttctcctggcatattatccacagctaagtatcaactggcacacttttctgagccctctctcacacaagttcttaaagaaccattcccaacacttgcaaggaaataggcaaacccacaaacataaactttcgttaagataaagtcaaacataaaaagaccagtctacaagctcatacttaaaactggatacatactccttacagccacacattcttacagactcagggaatcaaggagagaggtctttctctttcatgtcagcgtcctctccattcaacttcatctttcagtcttctaagctgaacacagaattgcaccttttgtttcattcctagaatgacaaaccttactctttcgtggtactgagcacttaaataaattagtttatacttttaaatgcactctcactagtctaaaactctaggtaggaagggtccctatttgttttgctcatctttgtagccaatgcctaagaatacgctcccagtagcattcaataagtaatgaataaacgactgtattattactgatgcatgattctgtcaatacagtcaaagcacacactacgttcccaacttataagtaaggaaaacgaggctggggcggttcagcggcgagtcagcgcagacccaggaggagagcggggtctcggagctgcaggaagtacggtcagccatgcagcggcagggctggggggcatgcaaggttcgcgctttgcagactctccgtaagggctagtgtcaataaatcgagttacgtgcggtggtgagcggacaagctaagttggcatatagtacgtggttcagtcagtatttatgaatgactcaagacacaaaaatagcttcataaacagtgctttgcttgagtttgtccgctcactaccgcacgtaactcgatccggagaattaatccgtggcgaattctccaataactgcgcgcgcacagtaaacggagaagctgaagctgggagatgagttgatcgttttacagaagcaaccaataaactccccaggccgggacccaaacccaccggaacagcaactggaaacctacatccttggtgcaccaggccgtccaactcttcagcggaggcctgcaggtggcgctgatctcaccacgtttcccctccacaggccaggggccaggcctggctaccgggcccgcgacctcattcatctggcgtccgccggccccgcgcgccgcgcaggcgggggccgtggccaccaagcccgggcgcagtttctctccgcccacggcaggagcgaaggaaggccctggcgcgagcgggtaaactgcccaccgggcggcccacccgctgcgcccccggcccgcaagaggcagtcccaataggttggcccgcctggccgaagtccgcccggagcccgctcacctgtcagcccccactgccgtaagtcctgctcctgcacccgcgccgcctcggctcggccctcagtatgaagccgcagtaagaagccaggggcttggcccccgcggctagtagcgcccgcgcgctccatcgggccggtagaggccccgccccgcgcggccaagcgcgcacctccctcccaacttcccaacgcgcgggggcgcgcgactgcgcgctggggcccacctacgagcgaggcgccgccagagggcgcgtcctgccaagatatccggagcggagctggtgcagtcacccttccggacaggcagttcttgcagtgcggagcgtggaagggctgcccagttctcaccagtcgtgcttctgaagcgctaggcgtctgatcacgcacaggacgtctgattgcctgaactgcccgtcaaggaggtggcatgtgttcatcattcatttattatttaatcaacatcgactatcatgtgtcagacactccgctgggccctgggggttctagaagtaagacttgttccgtgccctccagtgattcacgataagatcaaactgttcttgttcggtttacctagtgataaattgatttagtccctgaaatccctttcttactgcctgtgacctgtaggccaaaattgggaacctctgaatagtagtaaattaaaatcaccaaagacgtcattgtggcagtgggtatctcaagtgcattatggggagcagattgaggcaatgtgttcagttaggggtcaccgtgactcagcatcagctttgagtggatttatgatgtagtataccactaatataaatatgataataacaaaatagctgcatttattgatgaagttctgggtggtgtcctaagggctttaagtatattttcttatttaaccttcacaataaccaataattaggtgttataattgtccccacattgtaaatgaagatattgggacttgtaatggtaattggcagtactggaacaggaacgatattattctctggctaatgtcattagaatagtattctcatttaggttaatcttggtgcttccttcttcagtaaactcatgttaaatttgtaccctccattctcatcttcctctaaaataaaagggagaaatttgttctgagctagaaaagggatgacttcagattggtttattcataaaaactcaagcaaagcactgttttatgaagctatttttgtgtcttgagtcattcataaatactgactttcatgcgcgtccgtgtgaagagaccaccaaacaggctttgtgtgagcaataaagctgtttatttcacctgggtgcaggtgggctgagtccgaaaagagtcagcgaagggagataggggtggggtcgttttataagatttgggtaggtaaaggaaaattacagtcaaagggggtttgttctgtggcgggcaggagtgagaggtcacaaggtgctcggtaggggagctttttgagccaggatgaaccaggaaaaggactttcacaaggtaatgtcattacttaaggcaaagacgggccatttaaacttcttttgtggtggaatgtcatcagttaaggcaggaaccagccatctggatgtgtacgtgcaggtcacaggggatatgatggcttagcttgggctcagaggcctgacactgactgaattacatactatgtgccaagcactctatggtactgaagatagaggccacttatctcctggatcttacattttaaaaggaggagacaagcaataaataaaaatcaggtagtgaaggggtggcctgcccctccacacttgtgggtatttctcgtcgggtggaatgagagacttaagaaaaaaaagagacacagagacaaagtatagagaaagaaaagtgggcccagggaaccggcgctcagcatacagaggacctgcgctggcaccagcctcagttcccttagtatttattgatcattatcgggcatttctcagagagtgggatgtggcaggacaatagggtaatagtggagagacggtcagcatgaaaacatgtgaacaaatgtctctgcatcataaacaaggtaaagaaaaaagtcctgtgcttttgatgtgcatacacataaacatctcaatgccttaaagagcagtattgctgcccacatgtcccacctccaggcctaaggtggttttctcctatctcagtcaatggaatatac

SEQ ID NO: 417 - DNA, 4001 bp, Homo sapiens
gggcgtctcttctgcagggctctgggggcactcctggaggctctggggccaacccaccgagggggagcacgggtggtgggcaggatgaccagagccccgcctctctggcccaagcagtgagtcgggtgcctactagactgggggcaccttccctggcctcttcccctccccaacctctaagtccccacatagtcagagagagccggagtgtaagatgggaaagacagccaggggactccaccagcgggtcggtgcaaccccagaaatgccactgatcccacaaaagggccacaccccaaacaccataacaaacaacttgctgagaaaaccagtaaactggcttactggggagccagcctcctaggtggaaaatggccactgatttttttttgtgcctgtgcggggcctcagagttcccctccggagaatgggtctaattccaaggacccaggatatgacagtcaactattgtccaggcaactccaccccaagagaggactcccctattccccgtccccagcacgctcgctgccaacttggcctgtctaacaggcgaggtgagtgccgggctcctgtaggagctcagtgacagcattaaagccaccaactaaccaagcaagcaaacagaagggggcagggggtgtggccacctggtgggaataccctccccagaagacgctggctgcttcctccaacaggagctggaggtgtccatttgtggagtcttctcacccctggaagtcagaaggggccagatgcacgttcctgggcccgggagggcctccagcctcccacaagtctctccgaagtccagagaggccacagacttggcgcagggaagccgagaagtaagagtctcccagaaaggagggagggtggctgacagggtggggccctacccagctgtgccaggagggaaaacgtcccaaacaaatggtgagcagttaactaaagaactgtcccgcaaggcaacccctggcgcacagccctgtgtatactaaattctgagagagataaaaggagagagatggtaggggcaggggcggtggccctggggcgtcaggcccgtagccaaggcagggtgggctgggaacggccaccaccctgggcgatggtgaggctggagacagcggcgggcgctaggtcgcgccagaaggacgccggcggcccgggtaaagtgcttgggagcggcggtcacagcgcacagaggccaggaaagaggagcaggggtccgagcccgtgcgtcccagagcggagtcctcctgggccgggagggaagccgccccatcctgggcgctcaacgcgtccccaagcaccgccggtcctcgcccctctctgggccccacccagcccgccccgcggccgacatgggccaggggccgggtcccgcctgcccgcagcgaggccagaggcgcacggcggcgggacgcgagcgcggggtgcgccgctccgggagctagcgcgattcccgcccccttcaagggcacgcgggctgaccctgacagcgccgcgccccccagcgcaggccccggcccgcggtcctctggcccgcctggcccgcgtcgccgcccggggggcccggatcgcaccccgcccttagccgccctcacgccggcccgggcgctcacccagccttcgcccttggccgcgcggcgccagcagggcgggagcgcagccccgcaacccgggtgcccctcctgcgaggcgccagcccggccgcgccgcccccgccgcccgcgctccgccctgggcccggcccgtctcggcgcccccgccgctctggccccaggcgcacccgcgccccgctcacctgacatctcgtcctcattctccatctcctcggcgaacagccgcggcagctcctcctcggtgcccactgggccccgcatgcccggcgcggggaggaggggaggtgggcgccccccctcccgccgggcgcggtgccagccttaacccgtgcgctgccggaccggcgcgcgcggcgggcgaggcggcctcggcgagaagatggcggccgcctgcccccccacccccccaaacctccacccccccgtctcgacccccctttctctcggccgccttagcctgctccccgcaaagcccgggcgctcctcccaccgcgccccgcagcccgagtcccgcagccggccgagggtggcggcggcagcgccagaggcacggcggcacggcgggggggcggcacacatgcccggattgtgacgtccagtctggttgctgtggcaaccccatcccatcgttccggcagcgcgactagttaacagcagagaacaagttgggggactagtcctgagccgccgggtgagggtggggaccggggggcgccccggcagggggagccgtcgaggcgtccgcgcgcccgcggacccgacggccgagcgggcagtcggggcttggcgagcccgggcgcagggggaggcgaggaaacaccgcccccgcgcaccccgggcagagccagccgccgccgctcgcctgcgaaggcgctgggccccgagcccccaagggcgcggaggcagggtcttcagggcagcgcgcggcccgctcccccactcggttcacaggcgccgggacccaccccgctcccggctccggcctcggcacgttcctaaccccctctccaaagaggattagaagaaaaatgtgttccacacttggggaaaagacgctctggagactgtgggtctgatttacagcagaaaaatccgcgcaggcgggctcccctcacctgcttccccgctcccaccgcccacgtgcccccttccaaaaagcccctccaggctgggtgcagctgaaacccatgcagacccctaggggtggtgcggatctgcgatgtctgtgcccaaaactcccgctcagaagcgacacctgtcgcagagcaggaaggagccgccgccaccagccctcggtcgttaaaggtgaagatggaggccaaagccctcgggagcaagactggaattttaaatgagcgcctccagtctccgcggcggcaagtcttaaagctaccttaagaacgcaaaagttccaggggctggccgaccgccagctctctaaccccagaaggcccgtgaagggagggccccctctcactgcctcgcaggggcactgggggaacccacctgagacacgcaggatcggcagcagtttcccttcttcccgttcaattttattgccagcaaaccccaaacaaaagaccctctgcattcatccctgggcaaggagaggtcggtccagccttctggaaccaaagactggggtgttgggaacccctccatctcccagatccgctttaactacgctgtagatagagaagccgggtcagcccagtgctggccgcctgcaaggggaaaggaacactcttcagggaagcaggccaggaaaccaaagggcctcccctcccaaggccgtgtttccccacagagcagctagccagggggagccccagatcaccgaggcttgaaccaaacctgcctcttcctcgttctttccagaccaactgcctccatgaatggtgaccaacaagggaagaaagccctaagctgacacgcccacccctcagttaccagccccccaacacctctctaatccctttcaaaggtcccctgcccttcggtagaaaaactctgatttacaatacttctcatcaccagaaagccgcccccatcattaaccctggctccaattcccaaggcgaggctgaaagtcaagatatcgttcaagaaagaacagttctaactgcttaatctggcaacaaattagagccgagatgctcatcagtcataatcctctccccatcctgttcttcccgatgactgcaactaggtaatattatttaatgtccaaaagcaaaatgaaacaaaaactggaatgctagaaacaaatggatttttttactacaaatctccaggttttttgggttttttttttcaagggggggagttgagatggtgtctgtcgtcaggctggggtgcagtggcgcaatctca

SEQ ID NO: 418 - DNA, 4001 bp, Homo sapiens
attcatagtggtggatctctgaggggtcacaggcttcatgggagttactctgaggtctgctgcccatttttgttttccccagtggagaagacagagtatggcaaagtagagtcttgctcattttccatgctccctggagagcacgttaggggcaggagagggttcccctctcccagaggggctcagctgcgcttccgtctacagtctctcatcaccccaaatattgcccagcacctacagtcatcccctccacccatttaagccaagcccctctaactctccaaacataggtgagcagggtggggcctcgcccttcctcctgggtggggttgccctgccctgggaccagcccagctggtccctcctctcctggccagccctggcccaacctgttcttgagtgtgttgagcatgccgtagagcgtcacatcattccactcccaggtgtcgatgtgatcgttgcttatattggcaaagctgtagatgatgtgggtacagaggaagcggtcaagggcatctgggaagcagctcccatcgccttcccggtactgggaccagctggtgtagtagcagaccagtttgtatgcagagcctgaaggagaagtctgggatggggcccgggccaggattcggcaagagacctcaggctgagcccagagctgagcaccaatggggtgtggggttgggtagggaggagtggggtgcagattgtgagcaaagtcagaattcttaaatgaaaggagctggttcaggtccccctgcctctggggagttccctgactggtgaaaataaggcctattctgaaaatgcttagaaaagatccaatgcaggggatgaatacgctacaggcactgtgtgggggaagggtaggagctggggaataaggatgaaatgggacttggtgccagcacagcaggcttcctggaagcagtggctttgtgggaggggaaggcccaagatagcctgtgtcacagatggccctggctttcaggctggcacctttagtgacctgcagtgaggtccttcatccatgagggactctggcccacctttctctgcctcctggtgagagtgcctctaacttgtaacccacccggaatggcagtcctgtgctccctcggcatgtcccccaggctggggcacaatatcacaatggaccaggaaatccttcctcgcctctaattctgtttctcctgctgcaaacaatgtgggcatcactcatccaagcagctactgggcaactgtactagcggctcccaggggctgttagtcaaagccttcactgaaccaggaccttttaaagtttcttattttgagaattttcacatataccaaagagtatagcaaaataaacatccatatactcctcactccagtttagcaaacgtgactatttcgaagtcattggaagcacagaagaacctggcaaagtgttcccttggagctaagacctcctccacacctgccctgtgccctcgccacgcctctggacttaaaagtggaggtggagggattactcacagcactggagcagcaccaggaccacaaagcctgaagagaaatccaggatgagacccctgcaagtgcatcctgcccttccgccctgctccctcccccaagcaactgagacccacctcccccacccccacctcctggttgcagcctcagtccctcccctggctctgcttctcctccccctctgcccactcccttagtccctcacccagcaggcagatggctctgcgggctgtctgggcctgaaaacccacaactctgatggattaaccttggctagcccagatacctgtttgagacgccttcacacccattctggctgcagcagagcagggcagggtgtggcctcttcccttgcccacggctcctggtgccagctacctagacagggcctcttccccaggccctgtacttcctttatatacctgtcccactccactccccgacgcggcaaaccagcccttttatgggaactgagctatgtgtcaatgaaggaatcacgaggctggcaagtggaggcgggggagtactatggattaccagaggagggttgagaaaccgcagagttttgaaaactttgggtcaggtcttcatgaggcacctgccagcagaagagccactagggtgatgatggggggcttctggagatgtgactcagccgcatttcccagccttcctcccactcctgcaccccaccactggcctttcttgccagcaatttcctggcttttctggcagcctctacctttgcatcttcagcattcactccaggcccctggccaggtggaaactgggcacaatttagttacgtaagccacagtgccctaaacaaggctgttgttttcttcccaggctcagcattgccctgcttgacctaccttcctaccctccccctcacactttctgtcttcaggctgggtaagggccagagagcctcgggaggaaggaaagcaaagagcctgaaactgagcgctcccttttgggcccgtgtctttttttttttttttttttttttttttgcaatttacatgctgattatttagagggaaagacagggaaattcccaagaatgctttaagccccggtgctattttgcttctgttttgaaattcccataaagagagaggatcttttgcaagctcggtgctgcagtgaggcaccatggaggaaatacaggccctacggggcggctgcacgagcatctgacatcagtcagctccccaactctctcagtgaggctttggaacccaagcctgatgatacagcccctctctaaatccttcagtgatctctcatcactcctaggacaagaacaaaacttcttaacgaggctccctgcctgattacgtccctgtttgtggatacattttttttttggccaaatatccaggacaactccattctttgcaggcttaacattaattaataggcagtgagtgaaaagttcagaactccaagaggcagaatgggtccaagggcttctcaagaaagtacctttatttttcactaatgttaggtaatactctaatttttccaggctggttttgcagctctctcggtgaggtctctctgctctctccctcttctctccctctctccctttctcttcctttaaaactcagccagtgccttcccttcattgtaagagaggtggacaaaaagtggcttgtccagaatcacgctcggtgaatactaaagaggcatcacttttcctttttaagatgactgcctccttttgtacccaagatgattgacagcaatgacagtcaatgatagcttcttctggttcatttggggcactgagaggaggacttctaatttctaatagtgatattatgaagtggcatgcagatgcaaaatttttcatcacagagcacaggatgttaagaaaacacctcctattttcactatctccctttgttaaaaattatttcataggcttagattggcccaagccttgttgtcctatgctccctcaagctcagtttattaattccacatgctctgcctgaaggcagctttgtaacaacaaatggccaagatacccccaggcctgtgttagcaggattggccaagggtctcataggctcaccacctcccagccttatctcaggccatgacccccaccctccctatattccactcatgcttatatgtcttcttttaaatccttatatttgctctactgactcccgccacagggcctttatatatgacatccacttgcctgtaaataacgatgaaagatctgagattttatgctacttgcaaattaatgacataactacagtttcgtggatgttggcagaagacacgagactcctaggtcagagacaaaggactttattatccatggtacagcaagcagcatgaacttcatgttagggtcagttccccttagccctcaggtctcacaagggcagtgttggaggagcccaggtagatgccatgaatgcaatgagttacatcacagcagaggaatccct

SEQ ID NO: 419 - DNA, 4001 bp, Homo sapiens
cccaggctggagtgcagtggtgtgatctcggctcactgcaagctccgcctcccgggttcacgccattctcctgcctcagcctcccaagtagctgggactacaggcgcccgccactacgcccggctaattttttgtatttttagtagagacggggtttcaccgttttagccgggatggtctcgatctcctgacctcgtgatccgcccgcctcggcctcccaaagtgctgggattacaggcgtgagccaccgcgcccggcctgtggtttctttataggaccttgaggtccccagccctggggtgccttgtgtctctacattcctaggcagaaacatgttccaagctgggaatttattttttcattcatttatccaacaaagttttattgaatcatatgctctgtgctaagcattgctcaggacactggggaaattataatgcagttaatgccttccctgcactcaaggagctcatagtccagtctggagttgaatataggtagggtgaccatatagtttattgtccaatgagacccttcaaagagtaaaaaggaacattattaataatttccctaggacgatagcttgaaccagaactatctcaggcaaattgagatggtcccactatgtataaacaattaactcttagaacaagataagcagtgtgagctggccctggtagtgctttaaacttatatgtttgaaattatgcccagtctcttctccataggacatctaccctaggaagactggtgagattattctatacttaacacatcctcctaaaggaaaaaaagagcagacccctggatcctagaaactttgcccaatggacaagactcctggaactgcaatccccccagcctggggatattgttcactctgaaacctttacgggtccaaaagtgaagaaaggggcagccaaaaaggagagaaaactttcaatgacacagctgctggagctgattcctcccctgcagagcttagggctggaaaacagggctctactgttctctcttgatgactcacatgtttttttaggcagggaggttaggccctggttctccacacactcactaagtaaatggtcagagaaattctctgtggcacatccactgtcaggtcagcctccaggcccttctccaaagtgtggcctccctacgggctctaccctgtcaagggtcagtccagggctcagctaagttcaacagggaacccaaaaggctcttgccaagtgggggcttcatggcttgagagggtaagacaaggtgaaagaggtatggacacaaataaatgatttctttcctccagcagacatattccctcccctcccctcctggtaaacgtcccccgttcactcatagccttgtttatttagcctcatccccactctcatcccaattcccagccaccacaaaagccagagttttggatcagaactttagagttgaaagggagagtttaaaaaacattaaattcaataaaccattctgcagatgagaaatgtggggctctccaaaagttgtaaaatataaccacagcagagcccaagaaagatgtgactcgcaatacaacgctcatacaccaagagactaagaaagcttggcctctttcctgtcttagctccagttctaatgtggacaagaaggacctctgcacaaactgagaacatcctgccagtgcaaagggttctggctactgctgcatttttgtccattcaggaaagatcaggtggttcccctacaacagttgcattggcttgaaattttttgacactaaggtcaacggaaagactgaagtcccaggaaaggaggaagattacttcttctacagacctgttacctcttccttcctcaccaaatttcctgctgaattatcaaccccatgctcacctgcccagagagacttctggtccatggtggttgctcccatatccttggccagcttcttctgggatacacattctctaggtcttttatccactgaggtttcgacagcctgtcctacacgaaagaagcaagaagtccagggacttcccctggcagacttgtgaaacttcttggaaatgaagcccagatttgagcaatgccaactctgacctgtcagaaattagttgctgtgaagtcagctgctgaagagcccttttcatctagtctcacctaaaagggacccggtcctggagaagggaaggaggtgatactcaggctctgcctcctggtatcaccctcggccctgaatctccttcctcatcatcccaatctgtctccttcttcttgcccccacctctctctgtgttcacaccacctctggcttgcttaatttttttagaaacaggatcttgctcttgctgtatcaccccagttggagtgcagtggcaccatcatggctcactgcagcctcaacctcccgggctcaaaggatcttcccagcttggcctccagagtagctggaaccacaggcatgcaccttacaccttgctaattaaaaaaaaaaaaaaaaatttgtagagacagggtctcactacattacccaggctggtcttgaattcctgggctcaagcgcccctcctgccttggcctcccaaagtgctgagattacaagtgtgagccaccacacccgacaacagctattgtttaccaggcacctacaatgacaccttctctgtagctcttcccactgtcccccaagcagagacgagctggcacctctgcctacagtgcattctatttcctttcattccttcacagtgtattgtgatgtattggtgtctgtgtctccactgtgcaagtacaagaagtatgcgaaggaaaaattggccaggagtagtggcacatgttgataatcccagctgcttgggaggctgaggtgggaggatcacctgagtgagccccaggggttggggctatggtgagctgcgatcacaccagtgcagtccatcctgggcaaagcaagactctatctcaaaaaaataaaaaataaaaataaagaattatgtgaaacacaaaaagaaaaacctcaacaaatgtttgttcaggatcctgccttaacctgtgagaatggacttgcactccagactcaaaggctcagatcctcagggccttgcacatctccctacctatctcccagtgcctttttcataactgactcctcggtgtcacccaaaatgtacatgttgaagccctaagtcccagtgtgatggtctatggagaaggggcattgcgggtaattagatcatgagggtagagtcctcatgaatgggattagtgcccttacaagaatagacacagaagagatgatctctgtttaccatgggaatatgcagcaagtaggtggctttcagcagatcaggaagagggccatcaccagacacctcatctgtgtgcagcttgattttaaacttcccagcctcccaactgtgagaaatagacgtttgttgttatgccaccgagtctgtggtattttgttacagctgcctgaacctacctactcagttctcaagggctccagaagcctgcagaaccttcagtgtgaaaatacctcagctgagcttactgaaagggtgccaattttgttcttgtttctttgttgataacaaaacacagtatgggttcatactaaacttcttatgcataccaatgtattcattcttctttcagatttaaaatgaggtttaaaaaagcactcatggtccagcctgggtgacagagcgagactccatctaaaaaaaaaaaagaaaaaagaaaaagaaagcactcatggtattctttgttagtttgaactgagatcttttcatcttttggtaggtatttcctgccctgctgaagaaggtaaatgtagcatttcacagtgtgcctgtgcattcgctctcgctggcattgctttgcagttgtctatctccgtacttcaatcagatgaccagattggcactgagagtacagtaaagaaaggcattaatgttttatctctgctttcctgacattacgccttattatgttggtggatg

SEQ ID NO: 420 - DNA, 4001 bp, Homo sapiens
ggccatggtggggcttctgaatggaagcaacccatccaacccaccccggggcacaaagtcaaaccctcaagtgatttttaaaaaaattgcactttccaattaaaactaattctataatccataaagtgaaaaacattcatgtaaataattcagaattttctgaatattgttcatggcccactttctctcaagccttgagtgtctgggcttgtattaagctccagaagaattccttcaaagaccccaggaaacctaatgctgttcctctgcttatgacaaatctcagatcagttttgccacctggccaagggaaaacctcttaaagcctagtttaatatctcttcttagaaggaggaaaaatgatgatgatcaaaaattacatggggaaatgaacaaaaaataaagatgtagtcttaccctttggaaccaaacaggtaccctccaatggacaagagaattttcagtttgggattcctgaagtagaagaataagatgattatttattttctggctgccagggaagcctttgtctaaagaacagagttcttaagtgtagagaaaatggacaattagggcctggctgtttgaactaaagtgaagttcagtgaagggatgaagcactggtgagaacagttaggatcagaaatacacccagagaaatatataggaatgaatgaatgaatgagatagtatgtcttagtgtcagcttaagaccagcttccctcctctaaaatccatgcaggatgcttccacccccatcttactcacttggttttgagactgttgatggtctggtagagcatcacttcactcttgtccttgatgataaccttgttgttttcgatgctggcgaatgaatagatgagatgagagcataggaaggggtcaatattctcaggggtgaattttcctggttcctgccggtcctgggaccagttggtaaagtagcaaaccagtttgtaggcagatcctggagtagagtgaagagagccagtgagactctagggctgttgccttagagtccagaaagtcacaattttctccccaagacagccattgcatcatttgctcattctgccagagcctctgagggtcattcagcctgggcctttagtgctggctcttgagtacccagaccccagttaagaaatacgctgagactgggcacagtggctcacacctgttatcccagcactttgggaggctgaggcaggaggacttcttgagcccaggagttcaagaccagctctggcaacatagcaaaaccccatctctacaaaaaatttaaaaattagccaggtgtagtggttcatgcctgtagtctcagctactaaggaggctgaagttggaggattgtttgagcctgggaggtcaaggctgcagtgagccatggtcacaccactgcactacagcctggaccttacagtgagaccctgtctcaaaaaaatttaaaaaaaaatacattgagagacagagataccaccaacatatgaaacacccatggagcactaagattcagtatgtatgtatggatggatgacacagatcagtagagaaacagataatacaaacattgtgtatgtttgtattcacacacacatattgaggccagctatgggggaggggtgagagagagagtggctcaaaaagaactagaacaagggatacacaaaaagatagaataaaaactcagtgtcataaatatgtcagtggcagaaccggagagagtaatcaagagaaaaagcatgtagcagaaaaagaaactgtacatcaaaaatgaaagcacccaagccaggagatccaggcggtagtgacttattgactacttacctccctggagaagcagcaagaccactacacctgcaatagatgggtggaaagagaaatctgttgagccaaacctggttctgctgtcccagataatggcagtgaaaatgtgggtgtgctcacatacaagatagagccacacttcatctgggctccccagccacagctgctgtggtttcttttttttttttttttttttttttgagacggagtctcgctctgtcgcccaggctggagtgcagtggtgtgatctcggctcactgcaagctccgcctcccgggttcacgccattctcctgcctcagcctcccaagtagctgggactacaggcgcccgccactacgcccggctaattttttgtatttttagtagagacggggtttcaccgttttagccgggatggtctcgatctcctgacctcgtgatccgcccgcctcggcctcccaaagtgctgggattacaggcgtgagccaccgcgcccggcctgtggtttctttataggaccttgaggtccccagccctggggtgccttgtgtctctacattcctaggcagaaacatgttccaagctgggaatttattttttcattcatttatccaacaaagttttattgaatcatatgctctgtgctaagcattgctcaggacactggggaaattataatgcagttaatgccttccctgcactcaaggagctcatagtccagtctggagttgaatataggtagggtgaccatatagtttattgtccaatgagacccttcaaagagtaaaaaggaacattattaataatttccctaggacgatagcttgaaccagaactatctcaggcaaattgagatggtcccactatgtataaacaattaactcttagaacaagataagcagtgtgagctggccctggtagtgctttaaacttatatgtttgaaattatgcccagtctcttctccataggacatctaccctaggaagactggtgagattattctatacttaacacatcctcctaaaggaaaaaaagagcagacccctggatcctagaaactttgcccaatggacaagactcctggaactgcaatccccccagcctggggatattgttcactctgaaacctttacgggtccaaaagtgaagaaaggggcagccaaaaaggagagaaaactttcaatgacacagctgctggagctgattcctcccctgcagagcttagggctggaaaacagggctctactgttctctcttgatgactcacatgtttttttaggcagggaggttaggccctggttctccacacactcactaagtaaatggtcagagaaattctctgtggcacatccactgtcaggtcagcctccaggcccttctccaaagtgtggcctccctacgggctctaccctgtcaagggtcagtccagggctcagctaagttcaacagggaacccaaaaggctcttgccaagtgggggcttcatggcttgagagggtaagacaaggtgaaagaggtatggacacaaataaatgatttctttcctccagcagacatattccctcccctcccctcctggtaaacgtcccccgttcactcatagccttgtttatttagcctcatccccactctcatcccaattcccagccaccacaaaagccagagttttggatcagaactttagagttgaaagggagagtttaaaaaacattaaattcaataaaccattctgcagatgagaaatgtggggctctccaaaagttgtaaaatataaccacagcagagcccaagaaagatgtgactcgcaatacaacgctcatacaccaagagactaagaaagcttggcctctttcctgtcttagctccagttctaatgtggacaagaaggacctctgcacaaactgagaacatcctgccagtgcaaagggttctggctactgctgcatttttgtccattcaggaaagatcaggtggttcccctacaacagttgcattggcttgaaattttttgacactaaggtcaacggaaagactgaagtcccaggaaaggaggaagattacttcttctacagacctgttacctcttccttcctcaccaaatttcctgctgaattatcaaccccatgctcacctgcccagagagacttctggtccatggtggttgctcccatatccttggccagcttcttc

SEQ ID NO: 421 - DNA, 4001 bp, Homo sapiens
aaagacagataatatatgatttttctgtttatgtgagatacttagaatagtcaaaatcatggagacagaaagtagaatagtggtttcctggagctgggggagggggaaatggggacttacaggttaatgagtatagagctggagttttacatgatgaaaagaattatggagatggaaaggagagatggctcaagaacattatgaatgtatttagtaccaccgaactgtacacttaaaatatttaagttggtaatttgttttggtctattttaccacaagaaaaacatttttaaaacatggaaaaaaagataacggagactggcccatgcagtcaatgtaagtgagaatgccagtttattcacatacaaagagggtaagactgttagaataaccaatgccagtcaattgcagagagcattctcccacatctgtccagcacaaaggttgccatatgacagaacagaatatcagcatggtctctagaatcgctaacttatatttcaatttttgttctccttctttctagatatgtgacattagacaagttatttcacctgtgaacctcaatttcctcatgtattacatatggataatactagttgttgtcttatagggttgttgtgagaattaaatgagataacctacctagcactgggcctagcacatgttagttatttaataaattttagttaatgttatttttcccaatctgaagacctcaagtccttggatagctgaggagtaattataggggaaaggggagtttgcacacaaaacattgtgtgtgaattaaataccttacatgtttcaaatataaatttattacaattactatttttaagatttaatttaattctattttattttaagttccgtgatacatgtgcaggacgtgcaggtttcttacataggtaaacatgtgccatggtggcttgctgcacctatcaacccatcacctaggtatgaagccccacatgctttagctctttatcctgatgctttccctacccccacccccccccgacaggccccagtgtgtgttgctcccctccctgtgtctatgtattctcattattacaattatttttaaaatatagatgtttaaataaaatactaattcatttggaaattccagttgcattttgctatatatttttcccccctttttaaaaaaaattttactttaagttccaggatacaagtgcagaatgtgtaggtttgttacataggtatacgtgtgccatgatggtttgctgcacctatcaacccgtcatctaggttttaatccccacatgcattaggtatttgtcctaatgctctcccccccttgcccccaacccctcagctggctccagtgtttcttgttcccttcccggtgtccatgtgttctcattgttccaactccatcttatgagtgagaacatccagtgtttagttttctgtttctgtgttagtttgctgaggatgatagcttccagcttcatccatgtccctgcaaagacatgatctcattcctgtttatggctgcatagtattccgtgatgtatatgtaccacattttctttatccagtctatcattgatgggcatttgagttggttccatgtctttgctattgtaaatagtgctgcaataaccatacgtgtgcatgtgtctttatagtagaatgatttatatccctttgggtataaaatgatctgtgtgagagatgtgtgaggggaggagaaaagacacacacacaatacctttaagggtaaacaacctttatctcacataaatggcaatgcagatgtaataagcaaacgatataataaacaacttgatataataagcaaattgatataacaatcaaattgcaatgggaaagggagaagggaaaagatatatatatatttacactcaccagactatggaggattcaccaccagactggaaagcaacagcctgggctccagagtcggccacctgttcgtgcacagacgaggaggtttcatgaagctttggcaccgtctgggactctagctgtttttgtaacgagttgtttggcatgaggcccagtaacaagggcccttcacaactaggttcaaggaacataaaaaggtcagcttgttttttgagactgtctatttttttcaataactaacatataggactagattgaaatagagatttttccaaaacagtgctggatgaacgcctcaaggggctcacacaacctgttccgggacttggtgaccattgtttgtgtccatgttcagttgagttcaaatttaatatttaacttttcctccacatttggcctcaatctgatactcaattgcaggaaaatacccttacagatacatggggaagggatatttgatatagtttacagatacaggttaagtacagcagaattaaaagcacaattaataaaaaccacacccaacatggctttgtgagtaatattgtgagaattgttagggctatacacagaacattcagtatgcagtaaggtgcaaaaccctccttgggctgaggtaagcgtatctaatgccatttgattttgtaacacaacagtacgcagctgagcaaattcatctgataacaacttaagtccagtgtccgactctggagcctaggctgttgcttcccagtctggtggggaatcctcctttcaaaaagcaaaagttagcttcctgttgggctttgctggaaacagaacacctctgcttcaaccatgatgtctttatgaagcctgaaattcctattatgacttgggtcatgagttcccccaaaactcactggatatttttttccatagacaaagatagggaccatcatcaattttatcatgtttaaccctttatatagaagcagtaatcacatagactttctaagacggagctatagtgggagtctacccagaagttcggttagttcaatcagcctatttcagattatcttcttcacttgttatgagggaactaacctcataagtcacatactttgtctttccttccctttgcacccatttaactggagctcataacaccctaataacatgacaacctgtgccatcttgaactgatcctatcagtcataggaagagggtcagaggatggaatttgtttgatcctgcttggataagaccatatataaatcatttcacattcaccaaagttttcaaattgtaatttcattcaagatgctgagtcaagttcccctcggtctgcctccttagagctaattcttccaaggccaataataacaatcatggaatgctaggctcgatgatcttaactacgcagtatcacttttatcactctgtatcttcaggaatttagtggactagtccccatgactgccatacgaatctttgaaagcgatgggatcatctgagaaacactttttaaatcccaagtcccttggttcacttctagaaggccatggtaggtgcccctagtctgacatccagctctctacaccagttgtcaagtgattcagggtgagtagccaagcagcatgcacactgggctttctggaatagtacttctgggtaaaaagtcagagacagaagcgatggcagatgagtgatcctctggtgtttattttattctcaggcagcatacaacaatctaacatagcacatatctagctctgagaaagaggctctgggctttggatgttgggacttttaagcttcttaacaaaactcttctttagtgagattaggatatgggatctaatagcagtatgatatagcagaaccttggctttcagtcttatctactaccttagcattcatctgttgggagaacacttggctttcttctggtgtaatccaaccccgtgattatgcacaactgcttggtgtaaacttggctgaagttctcattcaccatggtcagctctctgccaggatggattgcattaggacctaggctatagattatagctggtttccagaggcaacaggccaactttcttttccaggaggccgcctgcaggtctgttaactca

SEQ ID NO: 422 - DNA, 4001 bp, Homo sapiens
tgcagaaagcccagaagtagcctggactaaagctttttgagaaatcttccacctctcatcttccccatgtttgctgtttctgtgcccccggctgttccatcctatgaggctgagagggaaatgtacctccaatgctacagcccagcgtgagaggcacagtcgcaggacaagttctgagaggccagcattcccaggccactgatgcccagggaatggggtgggacaagacggggaccaggagttcaagttgctgaaggtcccccaggtctcttttccatttgacacaacaaggagctccctcctgcctctctcaagctccacatctgatcagttcaacagaccagaagcaagtgtgttgtcctcgcagagctaaggggctggggatgctgaaccagatgagacttaggttccttacctgcagcaacttggagtctgagactggtgcagagagacacctaagccaataatgagaggcagtactgtactgtaaaacacacaggtgctgcaagagcacagagtgcagaggagggagccagcaaccccaggaaaggaaagccctgaaagaggctgatgcgcaagctggccccacagatgtgcaggagctcagctaatggataaggaggcaagagccttcctgggagggctggtagcagatggggacatttgcaggggtctgagctttggaagagagtccccactgaaatctggagctcttggggaggtctggcagggaaggtgttttgggacattaagcagagcccagggaaggggctgaggcagccaagaaagaggctacttaccccatgggatcatcagcaggaccatgaaacctggagcaacacaagagagaaggccagggttatgctgccattctcaccttcccaggccccacagcttacggaagcacaggaggtggtcagggagggctgatttcatacaaatcaagctttctcctttcagaagggacccaggagggcactgtgcccatcccttcatgcagaccagaccacgggggtctcttcctggcctgggttggtcctagaagctgatggaaagttccatgggctgaggctgccccctctctatacctcagtaaagggcagtgtggattcaggaagattgtggaaaaactgctgacttgtgagttatttagagagatagtttctctttcggaacaagaaacaagcctgttttggggctagaaagaatcaatctggaagggctgcatggagagagttcatctcctggggagggcctgtgcctctgctcccatcgtttatggcttcctgttgcctttccgctacctggctgtggtaggcaaccacagccttggagacctagggtctgacaggactccttcgaagagatctctttcacctggtgaccttggacttctctgtcaacctaatagaacctccatgaaaatttgcaaggatgcccaggatcttggccccaggctgccctcttgcaggacagacaatatgaggttggagaagaggttcttggcagtgggcgcttcttggataaggccaacaggagggacctaagaacatgggaaagacacaaagacccagtgcaggggcctcattgactctgggctttcaggacagagagaggaaagtcaagtcatcttcagcctgttgagaaaagccttcccttgcaacatgaagtctcttgggctgaaagagcctaagggggagcccacaggaaaggtaatcaagggactgcaagccaggaggcatggagagggataaaatgaccctctgaagttctcctgagtcctcctgcttccttgcaaatggtagcaagtggtccctgaacatccacatccccacctccccacagctcccgagacccagcccactatccgacggctcacctgcccaggccacagaccgcaccatgatgcagctcagcggcaggctgcagcccatacaaaccagctttccaggtcctgctctgcttttatctggccaccctgtcccaccccagccaggagtgttgcaatcaggggcactgggtgggggggatgggagcagggtggggaggggtaagatgtcaagcagcatgaattgggcaaacttgacacaatggcctttagcaattcttgcttttctggaacaatcagagggtgactcttagtgttgccaaacagaggaaagcgggaagtggccctgaacctcctgatggatgagcatgaccctgactttctttgtgtagttggtgaggaccataagcagccccagacttaatagggctttggaggaagagaaatgactcacgagtcaggcagctgggttccagaccagctctcttgcttctccactgccctctctcaaactgtttctccatctagaagataatggggttgcaaatataatttacttttcatgatagtaatagttgcatatccattgatggagaaaaatagataatgataaatagtgactataagtttggtaatggcttgaaatgcctatgtttcttatgaagaataataatggtggacatttgggccaggcatggtggcttacacatgtaattccagcactttgagaggccgaggcaggtagatcacctgagatcaggagttcgagaccagcctaaccaacatggagaaaccccatctttactaaaaatacaaaattagcctggcatggtggcacatgcctgtaatcccagttactcgggaggctgaggcaggagaattgcttgaacccaggaggcggaggttgtggtgagccgagatcgcgccactgcactccagcctgggcaacaagagtgaaactccatcaaaaaaaaaaaaacaaaaaaaaaaaaacagaagaatggtggacatttgtgtcggtttcccagagcttctgtaacaaatggccaccaaacaggtgatttgaaacaacagaagtttattctttcacagttctggaggtcagaagcctggaaacaaggagttggcagggccatgcttcctccgaaggctccaggggcgaatacttcccagcagcttccagcttcggatggcctgtggcattcctgggcatgcaacggcatcgttccagcctctgcctgcctccatttttacacgcccttcctcgctgtgtctctgtatgtcccctcctttctgtctctgagaaggacattctaatccaagatgatctcatcttgagatctttaccttcattacatttgcaaagacccctattacaaatacagtcaccttctgagattccaggtgaagttatcctttgcggggggtgggagggggtcaccattcaattcaccacaggacccaagtgggcacatattactgtaatgtctgcagacaatgtctggtgtatgcatgaactccagggtccctgagaaagctctgcagtttctaggggatccagtctttggccggtgggcttaacatgaatggcctagatggccacgtgggaatattgggtgcggcaggctgtggagttaggttcctgagtttgaattcctcctctgccatttactatctgtgtaaactgaagtgagttccttaatttccctgaactccagtttcttcatctgtaaaggggaatcctcagaggactgttgggaacgcactccatggtggctgctattattcctggttctgccaagtgctgccacttctgctggtctaggggtgtcagagggctctagtaacctcttcgaggcccctgagagtgttggacctcagcactcagatggaccagccctaagtcctccctttccctgctgcagtcatggcttctgtttctgctgtggtcagccctttctcttggggatcctgcaaaagagcctgttcagggtcacctgagatgtgcagaggtgcctcagctccttggtggtgggggagtgagagtgggatgcaggagtgaggactgggaggtcctgagcctcggggaggagaggcttctctggagagttaggggccaccttatctcgcccccgcctccatatacacaactgacctgtcagtttcatgaatt

SEQ ID NO: 423 - DNA, 4001 bp, Homo sapiens
atttggaggtggagggcagaattcttcagttggaaagatctcctggaaaagtgtttcagcttgcttgacagcatgctcatttcccaggccacagtcaggcccagagcagacataaacattggaaggcaagccattatacgagcttctgctgattcccgaggaatctctcatattaaaataaagagcccacaagagtcttggctttgtaagttcttcctcgtttatttctgtttcagtatacggagtgaataatttcttcaccactgattctaagtcttctcttgctgttttagaagatgaacatgtcaaatgtaccagataggtgtccttcatgcatgtcatggttgaagaacataattctgtgacccgtacagcacaagctcctggctctgctggaggaactatcagaatggaagtctgctgatctaaatctgtctttagtatagactgatctgtaatgagtactgccctagagatctgcttatactgcacatttgagcatgtttcctcagaaaggtaactgtcttccacaataaaatatttagcatttattctttgaccaaagtgatctataattgctttacatcgtccagattctttgtcgactacaaagcattgtactttatgacgaagacaatagattccaccaaaaactgcacacatcctacagaaaccctggggaatttctccttggccatacaagggaaataaaaagggggtgttgccaaaccgtccgagacactgaaggaagtttttagttgcgttaagaccatctattgtagtgcaagatgattctgatgtcattgcaattgagtgcagtacaaaatgttgaaggttgggagttagttttttagtttttaagtattctgaaaatgaacactgcctgaaagcttggtattcatcaggatgttgttcatactctaaacaaaatgtgagaaatttcattagcatcctcttttcaaccatggtgagttccttgctattaaagacatctgctctggaacaaggaacttgttctacctttccttcccgaaatgcaagaatcctagtgacatttttaaattctacataacgactaacatctgatttgattaaaagatcaattagcaatccttgagaatacagcagttttgacaccaaatcaatattaaacctcctgccttctttaactatttgagagtaagtaatcctatttctaattggttcatcggccttatcttctactgtagatttgctttcatctttatctccatctttatctgaaactgtgtgcatacaagttttatctccacaatacttttccttctccactgattcctctacatcagttacttctagtgaaatctctgtatcacttttctgagtgtgttttgcaggcatttcgtcgctattaaaatacgataactggctttcttcaggtaatgcagaatccagaacttcagtgaaggtattagacacccccaaagaaggatttttctgcagagcaccaatctcttcaacgttgtcctccatatcctgactggcgtagcaaaaagcttctgtgtgttgaatagtttcatccttcttgcgaagagtgatggcttcttctgtttcatggatcaggtcctgccatacaacagtactttcttccccaatgtcattgttttgctgatactccttcaaccaggatagcaatcctgaaaagctgaaactagcccagtttcctccatagtagcttcttgaatcaatatgcagaaccctctgaccacttcttgaacatgcagctgcaaggatggattcgggcaaacctgtccctattataaccacatcaaactctgtgggaagattgtccgccattttaggaagtaacagcgtctggtgacaactgctgatgaaagaaatgaggtgtgattatgctgtaataaaatctgtccttctgatgttccagttatcccagaagcactgaagttgcaggtcctagctgtttaacggttacccttttaaaatattttttttcttataagtcagtagcataaaaacatgagcaagtacatctaatcacatctgagaatactaaaatggatgtgtggtttcatttctgcatttcatcttagcagtaaatgtcaaaatgcatcatatatgcatttgtgactggaactcttctctgaaagaagaaaattcaagaaagaatacattgtaaacaatataagagaaaaataatttcatgcaacaatgacaatccattggagtgtgacatcttatttggacataaacctctactaaagcatgtcttaaatgctttctcacatattttctaatttcttgagaatggacaatagagatataacagccctcccaagaatcaggcaacatagtaatagagaatgaacataatgttccacaaaaataaagaagaaataacataatacaattctctaactttagcttttaagaaaactatcatgtgaataaatctatacacagctgtgagcttagactaaaaggaacgcatggctccactgtttatagaaacagattataaactatgtgcatactgccatgattcaaaatatttctgtggccattacagtctatgtgtgattccagaacagctgaatataagacctttccatgccacaaccacccttaggatctcatggtagcaacatgagactatttctactcaattactagtcagattattacaaaaggattaattcagtaaaacaactggccatttaaaaatatttaggctcataatagccctgaggaggaaaatgtattaaaaatattatatgaatgtacacatgcatataagtaataaaggaaaaaagtgtgtaagtgtaagtaaaaaaggaaaacttctgatttcatattaaaatatcttaacataaataatacctacttctaacatttgaatacagtgatgtttgcatttcgccactgtctctgcaaccctgaatctctgcatcccaagcaaaaggtctatctaaacatcctctgccaagactaacactgtttgttcttatttttgaaggggaagtttaaaaaaaaaaaaataataaggttctcctgttaactttgagcataatgctggttacattccatgtgcggaagacatctgtgtgatgccctgtgtggccagaggtagaaaggccaaggtgctgaagagcatactcacctgaaagtctttaggctaaagcaacaatactgctaaactttctaatattcatcattgcacagttttgagctctggttttcactactgttaaacctactgaaatataaatcagtacaagctgtacctgtctagcccaagatgactaataatcctggatactggaaaaacaagccattcaattggaacttagattaaattgcatagggcacacacctttagtttaactaaaatggcaatcctaacagtcctgtctagtcaaagcctctgtctcaaaaatatcaaggattccactcatttttggcattccctaagaagccaggaactaagtacagaatgcagcagttgcctggcccactcaagtataaatataagtatgtctgaattacttattctgcttcttccagcagggtgtgaagatggagactgaatctatgatggtatctgaagaggtgtaaccatagtacatgctgcttcttggcttagaaagacagggctcagggtaggagtaggagcagaagacacaatcaataagcgctaagatcaggcacgttctaacctacagatatcaaaggggtcatcaaaatgcaaagcaagtaggatggccttacagagcattaagctgaattacccaataatagagatgagagaactgatagctggagagattaagtgacttgagaaagcccgcacaatgcatgagtcgcaggataaggaacaggatccactcttgtgccatcagaccaatggtctttccaacagatagggcaagcctctccaaaagcctctgcatcaagaagctacttccctcatttttaacttcctccccttcaatactccactg

SEQ ID NO: 424 - DNA, 4001 bp, Homo sapiens
ctgatatcccttcttcctctctttagcgcctccctctccctctgctattgcttgccatgttggaactgtcaatcacgggatcctctcccactttcaacaagggagggcaactgacccaagcaaggcctctcagactcctcctctcccaagatctccttccccactgctgccctcccccggccctccctatctgagaagtgtcttatggaaggaagggctggagctatcattccatgaaatgcatgcactttataccctgggctgggaaactgaggttgagggtgtaagtgaccatgggtcacaacttgaaatcagctctgtctgactctttccactaacagccttgcctctcttacatagcagcacattctcaggaaataatatctgtgtacctagaacttcaagagtaaactgaactatatcaacactcccattcctactataggaaatgagggtaagtcatcaaacaacacttcagtgcaaggatgtagtcatttctctccctcatctctatctaacaaatagacattttctaccatttagggcatgctgatgagcatacaattcatctttcactgctaatatccctgtaaaatctaatgggtcaaagggcaagtactcagttaactccatttaaccatgtgtcagtcctctcactgaaacccactgtcttgtgcatagtagttgctcagtaaatatttacagtagattttatcattaaaagtaataaatgcccattattacaaacgcatttgcctaatttacaattaggagtcccaacattgcctacatgttgaaattcagatcattttaaataagtaaatacatattatacaaaattaagtagcaccattaatgttaaaacagacataaacacaactgaattttattgaagtgtctactaatatcaatatcttgttcactaaatgaattgggagacaataaatgagattgaacatcttgaagtttctctgattaaatttctctagtatcagattcagaaagacattcattctgaaaacaagcaaaggaactggctttcatcctagctgcagattcattctattgaaaattaattgcatgtaacattcatttagagatgaggttcaaatctctaagtacagatgacagtcttctccaaaacccagtaaacatggctcaaaggtcacataatcaaactaagattggcaattccagagaatgctgtcctaattatatagttagccaaataaagaagaaaacaaaactagagacagaataattatggaaggccagatgagaggcttctttcaacaggtcaacaaaatattactctgatttatgatgtccataaaaaaaggtaggatattttgctaactttttaaagttgtactggcatgccttggaaatattgtggttttggtttcataccaccacaataaagtaagtcacaaacattttttggtttcccagtgcacacaaaagttatgtttacactatattgtcatcaattagatgtgcaatagcaatatgtccaagaaagcaatgtacataccttaattaaaaatactaggagccaagatggccgaataggaacagctccggtctacagctcccagcgtgagcgacgcagaagacgggtgatttctgcatttccatctgaggtaccgggttcatctcactagggagtgctagacagtgggcgcaggccagtgtgtgcgcgcaccgtgcgcgagccgaagcagggcgaggcattgcctcacctgggaagcgcaaggggtcagggagttccctttccgagtcaaagaaaggggtgacggaagcacctggaaaatcgggtcactcccacccgaatattgcgcttttcagaccagcttaagaaacggcgcaccacgagactatatcccacacctggctcggagggtcctacgcccacggagtctcgctgattgctagcacagcagtctgagatcaaactgcaaggcggcaacgaggctgggggaggggcgcccgccattgcccaggcttgcttaggtaaacaaagcagccaggaagctcgaactgggtggagcccaccacagctcaaggaggcctgcctgcctctgtaggctccacctctgggggcagggcacagacaaacaaaaagacagcagtaacctctgcagacttaagtgtccctgtctgacagctttgaagagagcagtggttctcccagcacacagctggagatctgagaacgggcagactgcctcctcaagtgggtccctgacccctgacccccgagcagcctaactgggaggcaccccccagcaggggcacactgacacctcacacggcagggtattccaacagacctgcagctgagggtcctgtctgttagaaggaaaactaacaaacagaaaggacatccacaccgaaaacccatctgtacatcaccatcatcaaagaccaaaagtagataaaaccacaaagatggggaaaaacagaacagaaaaactggaaactcaaaaacacagagcgcctctcctcctccaaaggaacgcagttcctcaccagcaacggaacaaagctggatggagaatgattttgacgagctgagagaagaaggcttcagacgatcaaattactctgagctacgggaggacattcaaaccaaaggcaaagaagttgaaaactttgaaaaaaatttagaagaatgtataactagaataaccaatacagagaagtgcttaaaggagctgatggagctgaacaccaaggctcgagaactacgtgaagaatgcagaagcctcaggagccgatgcgatcaactggaagaaagggtatcagcaatggaagatgaaatgaatgaaatgaagcgagaagggaagtttagagaaaaaagaataaaaagaaatgagcaaagcctccaagaaatatgggactatgtgaaaagaccacatctacgtctgattggtgtacctgaaagtgatggggagaatggaaccaagttggaaaacactctgcaggatattatccaggagaacttccccaatctagcaaggcaggccaacgttcagattcaggaaatacagagaacgccacaaagatactcctcgagaagagcaactccaagacacataattgtcagattcaccaaagttgaaatgaaggaaaaaatgttaagggcagccagagagaatggtcgggttaccctcaaaggaaagcccatcagactaacagcggatctctcggcagaaaccttacaagccagaagagagtgggggccaatattcaacgttcttaaagaaaagaattttcaacccagaatttcatatccagccaaactaagcttcataagtgaaggagaaataaaatactttatagacaagcaaatgctgagagattttgtcaccaccaggcctgccctaaaagagctcctgaaggaagcgctaaacatggaaaggaacaacgggtaccagccgctgcaaaatcatgccaaaatgtaaagaccatcgagactaggaagaaactgcatcaactaatgagcaaaatcaccagctaacatcataatgacaggatcaaattcacacataacaatattaactttaaatataaatggactaaattctgcaattaaaagacacagactggcaagttggataaagagtcaagacccagcagtgtgctgtattcaggaaacccatctcacgtgcagagacacacataggctcaaaataaaaggatggaggaagatctaccaagcaaatggaaaacaaaaaaaggcaggggttgcaatcctagtctctgataaaacagactttaaaccaacaaagatcaaaagagacaaagaaggacattacataatggtaaagggatcaattcaacaagaggagctaactatcctaaatatttatgcacccaatacaggagcacccagattcataaagcaagtcctgagtgacctacaaagagacttagactcccacacattaataatgggagactttaacaccccactgtcaacattagacagatcaacg

SEQ ID NO: 425 - DNA, 4001 bp, Homo sapiens
gaagagaggctgccgagaaggcccctaagcctgtggggtcactgccaccacccagggtccctctcacacctccccaagccttggaaacaccaggggaggaagcacacaagcattaacacattttggcggggctgatttcagtagctgggcagagagcctgggacctctactcaccacactgatgagctgggccagtgacaccataagctgtactgtcaccagctcagagccattggtggctgggcggataagcttgttgtagcgggaaggatccaggagatgctccaccagccgctcctctgtatccgtaccccacacccctgggcaggggaaaggcaggacgaaagtaagcaggcaaggagagcccacccagcatcccaccctccccaggcaaatgggacaatccaggcccaaccagtatctccctacatccctaaggatactgcaaaatgcttagattaaccccagggaggccccagattaatgtcttcatagaaaagcccctctctgagaccactgaccaaagagtctacacagctccacagagatgacttgagactaagaacccactctgcaaggattcatggagacctgctcttcccccaaagtctcagagggcagtttgagatttctgcttccatggcttccccagcaaatacctatgactcaagggaggtttagcagggcagtgaaggtgaacagttatttgtcccagttatttgtgtcccaccacacacatcctttctcctgccgattgaggagaaagtgtatgtgtggtgggacacaaataactgttcccgttcaccatttacatgtgcaaatgacattatgtgcctcacgtaatgacatgtgactgtggtcacgatgccatcctcccctctccctaaaggcactgggttggagtggaatagctgggctgcctaagctgtgggtcaggcatatatgtagccccaagtttcacacacacagcagcccacccctagaggtggcctgtaggtgtggaaagctcattcagttgtgcattccctttgtacctgcccctccccggcacactgcatccccctctgcaactctgcacgaacacacccctccccatcccctcagagagttccttcctagtcctcagcctggcagagcttcttcccttccaagcctcctgtcccaccctacaggagggttgaaaagtccgttccgttttctccccttctctgcccctgaggggtgacgagaatctggagcccaatgtgggggatgggaaacgatggggagcccggggaggggtgctggtccaggtacctttcttgagataatgtttcacaaaaagtcagatggcatcttagcgccctcagagccggcctcctgccaccccaggacgcctggggagatcccctgcctccttgctctctgtgcctgcaccacccctaccaccgctggccaggtttccatctctttcttgcttcacttactccttcgagtatgtctcgttcccagtccagcctcccaggtgctctctgcagtcccggggggctctcccctaacctccagcagactcccccacctctagggaatcccttcttccaccttccggcctagcaggggtgagtcagagggcggcgagtcttgggccgttggctggggtaggagaacctggccagtgcccgtctttcccttacctgagcacagccggaggaggccgaagccaaggagcagcgccacggggccgcagcgccgggccatgccgcgggcatagctcgctgcctcgcctacaccggctggagcgcgccgccggggggagggccgcgggtggggcgctgtccgtggtgctgaagccgcgcccgcctggagctgggtccaggtggtgccggccgccgcggtggttcctgggcctcagggagccggctgcgaggagaaaccagcttcttgcctatcctggtatgagcaggcggaggcttttccggctgctcttccagggaatacaattgggacggtgagggggaggagtctgcgccccggaggcggaaacgctgggtcccaggaaaaaaaaggggggtccccggctgggatagtcttcgattggttctgccgtggtagggtgtgcgtgaggtggaagaagggctgttcctccacggcacggtggaggagttctgaagtcctaaagttggggcaggacctgcagcatggtcggagaaggggcaagaggcccggcgggaagaagcagcaagagtaagacaagtaggtcagggcctgcttagtactgagggccagacggccagaacgagcgtcgggagacaggaggagtgtccggggttttcgccctccttttttctcttaccaaacccaaatggtcctgctccccaggtaggctgaggatacagcagagaaaatgtgtttagccccttaaagagatagggggctgtgggtttgctatttttaagaaagcaaacggctttggagtctaaaaggctaagcttcctgccctcccactgagggtctacctgaggaggtctagacttgcctgcaaagaaggtagacttgagggtaatagtggaaagacaagtagcccctattcatcggccttcctcacccccttctcttgactccagctgttggcttctgtgtgactagggagatcagagaccactcacagaggcctgatcaagagagaagctaacacaaaggagaccaaagatgagaaccctgaactcttagcccctttttttccttcagtgggttcgttgtcactttcaaccaaaagattcctgactaaagcagacttagcatacagcaaggctctgtcctgttttgtccctgcttacttcaacctcatctgggtcactccacccccagctccacattccaactattggcaaggtcttcaggatccttgaacatcttatccgtcccatcatcccccacacttcagggacttaaatgcatggttctcttgggctcttttataacccatgttcccctcatcaccttctacttaactttgagcatttggcaggaatgtcaattccttaaggaagctgcgcctgaccaagaactagatcagatactttgttatatgtttccagagcatgtccaatgaataaatgaatccacctgaggcagtggctgcctctctagattatgaatcaacacagtgcctggcatattattataagggctcaacaggtaaggaaaagggctagtactggactgacactttttaatgtgtagggaaaatttctctctaaaagctcagctagggaccaggagaggtgacttaagcccgtaatctcagcactttcaaaggctgaggcagaaggatcacttgagcccaggcgtttgaaaccagcctgggcaacataatgagatcacgtgtgtacaaaaagtttaaaaattagtcgggcatgatggtgtgtgcctatagtcccagctactcgagaggctgaggtgggaggatcacttaagccagggaggtcggggctgcagtttggggcatgatggcgcaactgcactccagcctgggcaatgaagcaagaccccatttcaaaaactaaacaaataaataaataaaagcccagctaaaagcaacttattgaccatgtccccaggtcgtggaattaagggaagaagcagaaaagttctagaagaggactggagaagtagaaggactacagaccccatgatgcacatggaaatgggcgtaaatctgcacgacttgttccggggcatgcgcatgtgtaagcgcacaataatctcttaagaattaaagaaaccttgtaacaaagaaaagtagtgaagaaaagccttaaggaaaagagaaggaatgtgtgtagtccctctgcttaaggaaaagatagagggtgggaagatcttccttcaacaatttagatcaacatttgttaggtatatgtggtttgccaggaaactgcatgtgtgttgtggaccatatgtgttgaagatgcagtgatcaaaaagacttagtcccagctattaaggagatcacagtttgg

SEQ ID NO: 426 - DNA, 4001 bp, Homo sapiens
tgccactgcactctggcctgagaccccatctctttaaaacaaacaaataaccccaaacaaacaaacaaacttcaaggcccacaaaatacccgggaatttctcaaaaacggcagaagccaatctagcaatcaaagtatggagtctggcttttttttttttttgagacagagtctggctctgtcgcccaggctggagtgcagaggcgtgatctcagttcactgcaacctctgcctccccgttcaagccattctcctgcctcagcctcctgagtagctgggactacaggcacgtgccaccatgcccggctaatttttttttatttttagtagagacggggtttctccacgttggccagggtggtcttgaactcctgacctcacctgatccacccacctgggcctcccaaagtgctgggattacaggcgtgagccaccgcaccgggccgagtttggcttttactctagagcagtcattttcaaccttgactacatatgacttatccaaggagcttttaaaacatagggccggacagggcgggcgcggtgcttcacgcctgtaatctcagcactttgggaggccaaggcgggaggaatgcttgagccctggagctcgagaccagcctgggcaacatggtaagaccccgtttctataaaaatataaattaattaaaaaaatagaaaatacagacatctgggcctagatcaattaaaccacaatctctggtaatgaggtttggaaatgaaccaattgtggggtcgggggaaagctacctaggtgcttctaatgtgcagctaaagttgagaaccactgatctacagtgaaaatacaggcagggccgggcgcggtggctcacgcctgttttcccagcactttgggaggccgaggcgggcggatcacctgaggttgggagttcgagaccagcttgaccatcatggagaaatgtctctactaaaaatacaaaattagccgggcgtggtggcgcatggctgtaatcccagctactccggaggctgaggcaggagaatcgcttgaacccgggaggcggaagttgtagtgagctgagatcgtgccattgcactccagcctgggcaacaagagcgaaactccgtccccccccaaaaaaaaatatatatatatatgtatgtatatatatacatatatatatgcatgcctagtttcaaaagtggctttcaactccagaatcaagtagggactttaacaagaaactgacgatctgggggagtaggaaaggttttctaaattcacctgggaattagctcgcaaagagccctccacaaaacttaaccctaaagccgccattaatttccaacattcctcaaagtcttgtacttcttaatctccctaccatcctcaaagccctgtcaagacttccacttctgctctacccgccaagtttcctttttatcctatcaaaccccaacctccatcaatcccgccaccaggttccagttcagcccctcccccgccccttcgcaggggctccgcctcctccccggggcctccacgctccaacaccgtagctatgtccacatgccaccaccccctttccgcgtccgccggccccttccgctcctcaagaccgcacctcccccggctccttctcactaccgaaactcaccgaaggaaacagacgccagtgctcctcccggggctgccaccacggctccggcaggcgggccggggaccggccgaacctgagttgacggtggaggggctcgggttagctagatgggcggttggttagatgcgtaagcggtagtatgcgagctcagttcgttgttgctggttggctgtctagtcggccgatccgtctgctcacccggcctgccctttcctgcctttcgtctgcagcggccgccagctcctgctcggtgtccaaaacaaaatggccgccacgtccagtgcttgtctgaccggctaaaatggcgtctacgcaattacgtcaggcgtcagatccgcgcacgactagagggcgggaaagatttgagctacgcctgcgcagaggtcagaggcggagccttagggcgaaggcggggctttccatgcagtgccccgcccctaggggcgtggccaatggtcctgttgttggggcgtgccggggacttcacgttccagtagtggttgcgctgcaacctcttgggggtagttattaatgtgggccttagaggggatttgggtcccgaattccctcgcccctccgttccctagccaaggtacaccgtctaaaaatctttacgcggacttgcctcgtcttcttccggacaattgggcctggggaatttgcactggttttcccctcatggccactcgcccagtctgagagttgtgaagtgccgtaaatgctccagccaaggcccaggaggccagtattaggagcaaattcctctcccatcctgcaccggccaacaccaccgcccgtccatgttttcctcctcacttcctcccctccccaacttggcctagatactgtttactccttcttggggtggggcacctttgcgtcctcgattgcgtttccatgtcctccccccacacctgccatccgtgtttattttgttgcagacctacatagggatttctcttttctctctctgatttgttgttgttattttgagacggggtctggctctgttgtccaggctggagtcagtggcgcaatgaatcacggatcactgcagccttgacctactgggctcaggtgatcctctcacctcagcctcccgactcctaggattatgggcataagctatgtttcctgctcaataagggatttttctctctttcttttttttttctttttgcagatggagtctcgctgtgtcacccagactggagtgcagtggtaccatctcggctcactgcaacctccgcctcccaggttcaagcgattctcctgcctcagcctcctgagtagctggaattacaggcgcgtaccaccatgccccgctaatttttgtatttttagtagagatggggtttcaccaggctggtctccaactcctgacctcaagtgatctgcccgcctctgtctcccaaagtgctgggactacagtcgtgagccactgtgcccggcctcaataagggatttttctaatgactatgtgcacaatacagtgtacatatgtttgaggaatgagagaatgacacatctgcaacccttcctctgctccactggcacgtcaagaccctttcattttccttcctggcacttgggcgtgtgcgtgtgtgtatgtgtttgtgtgtgtctgtgtgtaagtaatggcccagcatccttacccatgtgagggtaaggatcgtggttattttgcttaatgctggagcctcagttcctacagtgtttacacatagtaccacttaagtaaatgttcgttgattgaaagaagattctttcggcctagcgcggtggctcatgcctgtaatctcagcactttgggaggccgaggcggggggatcacgaggtcaggagatcgagaccatcctggccaacatggtgaaaccccgtctgtactaaaaatacaaaaaattagccgggcgtggtggcaggcgcctgtagtcccagctgctcgggaggctgaggcaggtgaatcgcttgaacctgggaggcggaggttgcagtgagccgagatcgtgccactgccctccagcctgggtgacagagccagactgtgtctccaaaaaaaaaaaaaaaaaaaaaagattatttcttcctctggttttatagttgagaagctgatgtctcctcgacttccaactggaaccttgaacccccacatttctggaccttgagcattcctcaagtaggaagatgtaatgcaccttgacctctttctaaataagacacttccccaaataaggggagttgagagtgaacagtcttcacgtctccacccacttccagatcccagaggagacagacatcggatggctggtgagagagaagcctttaatgaaagatgagttgcaggcttggaccgctactc

SEQ ID NO: 427 - DNA, 4001 bp, Homo sapiens
gacccaagcaaagaaccagcgggacttaccccatctgtggcttctgcaaaacacctacaatacgctggatcctgtccattgccacactctgctgaaaactgcttaatcctggggacagggacagagagagattaaggattgagattcaagcatgtagtcaggtaaaggaagaacagaagggggttaaaattgattgatctaaaaaaattaagtcgggccaggcaaggtggcttacgcctgtaatcccagcactttgggaggctgaggtgggtggatcacctgaggtcaggagtttgagaccagcctggccaacatagcgaaaccccatctctactaaaaataacaaaaattagctgggcatggtggtgggcgcctgtaatcccagcgactggggaggctgaggcaggagaatcgcttgaacccaggaggtggaagttgcagtgagccgagatcgcgccattgcactccagcctgggcaacaagagcaaaactccgtctcaaaataataataataataataataataataaagtcatagtagcaaaaaaggagtaatataggccccaaacaagaacttcagagaaatacacgtcaaaagagggaaagagaaagagaaatgaacctagcccaaatgaatgcaacaataagattacctctctcaaaacgacccatcttcagcccattgagtaggtctgtgagaggaggtataaatccttggagttctttacactgtaggaaaataggacaaaggctgtaagaagacaaaaaactgcccacaccagcagtggctcttccttcacctccaaatctgggagtcaatactgtcctcacagggtccttatcaaccagctgggtgctaaggcactccaggagaatctcctttcacctgctttctcttaccttctgggcaaacagcaggtctccctctgtggtacaaccttgggtgtttagactggtctccagttcaccatctcttgatcttttcgccccagatcctgccataggagaagccgaaccccgctgtttcggatgagatggtgtatgctggttaccggaaaccttcgatcgatgcctgcagcggataggacccgggctgggccgtgaacctcccctctgcccaacagtgtctggcctgggcccatgggcccccttgtcctccctctcactatcagaggggaagccaaagtcactgttcactggggaggtgggaaaagacgaagagagagagtaggaggaataggaagaaacgctagatggagaatccataggtccagaagcaggggctatagaacagctcctggagtacccaaagatcggaacctgcaactgaagagcaaagcgagggagtttgaaaccagagtttaaggattaggaaatgaactgggagattggggtgtactgcgtgggataatacttgttctccccctccccaatattaccggtctcaaacacaatagaaaaagacatttctacccccacccccgcccattaagagcttgggattccctctctggccgccgcagagcagctctcggtctgacgcggcctccgttcttttcttccctcagttcagagtaaataccgacttgaaagacaccttcccctccgcccgttgttcgccagggctattcgccagcctgagtccgcagcaagcctctccacctgaggccatgccacccacaagcagtcaatctgggcacgcgaacccacctggtgatcctacgggaaccgcccccatagagactggcctcctgccctctcccaatctttcaagatcaggatccctgcgccggtctctctgggctcgcacctgccacgtgatgcaaaccctcccaataccaagatctgcattcagcccccaaatccactcccaaatactccctaacagctcgctttgtcctccgaatctccttacctgttgtcagccggctcagccctggctcggtttccagctccttcgccgtctctccgggtctatctacccacctccgcctctctcagtgggccccgccccttcccccccctcccagacacgtgcggcccggcacgtgcctccccctgcttacacagatctcgcgccctcattggttgtgtcgccggtaacacgtgactctagttactgaagtccatagcccatttgctacagtacaaaggggctcagccagtagagaggcagccaggtgatgattggctgtaagggaagcattccgtgctcctcccctacatgcggctgctggagaggacccggtgatgagaaaaggaggaggatggaaaaagagtggaaaagaagggaggggaggaaaagggcggagcccgtggccttaaataggatggtgatgcgccagagatgcgcggtttgagtgttcagagattggttgtgctactgaaggcggcggacgtgggacccccggttccgtctcgggaagtaactcatctgccccctctttgaacacctccgctcacgagcgcagcacgtggaaaccgtcagtgatttgtgtctgcaacgtgtgtgagagaatggaggtgtgtgacacggtatattctcctgctctcggcggcccagccctcgtgactctccggtctctgtttcacctcccccacccctttctcctccaagttgggtgcctcctgccctgctgggtgaggagggtggggattgcaaccgagaacaccgcgtcctttctggctcccgctggggcggctcctccatcccttttcttacataacctaccacgcacgttaccagctcagatgccagcccgccacgacgctagaggtcaaaacgaaactcagtttttcctgacttttttatccaggcttctcgggcccggcgtcctaaattatctgattccaagcacggggaacagaatggggtaggtccctgatctcctaggttatggttttgtccagcttcagtcccttcatttgtccgctggagaagattcgaaagactttgaaggaggggagggaggcaagtccagagtttagagagtctcagaagtaactgggacgttactattgtcgttgcgccttgcattttgagagtacaatggagaggagagcagggcccaaggactgtgagctggttgaagataggacgtcggagagaccgcaagggggcagcccaattctaattagggtcccgaggatagcgaattaaaaaaaaatttaagtgagtttgtccctgccataattaccaactgcaaaaggcacattgttggacagaggtgtgggtaggggtgggtaggtgtgaatattttaagtctattctaagtagtttttgatattttaccttatgttttaacaatgtgcttattcttataaaaagaaaaaaagattctaaaacctcaacctcgtttccccaagcacactgtttcaacaccatacttaataaaataaaacaagagaattaccaatatggactgtgaataaacctgttgtctgtgggtgcccttctccagtcttctccaaactgcaggtttattcagtccataatgccctctaattcaattgtcacccacctccccttccaatctacgcttgctgcctctaaatcctggcgctctctttagttgtgactttagaacagactcatgaaggagtagatggtaaccagattatttcacttattatttattttatcttccaatttcctcttgccagactcccatccaaagagtcatagcagccttcttccacctaaaaaagcagagaaagaaagaaaataaaaggagtcaggagacccgagaaaccccttcatgccccccacactctatggaaactccccagatattctgagctgggattgctctgtgatagctcctgggaaagatgtgtgtgtacccctctcctccacagtcctttcacctcctgctgaatctctctatgatcaatggttatttagcatcccaatttaaaaattcttttcctataatacggctttctcttcccttctctcccaccgccctgccatacatcagagaaccgccatccgttctgcc

SEQ ID NO: 428 - DNA, 4001 bp, Homo sapiens
tcttaagttcttaccttggtcagctgatgcttgccaccacccaatgatgacttctgggcagctatttgtggaaaccaagtctttaacatcccttctacctgtagcaaggttcctaggtaacgttccctgtgaaaatgacgttgctttaaaaaaccagcaacaggattggagaaatctcctttttatgaagacccaagcaaagaaccagcgggacttaccccatctgtggcttctgcaaaacacctacaatacgctggatcctgtccattgccacactctgctgaaaactgcttaatcctggggacagggacagagagagattaaggattgagattcaagcatgtagtcaggtaaaggaagaacagaagggggttaaaattgattgatctaaaaaaattaagtcgggccaggcaaggtggcttacgcctgtaatcccagcactttgggaggctgaggtgggtggatcacctgaggtcaggagtttgagaccagcctggccaacatagcgaaaccccatctctactaaaaataacaaaaattagctgggcatggtggtgggcgcctgtaatcccagcgactggggaggctgaggcaggagaatcgcttgaacccaggaggtggaagttgcagtgagccgagatcgcgccattgcactccagcctgggcaacaagagcaaaactccgtctcaaaataataataataataataataataataaagtcatagtagcaaaaaaggagtaatataggccccaaacaagaacttcagagaaatacacgtcaaaagagggaaagagaaagagaaatgaacctagcccaaatgaatgcaacaataagattacctctctcaaaacgacccatcttcagcccattgagtaggtctgtgagaggaggtataaatccttggagttctttacactgtaggaaaataggacaaaggctgtaagaagacaaaaaactgcccacaccagcagtggctcttccttcacctccaaatctgggagtcaatactgtcctcacagggtccttatcaaccagctgggtgctaaggcactccaggagaatctcctttcacctgctttctcttaccttctgggcaaacagcaggtctccctctgtggtacaaccttgggtgtttagactggtctccagttcaccatctcttgatcttttcgccccagatcctgccataggagaagccgaaccccgctgtttcggatgagatggtgtatgctggttaccggaaaccttcgatcgatgcctgcagcggataggacccgggctgggccgtgaacctcccctctgcccaacagtgtctggcctgggcccatgggcccccttgtcctccctctcactatcagaggggaagccaaagtcactgttcactggggaggtgggaaaagacgaagagagagagtaggaggaataggaagaaacgctagatggagaatccataggtccagaagcaggggctatagaacagctcctggagtacccaaagatcggaacctgcaactgaagagcaaagcgagggagtttgaaaccagagtttaaggattaggaaatgaactgggagattggggtgtactgcgtgggataatacttgttctccccctccccaatattaccggtctcaaacacaatagaaaaagacatttctacccccacccccgcccattaagagcttgggattccctctctggccgccgcagagcagctctcggtctgacgcggcctccgttcttttcttccctcagttcagagtaaataccgacttgaaagacaccttcccctccgcccgttgttcgccagggctattcgccagcctgagtccgcagcaagcctctccacctgaggccatgccacccacaagcagtcaatctgggcacgcgaacccacctggtgatcctacgggaaccgcccccatagagactggcctcctgccctctcccaatctttcaagatcaggatccctgcgccggtctctctgggctcgcacctgccacgtgatgcaaaccctcccaataccaagatctgcattcagcccccaaatccactcccaaatactccctaacagctcgctttgtcctccgaatctccttacctgttgtcagccggctcagccctggctcggtttccagctccttcgccgtctctccgggtctatctacccacctccgcctctctcagtgggccccgccccttcccccccctcccagacacgtgcggcccggcacgtgcctccccctgcttacacagatctcgcgccctcattggttgtgtcgccggtaacacgtgactctagttactgaagtccatagcccatttgctacagtacaaaggggctcagccagtagagaggcagccaggtgatgattggctgtaagggaagcattccgtgctcctcccctacatgcggctgctggagaggacccggtgatgagaaaaggaggaggatggaaaaagagtggaaaagaagggaggggaggaaaagggcggagcccgtggccttaaataggatggtgatgcgccagagatgcgcggtttgagtgttcagagattggttgtgctactgaaggcggcggacgtgggacccccggttccgtctcgggaagtaactcatctgccccctctttgaacacctccgctcacgagcgcagcacgtggaaaccgtcagtgatttgtgtctgcaacgtgtgtgagagaatggaggtgtgtgacacggtatattctcctgctctcggcggcccagccctcgtgactctccggtctctgtttcacctcccccacccctttctcctccaagttgggtgcctcctgccctgctgggtgaggagggtggggattgcaaccgagaacaccgcgtcctttctggctcccgctggggcggctcctccatcccttttcttacataacctaccacgcacgttaccagctcagatgccagcccgccacgacgctagaggtcaaaacgaaactcagtttttcctgacttttttatccaggcttctcgggcccggcgtcctaaattatctgattccaagcacggggaacagaatggggtaggtccctgatctcctaggttatggttttgtccagcttcagtcccttcatttgtccgctggagaagattcgaaagactttgaaggaggggagggaggcaagtccagagtttagagagtctcagaagtaactgggacgttactattgtcgttgcgccttgcattttgagagtacaatggagaggagagcagggcccaaggactgtgagctggttgaagataggacgtcggagagaccgcaagggggcagcccaattctaattagggtcccgaggatagcgaattaaaaaaaaatttaagtgagtttgtccctgccataattaccaactgcaaaaggcacattgttggacagaggtgtgggtaggggtgggtaggtgtgaatattttaagtctattctaagtagtttttgatattttaccttatgttttaacaatgtgcttattcttataaaaagaaaaaaagattctaaaacctcaacctcgtttccccaagcacactgtttcaacaccatacttaataaaataaaacaagagaattaccaatatggactgtgaataaacctgttgtctgtgggtgcccttctccagtcttctccaaactgcaggtttattcagtccataatgccctctaattcaattgtcacccacctccccttccaatctacgcttgctgcctctaaatcctggcgctctctttagttgtgactttagaacagactcatgaaggagtagatggtaaccagattatttcacttattatttattttatcttccaatttcctcttgccagactcccatccaaagagtcatagcagccttcttccacctaaaaaagcagagaaagaaagaaaataaaaggagtcaggagacccgagaaaccccttcatgccccccacactctatggaaactccccagatattctgagctgggattgctct

SEQ ID NO: 429 - DNA, 4001 bp, Homo sapiens
cggggtttcaccatattagccaggatggtctcgatctgttgacctcgtgatctgcccgtctcggcctcccaaagtgctgcttagcactgttttctagaactcatcacagtcttccttgcagcaagattagtttgttttcaggcctatcacccacctcctcccacctgggctgtgattccatgagaacatgcaccaggttgacacagggcctggaataaaatcagcaccaatttgtagaataataattgccgtcacttactgagaactgcccaggtatttggcactgtgctaaaggcagcgtaactacctgaggagacggggaccatctccctctgggaaaccgcctcaaaaatcagaacggatggtgtcttgggcaaaggagagagtcagggtccaaagctaggctgtctgaactcggtgccacccagctcctctctggcagagcaccaagctccccccaccctaccctaggagctgggaagcccagtgggttaccccaccacccagtggcagcctctgccctccaggttgtgacataacaattgcacaacccacgagatatttttgaaagaaactgtcggtttcctctcctgggcactgctggggactgtggcccccatgccatccagtgtcttcagcaaccttgggactttggaagctaaatatagtcagggctcggggtgataaggaaatgaaaacggcaagactgtaaagtgacccagttttattttggttttggaggccagacagggcattgctccacgggttcgggctgtacaaccttcccctccttgaggtgggaggcccagcaaccacagggcccaggcagcggggtgggaggctcaggagatggtggctctggggacccgatcccgaggagagagggggcagcaggcagaggcctgcaatggctcagattgggggaagagggcggcgagggggagaggacacgatccaagaaccagagtccgaaagctgaagctggtccggtctctttcactttacggccgaggctggggtcagagaagtgaagccaaactgtcctcccgcaggaggcaaggcctggagggacgccagggtcccagtccggtgccgggccctgcgcacacagccgccgcctccaccctcgcggagggcgcgcgcggggcccagtcgctgggtgcagggtccggcgggcagtcgggccctttctcctctccggcacgccgggcgggcgccggccgccctcagcagctcacggagccggcgggcggcgcggaccccaagtccgagaagcagtcgaactcgctctggcccaggaagagctcgggcagctcgcgcacgcggtgcagcccgagctccagctccagcgacgtcagcgcctcctcgtcgatgagttcggcgtccatgccgcccagggcgtgcgcgggcggcggcggggctgcggcgcttggcgccggctgcgggcccggggggcctcccggagcgttggggggcgcggccgcgcggccggggtacggcgtcgccacaggctgcaggtgcgcgatgcccgcggccggcggaggcacggccggaaagggctggaaggaggacggcggcccgaaggccccgtacgccagggccccgggttggcggggcggcggcggccccagcggagccccccgcggcctcagcccactgtccaggcccgggcccgcgtacggcggcagagtccggagcgcatgagggccatgggcggccgcggcggacggcggcctctgcaccaggcggtagccctcggcgagcatcaggtggtcggccatggcggcaggccggctgcctgcggggacagcgcgcggtggtcagcgccggctcccccggcccgggccagcggctgctctgcggcgggagacccgggcaccgtgcggtccctgcagctcggccgggcggagcaaaaccaaacccgactggtgccccggcccagcccactactgcgcaccttgcggccgcagcctggggtcacaaaggcccgcaacctgtagtgctccgaaacctccgcgtcgcgtagctgggctcggcgtattcttatacccagaggcggggcttccccgccctcggacgctcattggctgggcgagacgcttctgggcgggccgcgcacgcctgcatctaggtcttggccccgcccctcccactggaaccccgccccttgggactccggccacgccccaggctctgagcaccgccctggggcggggtatttggcactttcggagggattcggtctggccctcagggcttcggaatcggacttggctggggtagagcttgaactgaccagaaggtggggtgggagggccagagttttaggccccccaagagctgcaggatgtcaggcctacgcaaccttttaactttccaggtagagaccgaggctcagtggcggaagaggcttcctggaaatacacagcaaagccttgatcaaagtgagactgcacagctacacagggcgcatgcaccttagcggtgcagggtccccgcaggaggtcagctgtccattcccataacccccaggagagcctgttgctccccctctagttcccactgcaccttgtctgttgaagcatgtacttagttgttattaatttatgggcacgtctcctgaaggacttgttcatcttcttcttctcagcacttggcccagagcctggcccagagcaggcttttagtaaaagctgagtgaatgaactaatgatggaatgaattgcaactctcagctgagcctcagtttcttcatctgtaaaaggtaaagaacagcagcactgaccctttgtgaggggtaagtgagggcatgtgtgcacagtgcctagcacagtgcctggtatgtggtagatgctcaaaagtgtcccttagatgaaagaaaggctatttaagttctttttttttttttttttgagacggagtctcgctctttcgcccaggctggactgcagtggcgctgtcttggctcactgcaagctccgcctcccgggttcacgccattctcctgcctcagtctcccgagtagctgggactacaggcgcccgctaccacgcccggctaattttttttgtatttttagtagagacggggtttcaccgtgttagccaggatggtctcgatctgctgacctcgtgatccgcccgcctcggcctcccaaagtgctggaattacaggcgtgagccaccgcgcccggccaaggctatttaagttctgtcccaaagggccttctcttgataacagcaataataacttggacttttaaagtgctttacattctacaagtattttgttgggggcagggcatggattatcagccccatttcagtgataaggagaagcacacaaagagaaagtggctgtcctgaggtcacaggcagccagagttagcgtgtgaatgccatgtgttttccaagtccttagggcaactggagtctttcctgtggccaggagacagcctcccagaaccttaccctccacgcatttgacactctctctcccttctctgaccttcccccgacctgtggcatccttgggacttcctggaacttgggtttatccagttgatgtagaggggagagccctagagtgagaattcaggggcccaaggtcttttcttccctctttcttcttatttttttaaatagagaagggagcgggggggaggggcggcgtgggggagtgaggagggcctcaggcttatctcgaatccctggcctcaagtgaccctctcacctcaggcttccaaagtgctaggattacaggcatgagccactgcgcccagccagaggcccaagttctaatcatatctctgccacccacaggtgtgtgacctccaccaccaaccagctgtgactgttgagtgttgagcggggagtattacttgattccccagggcctcagctttctgctctgtgaaagggagacggtgatcttgcctggtcagcctgagagcttgtgggtagtgataaatgaccatgggtgtggtcacatttttgcaaagt

SEQ ID NO: 430 - DNA, 4001 bp, Homo sapiens
cagctccacaaatctcttataagcacatacagttttaagttagtttagttcagatgtagaggaaaacagctgaggaaaagaaagttaattaaaggagggtctggagccgtcttggcataaagatgattatgtatttgtcaatgcacatcgagttctctggaagacccaaagccctgaactaggctgggtgaagagacacaagaaaagcaagttttcattttatgttctccaactgaggagacaagatacaaaccaggaagtggtcttaattattacaattaatacagattagcataatgccaacatttgtggaatcctgtgtcttcccttattcccaatctagattatgcacttaaaatttatcaagcccgaatgccacatccagtgccaggattccatcatcaccatccttggcagatggctatccagtgtcttctaaacaatttcagtcaagaggtgcttcctcccacatacctttttcttagagtctcatctcaggctctgccctctaggaagctttccccaacattccctcttccgtttttcctctcagtattttaagtttcatgttcaagggtacatgtgcaggtttgttatataggtaaaatcctgactcgggggttcggtgtacaggttatttcatcacccaggtactaagcatagtacccgacagtttttttttttcctgaacctctacctcctcccaccctcctccctcaagcaggccccaatgtctgttgttcccctctttctgtccctgtgtttttatctccgacatataaatgaaaacacgcgtagtttactactggtttcgttttcaatggtggtgaaagagacatcacgctgaattggcccttaggacactcccccgcccccaaaccaagcccagggaagaagaccgaccgaaagtaagaggtcagcctccaaggcggtggcggggcggggggcgttctcgaagcgtgggatgggggagcgtcctggagttagcaaaagtaggggactgactttctagccccacctcaacccccgctcacagctaggaagccgcagccttcgggtcgccagttccctctccttagcaagtcttgtgtgctcccatcacaccctgtaatggctccttgcatagcgtgtgtcacctttctggtgtctgtcggtaccacccacagatttttaaatttgtgaacagcagagaccatgtgttatccttgcactttagcagaacacctgaaacctgttaagtattccgtaactgttccctttgatatttaaagggcatctattagacccatattaagtattttctcaatgctcctagccagttttattccattgcagtcccaagcgatccccttccttacacaagccagacaaccacgccccttgtctttttcacgagttaataagcaatattcaactctctcagcgctactctcctgttagggacgccaggaaacttccagctccgcttttgctacgttctcccactggattcgacaagattactgtgaaacagtctctacaaggcaagttaagtttgcccgataaagttcagagaatgatccagaaagcctcatgggtgagggtggtcagtaccctaaccacgcccacccctctctcctctctactgagaggcgactccaaattcgcaaccactttgttttacgagcgcctcccacctccgcgcatgcgccttacgccttccacaatatcacaccattgcccgttcgcacctcgtacgcatgcgccaattctatcgcctcagttcctgttactaattccttgtgccctcagcggccaaagctcacgaccctcgctattgctcccgcgccagcactaaccgatactcaaactcctcgtcgtcgtatttgtccgaatagtaaatttgtttgtgcgacatgatcgctcggtttgctagccttcagccccgcgccgccaacctccaagcaactcccaacagcacgcgctcccacccactttggcctcgctttcaaacacgccgcccgcacttcctattggtccgtttggctcgaggcgggacacctctactttcaagcctccgattggcttagatttacttctcttcggatccttattggagggcagttctcacgcttctcaagaacgagcgtgggtcaaaagtaggcgtcttattggccaccactgcctttgtgcgcgatctcgcgctgccattggctaactcgggaaagtgggaagcgtgaaggagggaccctgaggtagagggtcaggggttagtgaggccggaagtgagtgtaataaagtttctccagggaggcagggcccggggagaaagttggagcggtaacctaagctggcagtggcgtgatccggcaccaaatcggcccgcggtgcggtgcggagactccatgaggccctggtgagtcttgacttttttctccttaggtgactcactctttcaccccggaacccctctcccgggaccccacttccggtcttcatttataagtcccgcccctgagacccctctccccggaagtcccacctcccaacttcagggggctcccccgaaccccgacttgatttttattttttgtctccgaccccaccctgtcgcccagtttttctggaagtccccaccccccgacacgttccaagccctactacgagaaacccttcgttactccttccattctccgaaactccgcctcctagcaacgatcctcggctaactcctgtcaaaaggcctatctcccaaaagggcaaaaccctgctcttcaaagaacgattcgaatttgttgaagctccgcccctccgaagccacgccccctccgtaatccacgtctgactgtccagaaagcctccccgcccagaagtctgaagttcgcgtccttaggggaccacgcccccttaggagctttatctttgtgggacctgggtcatcagctgaaaagccttgtcgtcaatccctgaaactccacctgcttatattttcctgtcctttctctttttgggccttgggatcagttttccgagcactctcgtgctcccccaggtgggaagtcaaagttcccatctctggctgtaaggagtgagattaaaggcagccgttttccgttttcctttctatcttttttttttttttttttttttttaagacggagtttcgctcttatcgtccaggctggagtgcaatggtgcgatctcggctcactgcaacctccgcctcctgagttcaagtgattctcctgcctcagcctcctgagtagctgggattacaggcgcccaccaccacgcccggctaatttttgtatttttagtagagacggggtttccccatgttggctaggctagcctcgaactcctgacctcaggtgctccacccttatcagcctccttaagtgttaggattacaggcgttagccactgcgcccgtccccgttttcctctttcttaacctcctccaagggtagaactatttgaaagggctgaacgtggggtttggcacgagagggagagagagacttgccctcagactcccagcctcacttcctggctttcccttcccaggaccaacctcatcccagaagtagctctaggccttcctagacataagtggataagaccatggatttgttggtgtgtggcatgtgggtgtgacatgagcaaaagttttctactaccagaagaacggtagtttggagtgggggtagataatagtgctctttttgttgtttgatttttttttttttaagggacagttcagtcgctacttctctgtctcttcccctccccctaaccagagttcttgtctgggcattcctcctggccccgtttgcccagccttccctgctggaaacattcctgaggctttcgccatttcctgccacttcccgcccctgtcccctcctcccagttgggctgcgaagccacacacagcttttcccctacacccaatcacctggacttccagtaggcaatctcctttctccctatgtaaatttcaagagtcatacgtctttctt

SEQ ID NO: 431 - DNA, 4001 bp, Homo sapiens
tcatcagcaagaaggttgttggagtagagggaggaatggttgggaaaggtggccaagccctcaacgaggtccctcaactctgcagatctggaacatcaaataggaaggagttagggactttgagcattctattcactaaagtgttcttgttacagagaaggaaatgatggaagccaacttatctcacccccaactttaggatccatactggaaagacaatttaataattgtagcgagaagtacgtatctcgggaggaaaacctccaaggacaatgaagtagaagcactttgaaagctctagtcactatatactgtagatacaaattaccacggtcactgaagatgaatacggcatctacattctccttctggcatattgctgaaccccactgtctagccagagactgaaacacactggtcacatgtttgctgatgccacttccaaatttagaaacaatcaaaaactcactcaacattttagatgattgagagattcaagaggtctgaatctcccttttaccacagacagcctgatcctctttgggttaagtaggtaagctttatggtgagtgacaccctccactctgttccctatccctatcccctactgctgcaattctctaaccacacactgtagagatggttttctttccaaacattatctttctatatttgcctctgcttagagcagtggatctctggggaaatccctctgggcccttgttctattaattttccatctagagagagccaatgactatatccaccatttattgagctcttactatgtaccaggcactatgcatgcatttttaaagttattttttaaagttctgagataaatttagatgaacagaagacatgcaaagtattgcaccgtattcttacatactccacccagcttccctttatatgcatgcattttaaactttgatcctcacaaaatctgataagggagatatttattattattattcccattttacagactaatactgttactagtacagcactgcctctggatgtgttacagccagattccagggcggtcttttataaagcatttccctcttagttttagctgtttgttgttgtacaagaccttcttcaatggtatagatacccctgccaggacaggaagtcttcttcctttcccttctgctacataagaggtagcaagaaatctctgaaaggatcccttgaattgggactgataaaatgcaaggttttctcccatcagaaggtcagggttgttcttatatcagagatttgcatctggggctccttttaggatcacagggaagggggttcctattaggagaataaaaggagagtctgactcgtgccaagggtaaaatcaggcaaaggatctgtgcatctcacaatatctgtcaaatgtagctgactctgccttactatagaactaaataattttcagtgacataatccacagcagtacatatcaatttatcatttatcagttgccaacagtatatcactctgagttatgtgcattgcattcattatcttatctgacacaagaatcctaatggttaacttgttattatttccattttacagatgaagaaactgagacttagacataaaaatacatgccagtgtcgtgcagctggaatagggcactcatgttctctctatcacaacattatgctatttttaaaaaagtatggataattactatgaacttacctttatttgttgaatgagtgtttcatcttctggcacattggggtcgattgcaacgacaatgccttcatagccattgttgttcagctgaatgagtgaattactcagggccccttctagaaggtgaagaatcaagatgaacacagaactcttaaatggccccattgctgtacatctccctgtgatttctctctttggaaaatgcgggttacgaaggtgtctttctttaccattatatatatacagatatgaaaatatagacacacgtttccaacttatcggaagtggtttatcacaggtctttaaccccctgacctgatgtgttttactattgctcttgtcttcaataggagaatgataacaatatcttagtctcaaattgcgtacttgtaaatatttccatctgccttcagctgtgccagatgctggggtaagggtgggggagcccacatccggttccttggaagcactcacaggtgacaagcagcttggccgctgataggtttgtttacttcttggaaatgtttaccaagccatggacaccaacccacccaaagcccccaaccccctcctgcccaggaaaatccagactgttctgcttattcagtaaacattttgtaagccatatattcagttatccctcatggtggtctttaccacaatggtggttttgtttaccttgacataacctcaacacctcttcatgctccccttaaacaagaaaatattcaattatattccacatccatttgtaccaaaagcattagcaagtgatgtagatattattgactattttataatggagagtaaagataaaatgtatatcttactttgcaaagcatactccaagttcctcatcagatttctgctttctctattgcatagctcctaccagtcaataaaattccaattaacatcattaaattattttgctgaaactaaatgtccctaggaacatgaattatgggctgtcagtggctgtgtatattctttcaatttgccaaacctcaggtggaacctcaaattggccccccattttcttgtattgaaatacttgaaatatctcttcgttcataaattcatttggtcttcagatggtgataagcattaatttcatcttgtccatatgaactttaaagtagttttttccaattctgtgaagaaaggcattggtagcttgatggagatggcattgaatctgtaaattaccttgggcagtatggccattttcacgatattgattcttcctatccatgagcatgaaatgttcttccatttgtttgtatcctcttttatttccttgagcagtggtttgtagttctccttgaagaggtccttcacgtcccttgtaagttggattcctaggtattttattctctttgaagcaattgtgaatgggagttcactcatgatttggctctctgtttgtctgttgttggtgtataagaatgcttgtgatttttgtacattgattttgtatcctgagactttgctgaagttgcttatcagcttaaggagattttgggctgagacaatggggttttctagatatacaatcatgtcatctgcaaacagggacaatttgacttcctcttttcctaattgaataccctttatatctagcataatcttaagcagttaaaagggaaacactgaaatagagtggaaatgctcaattataatgtggttgtccagatgatccaaaatatgcttttatatcaaaatacatatacatttattattcatacaaaatttaaaaatgtagattccaagatatctcagaccccaaatgtatgtgtctttgcctgggttccctaaaaaacagagcctaaggcaggcatatgtgctaagagtttgagagtttaatcccagagcagtgagaatgagggaatggggaaatgagtcagggaaggctgggaagcaactaaaggaggagcattactaagccctgcaatggagacacccagcaggccagcccacaggcgcccttgccttcctgtgtgggttgtctcctaaggggctgtgcaaagaaaccacgccttggagcagccctttggagagaggaaggaaaagcgtttggctccttctcatcttctacaggtgatcatctccccccagacttcctggctgtgtcatccagccctttcggcagtcgcttagaaagagagacccccatgccttgtggtatgtgaggagccaggggttacaagaggtggcagcttgacctcaggcagtggaactgcttggacctgcaaggagtggatagtgactgaggtggagcaaatgactgagtg

SEQ ID NO: 432 - DNA, 4001 bp, Homo sapiens
cttatgagagcctttcaaggtgaagttcctctataggtggaaaaaaaaaggtagccattcccctactcatccacatccccacatccttcctcccttccttctaatctccttattcccctaaaacaatattctggacttgagctaatgtgaaattctgataatctacaccatggcataagatggcagtcatatttttatatgcatggtggtttatatttctgtctggacatgcatgtttattgctcctgacaggatggtaaatgggtatagtcataattggaactgttccctttgcagctcatcctcagtaggataaaactagttcttgatcctcaaccaaacttttcagaaagtactccataagttacaaaataaagagatcttctgagaaactacttaggctatggcatttgactcattttttactgcacaatttgcattcatttattctcatatattttgttgataacattctgcccattaatattatttgcattgttaatactgatgatttgtttttacttaacttctcacttttatcgtttgagcacagtatattttggtgttttttttccccttgagatcattgaatgaaatcctggattcttaccttttcatatgattcttgttttattttgctgttattattagctttccatgtggcaggtattaaaatctttatatttctgaaaaatactcttctcttggtagcattaaataggtaaaatgaagcttcagttatcatttcctacagccagacaaaagaaaaacttactttaccacttgtaaatcctgtatgttttggttttctggtatgcttaaacagtaataaaagacaatgaaatattttgaagagacccatttcttttagagaaagccctagactttgggaaaacataggagcaaatttttaaaaaaactttaaatgattatatggaagattttaggacactaattatatgtctgtgcttgccttcatagttttcccaattttgagaaaggcttttaagcttttgtggaacaaatccttttcatgtcacacctgtgggcacattcaagaccacaccttatgatgctactgatttcactaaagcaatactaaatggaggctcttacatcatagagctatgatcctcccttgccatattaaagtaaaaatagtcaattatgttacagcacattcaagtgaaaagaaataattttgctttttggcccaccgtgcagactctcaccctttctgcctgagaattctcaccctcaggatggaatctagcaatatgattttaacaagcatgctcattatcatgcttattcatcagttaaatattcaatctttgttgccacaatgggttgttatttttctaagttgctaccccaaaaacagtcatgtaggaaaacaaaagagctgaaattagtagcaaccaacaataacaaaatagagggctagatcaacactctgtgagctgagactacacagaattagatgaacaaactggcttagttagccataatcataacgttgtggcgctatcttttaaaaatgctgttctctgtattactcaaatacaaaccaggcagggtagttagcttctaaataaggctacaggtctgatcaaatgggatgctagtatcaatttcataatttccactcaccttaatgtttgagatgaggttctgattctcaggtacctgaggattaattgcaatgagcaatccattatacccattgtcttgaagctgtactccagctcccaggaatgggagttctgaacttaaggcaaccaggagagtcacaaacttcaggttgcaaataggacctgcaatgctcctttgggtcatgttgtagagaagcctccagttcactcacactgagcctgctgcatacattgtgtcaggttttcaatatggatgcagatggtttcttcctgaacttgcaaggttttagaacacaagatgaaggaggtgtcttctttgaaaagtctggggtggatccatctgggacctgcctctacaagtccttttcctccaggcaatgctacacttgcctgttctgtggctgagctgcctcctgaatcatggttgggcaagaaacattctgcccttcattcattttataacttttcagaaagaagagggaaataagaccaaaggagcttaaaagcaggaaatatgggctggaaatcagtatatctggactgttcaatccacttgcagtagaaacacagaagtctatagtgattttcctctcctcatttttcataacctcctccatcagttggcacaagtactttctactgccctcaagtcatttttcatttgttgcaagatttccttgcctgtttattttgaagatttagaaatccattctgcagcccagtccctacagcccttgggtcagatagtctgggcaagctctcagctgatggctggaggtcagatatcagatatcccccagagagggccaactgccaggaacttgggtgcctgtgcagccctttccctctggccttgctaccttttctctctgcctcaggaagaagaatagatttctccttcagctctctcctaagggcaaggccctgcttcagtcaaccctccatttctccaggaccaaaaacaggatctaatatatagtaaccatcgcaaatattttatgactgattcataatacctgatatttacctcatgctttaaagtttacaaatgaactcatttaaatatcaatactctgatgcaggtataatttgtacttttcaaatgaaaataatgagtcttggaaattctgattatgaaaattagccaatgagagaagaaactaacattttttgagtgatggattttattatgcctattttatgggtgacagaactaatgttcaaaaaaatctaagtaacttgttcaaggttgggagtattatcatcgtactagaatgaaccaactgactccaaattccactgtttttcaatatatcatgttctctcttagttactaaattatcttagtaacctcgtttctccctcttctttgtgtttaagaatgccgcacagtgacatctattgtaaaactaaagaaaaagttttattcacagcgtcagaggtccacagcaagcaaaacctgtgactcttccctgctgtggccccgtctcggaacatttctggggaggggagtgtagcatttaggaaacggtctgtccctgctctcaacagggatttcaccaacattgtctgttttcaacatcttcatgggcagtgtgatgtcactcttcttcccagcaaggttggagtcttctgaacttgggctttgatattgcactgcaatgttgacagatgttgagggaatttttttccccttgctgtcttgcttgaatcattttctcatgcttcttctcacctgcttttccttcaaattccagctgtgtcctggaagcctggcctgagctccataactaagtcaaattcccttctttcatgcttccatagcatcagataactcacctttgcagtatgatcatggtaacaatgtcaaatttatattgtataattgattgtcagcttcctgctgtatgaaggaagggatggagtctgttttcattcagtacttccccagcacctatctcagtaaactctctgttgaatgactgaatgaatggagtcaggagaagtaaataaaacaagatagtgaaggagccccgggttatagtgtaaaaattctttcccccacccttgttttctagaaggcatctcctctgttctagagcagtttccctcttgctccctcttgacaggcagtgcttgagtatggtgctctccttgaagaatgggatggcgctggtcattacgtggctgcccaagggtcttaccctaaagttcaaaggtcagcttagctgccttttctcccaaactgaattcccagccctagtttttttctgcttgttcactgtgtcttcagagtagaaggccagaggtgtggcagctccaaaggctctgtctgtaaatgtgact

SEQ ID NO: 433 - DNA, 4001 bp, Homo sapiens
atttacttattaactatatctctgaaaagaagatacactgcatggtgccagaggctttaaaaaaattttactgctctttagcatgtcataaacattcaacaaagaattctttaaagaacaaatgagtccaactgctaacttacagatcaagaaactcagtgtcagggagccctgtgccttgtcttctgtcttgtggtgacacagtgtagaaccctgtctaaaaccttcatctccctctgcccattaccatattgtcctcactgcaccacactgcttttaacttcctgaaggactcagaagtttccataataattattaactattaactttgttttcttctccataattcaaacagaagacatcccaattcttttttttttttttttttttttccagagagggagtcttgctctgttgcccaggctggagtgcaatggcgtgatctcagctcactgcaacctctgcctcccgggttcaagcaattctcctgcctcagcctcctgagtagctgggattacaggcatgtgccaccatgcccagctaattttttgtatttttagtgaaggcggagtttcaacatgttggccagcctggtctcgaaatcctgacctcatgatctgccctcctcggcctcccaaagtgttcagattacaggcatgagagccaccgtgcctggctgacatcccaattcttgggaaaaatatttgcaaactattcatccaacaatggattattatccagaatatacaagaaactcaaaaacctcaaagacaaagtaataataataataatattttaaaatgggcaaatgatctgaatagacatttctcaaaagaagacaaacaaatgtccaacaagtatatgaaaaagtggtcaacatcattaatcatcagggaaatgcaaatcaaaaccagaatgagacaccatctcagcccagttggaatggttattaccaaaaagacaaaaaaagtgctgacaaggatgtggagaaagagacctattatataccattggtgaaaatgtaagttgatacagccattatggaaaacagtatggaggttcttcaaaaatctaaaaatagaatgaccacatgattcagcaattccactagtgggtatatatccaagggaaaagacatcagtctgcacttccatgtttattgtagcactattcatgatggccaagatgtgaagtcaacctaagtgtccatcaagagatgaatggataaagtgtggtatataaacacaaatgaatactacttagtcactgaaaaaaatgaaattgcttcatttgtggcagcatggatgagcatggaggacattatgttaaatgaaataagccaggcacagagagataaataccacatattcttatgcatatgcaggaactaaaccagggtatcttatggagatagagagtagaatgatacttattagaggctgcaaaggataggggagagaaaggaaatgaagagaagtttgtcaatgtgtacaaaagcacagttatgtagacagaataagttctagtatttgatagtacaataggaaaattaaagttactgataatctgttgtgtatttcaaagtagctagaagagaataattataatgttcccgacacaatgcaaagataaatgtttgagttgctgaatatgctaattaccctgatttgatctttacaaattgtatacatgtatagaaatactactttgtatgccataaatatgtacaattatatgtcaattaaaaataatagtaaaaaactaaaaattaatgaaagatattccattttgttcttacctctatttgttcaattattttttcatcttctggcacactaggatctataacaatgacaatatcttcaaagccattattattcagcttaatgaaggaagtatttgactggtgcagcaggcacagaactaagaggaaaacaaaacctctgaataaccccattgttcctctctagttattcctggctcaaatgttggtttgttcaagaggcttttcttttctttctctttatatacgttcctaaaacttaccagtattggctgattatgggatgttgactgtataaaggtacattacatgagaaaatacatgactaattcacctgattgcttaattatatgttacataaaagtgactaagagtcagaataaatcagatcattttataaaatgcattgcacattttcctgttggaacacgttttctttattgttgtcattgttgatattctaagggctccttgacaacagggatttttttttttcaataggtttttgggtaacaggtggggtttggttacatgaataagttctttaattataatttctgagattttggtgcacctaaccacccgagcagtgtacactgtacccaatgtgtagtcttttatccctcacctccccctcctatccttttccccgagtccccaaagtccattgtgtcgttcttatgcctttgcatcctcatggcttagctcccactcatgagtgagaacatatgatgtttggttttccatttctgaaattggctgctgcaaatgccattatttcatttctttttatggctaagtaatattccatggtgtgtgtgtatgtatgtaggtatatgtgtatatatatatatcacattttctttatccactggttgattgatgagcatttgggctagtttcatattttgcaattgcaaattgtgctgctataaacgtgtgtgcaagtatcttcttcatatatgacttcttttcctctggatagatacccaggagtggtattgctaggattgctggatcaaatggtagctccacttttagttctttttttttttgagatggactctcactctgttgtccaggctggagtgcagtggcgcgatatcggctcactgcaacctccgcctccagggttcaaggaattcttctgcctcagcctcctcagtagctgggattacaggcgtgtgccaccatgcccggctaatttttgtatatttgtttgtttgtttgtttgttttttagtagagataggttttcaccatgttggtcaggctggtcttgaactcctgaactcgtgatccaccaaccttggcctcccaaagtgctgggattacaggtgtaagccaccacacccagcccacttttagttctttaaggaatctccatactgttttccatagtggttgtactagtttacattcccagcagcagtgtaaaagtgttcccttttcaccacatccatgccaacatctattattttttgattttttgattatggccattcttgcaagagtagggaggtatcgcattgtagttttgatttgcatttttctgatcattagtgatgttgagcattttttcatatgtttgttggctgtttgtataccttcttttgagaattgtctattcatttccttagcccactttttgatgggactgtttgtttttttcttgctgatttgtttgagtttgttgtagattctggatattagtcctttgtcagctgtatagattgcagagattttctcccattctgtgggttgtctgtttactctgctgattatttctttagctgcacagaaggtttttagtttaactaagtcccaacaatttatctttgtatttgttgcatttgcttttgggtttttggtcatgaagtctttgcctaagccaatgtctaggagggttcttctgaagttgtcttctagaatttttatggtttcaggttttagatttaagtctttgatctatcttgaattgatttttgtataaggtaaaagatgagaacccagtttcattcttcaccatgtggcttgccaattatgccagcaccatttgttgaatagggtgtcctttccccactttgtttttgtttgctttgttgatgatcagttgactttaagtattttggtttatttctaagttctatattctgttccattcgtctatatgcctgcttttacactagtaccatgctgtggtggtaactatggcctta

SEQ ID NO: 434 - DNA, 4001 bp, Homo sapiens
tatttttaccatttctctcctgtctcaggcttcggtactaataatttttaaattataatatgtataatagtagctaaaggccgggcacggtggctcacgcttgtaatcccagcaccttgggaggccaaggcgggcgcatcacctgaggttgggagctccagcccagcctgaccaccatggagaaaccctgtctctactaaaaatacaaaagtagcagggcgtggtggcgcatgcctgtaatcccagctactcgggaggctggggcaggagaattgcttgaacccagagagtgcaggttgcggtgagccgagatcgcgccattgcactccagcctgggcaacaagagcaaaactccgtctaaaaaaaaaaaagtagctaatattttgttactatgtgctaagcactgttacattaatttaatcctcacaaaactactggaagtagtactcttatcttcactcatcttcattttacagatcacacaaagtaacttgcctaagaccaccaagctagtaagtggtagaacccagactggctctacctaaactgcctctccagggcaaaagtactaatggctctcaggggcttctctgagaggatagggtcttagagtggagaggacctgttggaacgacatctccacagagcgggaaatagggagagtagtttatagtagctactagactggagaactaccaggaaacacagatcgtcgtgcagacggccaggcagtgagtagaaatgggcacaaaagaaaaagtctttggtttcaacgaaagcacatgagtaatgggaaaggcaagactaacctggattagtagagtcaaatcctgttttagactagaagtaccagggtataagtcgggaggctgcaacttatttcgtatgcttatgcagtttcttggaaccatggctctcaaacttgcgaatttgcatttttaacaatttcccagatgacgataaagctagtctgggaagaacacttcataatcactattataaagaaaacctgaattgtttttcaccacccagtaataaacctacagcttatggtgtgtctaactttttacactcaaatcagatttggagccaggcgcaatggctcacgcttgtaatcccagcactttgggaggccaagatgggaagatcctttgagcccaggagtcagagacaagcctggacaacacagggagaccccttctctacaaataaaatttacaaattagccgggcctggtggcgcgcacctgtggtcccatctactcaggtggctgaggcaggagaatcgctggaacccggaaggcggaggttgccgtgagcggagatagcaccaccgcactccagcctgggtgacacagcaagactccgtctcaaaaaaaaaaaaaaaatccattttggaggttgttttgtgtccgtttttgttgttgttgttaactgtgttaattcacagatttgaagttttagaaaattaactacaactaaatccgagctattctgctgacagcatttattcaaattatgcttaaagttttcagagataaccaaagccaacagaattcaacgtgcgctcaggtctcgctttgccctcgctgtgccttctccgtaggccgctctctgggccaagcacctccccggaacgcgcgcaaccgcggcggacaggcagccgccggcgcgggagctgaggtaggagcccggggcacccacaggccgcagcggacgcacgcagctagcacggtccccgccccgggtcgcgcctgcggcctccccagcgtctgcgccgcgagtccgctggacccgccagggcgtaacggcgggtaacccgccccacccgccgcacaacacacccaactgcacggactcacgtccgggatcccctgcctgcctctcgaggaagacacctgcccaggccggccgcagaagaggtcgcacagcttgccgccgcccagggtttcagcgtgcttcctgggcctcgtcatcgaattgttcggctgacggctgcgtgtccctcccccgttgcgggccgctgattggcctcgttgattgggcggggctagtagcgggaccggcctctgcgcgcgggttattttcgccgcggattttcttttacttttcatctgcggaactctttctgcgaaggaaatctcgcctggaactcaaatatatacaacggataggaaacctattttcttactattaatatatttgataagtttgaatgtgtaacattcgccatgaaacgcaagcatgatttttttttttttgaggcagagtctcacagtgttgcccaggctggagtgcagtggcgcgatctcggctcggctcactgcaacctctgcctcccgggttcaagcaattctcctctctcagcctcccgagcagctgggactacaagcgcgcaccaccacatccagctaatgtgtatttttagcagagacagggtttcaccatgttggctaggctggtctcgaactcctgacctcaggtgatccgcccgcctcggcctcccaaaatgctgggattacaggtgtaagccaccgcgcctagccacaagcataattttttaaagggaggatcacgaatgacaactgtagttctactcagggcaggacaagggaaaggtctgcacactgtagggcagttggaagtagttttgtttttgtctttaactgctggccttgcaatctcgggaaactgtgaagatggtaaaatttactatcttaaccatttttaaaggtacaattcagtggtattagatacattcacattgttatgcaaccattaccaccatccatctccagcactcatcttgcaaaactgaaactctgtacccagtaagtggtaacgcctcattcttcccctccctccttcccagcgactaccattctttctgtctttatgaatttgactactctaggtatttcatataaggactcatacagcatttgtctttttgtaactgatttcacttaccataatgtcctcaaggttcatccatgtggtaacgtgtcagaatttcttttaaggctgaatagtattccattttatgtatataccagttcattcagtcatctgttaatggataacaggttgtttccacttttggctactgtgaaataatactgtaaacatggatatacaaatatctgttttttaacccttttgggtatacacacagatgttcaaatatctgttgctttcaactcctgaatatatatacacaagtggaattgctggattatgtagtaattctatttttaattttttgaggatctgccgtactttttttttttttgagatggagtttcactcttgttgcccaggctggagtgcagtggtacgatctcggctcaccacaacctctgcctcccgggttcaagcgattctcctgcctcagcctcttgagtagctgtgactacaggcgtttgccaccatgcctggctaatttttgtatttttagtagagatggggtttcactatgttgaccaggctggtctcgaactcctgacctcgttatccacccacctcgacctgccaaagtgctgggattacacgcatgagccactgcgcccggcggaactgccattctcttttccatagtggctgcaacattttacattccctccaagagtgcacaagttccaatttccccacatctccactgacatctttttatttttgtatagtagccatcttaataggtgtgaggtatctcactgtggtcttgatttgcctttcgctaatgaccagtgatgttgagcatcttttcttgtgcttattggtcatgccatttgtatatgtttgttggagaaatgtctattcaagtcctttacccatttgttttgtttgttttattttgttttgttaagagacagggtctcgctttgtcacccaggctgaagtgcagtgtcatgatcatggcccactgcagccttgaactcctggctttgcccattttttaatgggtttttgttgtgttttggttccttatatattctggatatt

SEQ ID NO: 435 - DNA, 4001 bp, Homo sapiens
tgcattttttaacggagtgtggaccatgagttgagcgctgaaatgcacatcagtggataaacatgacaataattgagcagcacacagacttaagaaggacactgagcagagaaggaaatagaagaacacagcagtttcctttgctctcaggcaaggtttgtaaaaccagtttattttctaaaccttaaagaaacaacttaggaaaaaaaaaaaaaagaattcaagactccattttgccaaccatgtttcttagaatgtttaaaccagtcacaaacaatggaataaaaaaattctgtaaaaaggtatttctgcatttttgctgtgcagccaaacttttgtatagctcactatacaataataatacacaaagtgaagcaatttttttttccttttctttttcttgtggcttcctcaaatcatgggagtgaagcaaattttatccaagcgcaccttctcaaccactcaggtgagacagtattcgtacttaataagaatcacaagcaggtgggtatagatcttattgggctatatctggatctcagtgaacaaactctcccagtctctcaagctgggactcattcactctagctcttccctatcccttatcccccctacttccctaagccatcaacatttgcctattctacctcataaaagtttaatatctgcctcttatcttcaacccatcactgcctcatttcagaccttcagcattgctggacctctgcagcctccactgatctcactgacaccccccttctccattccaggcctcacctccttacctccacactgctaccagttcaccctgcctacgcagccaaccgagggtggctcccacagcacataacgactacattcacatcccttgacttatttatttttgtgtaaactcttcagctacatttttttaagaggattggataaatgaaggaatgaatagctattacacactaaattataataatccttcttaagagtaactcttattcgtataagctggtaatagacacatttcttcatttgctacatttgttgagagtttactatgcctcagccctgtgataggtgacagagaattaagatcaataaaacgtattccttgcaccaagaagtctgcagtctggtaaagaaatacttacaacacagagatgtcaatgttattacaggaaaatacaaggtactactagaaaaaccaaggctagaataactaataagaaaccaaggttagagtatccaaagaaaaatttgacatataaaaatcatacggtacacggaaacactagaaatacaaatttatcagcagagacaagaatatagagcgatttaacataatataaaaatataaaatttatcaataaaaaaactaaccttataagttaaagaatcaagtttgtgataacattctgatatttcatcagcacatgacaagtcaggactgacatccttttcccctgaaataccatattttgcctaaaacagagtatagaaacattttatttctttatagtttagttacaaaaatagcctttggttaatgaagactaagattctgacttcatcatttcatgactctgcatgttatattcttaaattgtactgaaccacaaaaaaaaagtttcaaatgtacacactaagaactaaaatcatattattttgctacttcaagggctttacattcaaattcaataccaggtaggtttgaaataattttagattaacagtgtcaagaaaatattctgcataattgctaatcatggatccatgaccctcatagctctgtgcaaaacaacagagctagactgtttccatcatgggactgataaggtctcacacacatgcacgaattttttttaatacctgagattttctcattgttcctgaagcagcatcatagttaagcatgtctgtggggtcaatccagtcatcatcatgagcataaccagctaccagcaacagacattcacaaaggagcaaagaacacagcatcctgtataaggctaaaacaatttttaatatatataatgaaatagaattatttttttaaataaattgggttttgggttattattattattattattatttttagagacagggtcttgctctattgcccaggctggagtacagtgatacaatcacagctcagtgcatcctccaactcctgggctcaagaggtcctcctggctagctgggactacaggtgtgtgccaccacacctggataattttttttttttaatttttagtagagacagggtctcactatgttatccaggctggtctcaaactcctggcctcaactgatcctcccaccctggcctcccaaagtgctaggattataggcatgagccattgcacccagccagattgttttgtaatgaaaactacttccttctagagttaagataacactttctgaacagtatctaaggaagaaggtacacaaaataaaaataaattggtgttcatatattaaaaaaatgcatatatgcataatatgctcactgatataagaaaataggtatttttccatatggcccagcaattccattgctaggtatatacccaaaagaaatgaaaatatatgtccacacaaaaacttgtacatgaatgttcagagccacatttttcgtaatagccaaaaggtgggaaaaacccaaatttccatcaacagggccaggtgtggtggctgacacatgtaatcccagcactttgggtaggtggatcacttgagctcaggagttcaagaccaggctaggtaatgaaaaaaataaccaaaaaattagccaggcgtggtagcgcaagccagtgatcccagccccttgggaggctgaggcaggtggatcgcttgagcctgggaggcagaggttgcagtgagccaagatcacaccactgcaccccaacctgggtgacagagtgggacccccatcacagaaaaaacaacaacaacaaacaaatttccattaactgataaataaaactggtatagccatgcaatggaatattattcagccataaaaagggatgaaatactgacaccatgctacaacacatatgaaccttgaaaatgctacattatgtgaaagaaaccagatatgaaagaccacacattatataagtacatatatatgaaatgtccagaataggcaaatctattaagacagaaagtagattaacaggtggttaaggctgaaggtttgggagtatagtagctaaagggtacagggtttccttttgaggtaatgaaaaatgttctaaaattataataatggttgcaaatacatgcaaatatacccaaaaccgttgaattgtatacttttttttttttttttttgagacagggtctctccctctgttgcccaggctggagtgcagtggcacaataccagcttacttgcagactcaacctcccagactcaagtgatcggcccacctcagcctcctgagtagctgggactacaagcttacaccacacctggctaattttttaaaattaattaacttttttgtagagatagggtctcactatattgcccaggctggtctcaaactcctaggctcaagctatcctcccacctcggcctcccaaagtgctgggattacaggcatgagccactgcacctggtggaactggacactttaaatgggtggattatatagtatgtgatttatagctcaataaagtcaatttaaaaacaggtattttaacgaatctcccccctatttttgggttttttgtttttttgagacagagtttcactctttttgcccaggctagagtgcaatggcgcaatctcggctcactgcaacctctgcctcccaggttcaagcgattctcctccctcagcctcccaagtggctggaattacaggcatgggccaccatacttggctaattttgtatttttagtagagatgggatttctccatgttggtcaggctggtctcgaactcccgacctccaccccaccttggcctcccaaagtactgggattatagg

SEQ ID NO: 436 - DNA, 4001 bp, Homo sapiens
acagattattctgtttttgcatatagttgaaatccttcataataaaagttaaacaaaaaagtgctacaaatcctaacgctgacactaaattctacagcatgaagaatttatggaagagtgagactctgtcaaaaaaaagaaaaggttgtggaaaattacctaatgatacaaaaagtataataaagggggtgagtgggacaggttaaaatagatgatttagtggaatctcatttttgttacttaaaaaaagcatgtatcatgtatataaaagcatgggtaaggatgtagaaagatacttagtaaggtgttaacagtcatcttttaatgaatggagttataggcttttctctaccttctttattacgtttaagaatttaatgataaaaagtcacgcatgttgtttcaccccagcagtgttggctttactaaaaacacatactctaagaatcccatacatgaaaggtggaacttaatcaagaacatgtcagagagaagctgcttgagcaagaaaatatctgaaaagcaagctctcctagaagagaagcaaggcctccttaacagtttataagcacacacctgttaggggcacatactgcctgccagtgcctttcactctaagtctctctgtaagctgtaaaagcaaacagtttaatggcaaatacatactctatccaggttaaggtgccacagatttataaacgtgtaaaaacaccagaccttgttttggggttaaggtgagaaaagggcttgctaaacagtctctttcctagaaggaagttctcttacccactcactccctgggacagaaggtcaaagagcatctctggttggaatcataatgcttcggcctgaagtgaccaggccactcactactttagttgcccaagcagtatcaaaggagctcacctcatagtctttccttggaagaatctcatcctcctcctcctgtgtttctccaaggatggtctagaaaaacagatccgcagagggagccttttttagtggttaggagtggaaggaggcagaagtatttactgaaatcagtggctagcttctaaatcatctggagccattatcaaataggaaccagccctcaaaaaaaacctttcaggggtgagggaccatgtgggtgaggatctacagccatcagctgagctcttcatttccactgatagtctccaaataaccaccctcctcttcaggacacctcaaagatgtccaacgccagctgaaaaggggggtaaaaatgcaggttccatttgacagtgtgacgtatctgaaatcagaaaggacttgtcaactctgggaacacaactcaagttttcccaggatgctttgcagggggaagctggactgtcagtgacccagaaagggtgagggatagagtgagaaaggactggagaagctaaaacagcagcatgataagcacaaagtcctgtgaggaagctcattctgaaaacgcttgtttcattccaaactcttttcagatggaaataaaaggaaacatgggtgggatttactggagctggcctggattctccctcagattccaggaggggttatgagaaaagaccccagacttaggcacgtgaagcagggtagacgcttcgagagccctggctgcggtccccaggccccacccgctgccacctgcgggcccagattggcccggccccacccccggcaacgcctctctcagtcccttagcaaccgccccctccccaggccgactccgccggcttcttaccagctcctcgggggtgcgggtctcacgctcaccgcagcagcagcaccacctgcagcagcagcacagagaccccctgcaccccgccatcttcctcctttactgccactctggacccctctaccaaccccctcccagccaggatctgcgcctcacgtgactggccccgggacggtcacgtggccctctcgagctctgggactgagaccaggagtggctgcagacgggtggggcgaggactcgcgtcacatgacgataaaggcacggcctccaacgagacctgtgggcacggccatgttgggggcggggcttccggtcacccgcgccggtggtttccgccctgtaggcccgcctctccagcaacctgacacctgcgccgcgccccttcactgcgttccccgcccctgcagcggccacagtggtgcggccggcggccgagcgttctgagtcacccgggactggagggtgagtgacggcgaggccggggtcgccgggagggagatcctggagccggcaaacaacctcccgggggcaaggacgtgcttgtgggcggggagcgctggaggccggcctgcctctcttcttggggggggctgccgcctcccttgcgcacccttcgcgggattagtgtaactcccaatggctaccacttccagcgaccgccaaccctcaagcgaagactgactttggctccctgcctggacggaggggcccctgagccaggggtgacgatcccgcccctctgaccggcccaggcccgtgtcctcgcccccatcggtgactcagtgacctggtgactggattctcggccacctgggcgccgagacggcttccggctcctgccttttaaacctgcctccccggcgatcacctggagaagagcgctgggcccggggcactgcggtccctggcgcccactgcgtcccgctgcgcacgggggtccgccgggacctttctgggagtcgtaggcttagtatcccagtgcttggcgcagactagttgttcagtaagtggcagaggcttattttgagagagtggcagcacctggccctttggcgctcagtgaatgttggctatcaccgtgtgccaaactctggggataccccaggcaggacaccggtcctgtctcagggaactggggaaagagaaaggagacaggccttttcacccacagttacaacccagggtgctatgggagtccagctgataacggataaatcgtgggagttggcttacaaatatggcacatgcgtggcatatactaggaatgcaataagtctttgaaaatcagagggtttacaggtggttcagcttcctcctactctaggttctgttccagcaagcaattaacgaggtgcgcccttaaacgctggaggaaagccaactggctgctcttgctgttactcctcccccccgcccccgttcctcactccccacagccatccccactgagaatctggagtttgaggtcagaatgaaagagagcagccctagagggagaaagctttggcccagggttcttagtctggaatcaactccttgtctttggatgtatccccgtgtagtctgtgcacctgtgtgtgtatttcaggggaagggagcagtgcatttaatcagattgtcaaaagagtctaagaccccaaatggttaggtacacagggttagtggtggacagtctgaaagaaatgaacctcacctgggctttcctctgttgtgccatgtcaccacacacccattcactactgtgtgtttgcccattgctgtgcaagtgttttgtttgtttttaagtgtttgtcttattttcttaaccagactgccagatgaccctatgccctctgttggcctgtctgtgccctggtggctctgattacttgtttctgttttttgtttttgtttttttttttgagatggagttttgcttttgtcgcccaggctggagtgctatggcacaatcttggttcactgcaacctctgccttccgggttcaagcgattctcctgcctcagcctccagagtagctgggattacaggcgcccgccaccaaacctggctaatttttatatttttagtagagtcgggatttcaccatgttggccaggctggtctcaaactcctggcctcaggtgatccacccacctcggcctcccaaagtgctgggattacaggtgtgttttttgtttttttaagagatggagtctcgctatgttgcccaggctggccttgaactcctgggctcaggcaatccttctgcctcagc

SEQ ID NO: 437 - DNA, 4001 bp, Homo sapiens
ggtatccccagagcgtgcctagaatcccttggcccagagcagcacctgccagggaagagttacctcggaccacacacccgatggcaaagttcatggcatagctgaccagggccatgagcaccccgagggtcatcaggaagtaccagtcttctcccaggcggaacaccttctgctttagccactccaggccacctggggcagggtatcggagtcccagcttatgttggggcaaggggcacagacagccccttccctggaggtctgcttggctccaggcagggaggaccctggtagttgagtctggggtagtcctgagggggccccgcctgagtcagagaggaatgcaagttgtccacgttcctcgcactgggactggcagatggctgtgtcaggatggaggagccctgaacagaacctcaggccaccactgagtgagcctggagctaccctctgctggcttgcctcacactgggggctgggcaggatttgtggcaggtgacagtggtggcacagtggatgccaggactgctgcccctgccagaaggcctttgacctgtccactctccccacccgtgcctgtactgggaggttcctgggggacagggagtgtgaagggggctggcagctatagctttcacctgtatccctgcaggatccatagcttagagagcaccagggtctagcagacttctgcgtgtcccagggcctgtggcgccaggtatcctctgggtccccagcaatgcccctggcccgctggctgcagcccagcctgggagctggccctcactggctgtgggcaccagccactggcactgcacttagtctccttctgtggtccctacttgctctgccccgtagctgaggggacagtcaggtctcaaagtgaacaaggcacatggggctccaaggaagggtgccaagtgcaggctgccccagccccttgctgtgcccccagctgtcccagcagctaacccccacgtcccctcattggcacaggtaggtgagggagaggcctgggtggaagataggcacagtgaccaggccttgggctgtatctcctgaaaggcagagggcagatgcctggcccatctgacccacagacagctggacagacagaccccttccctccctgccacccaggagactttgggcagtcatgtcctggacaaatgacaggagggtggttcctgggcagagaggtggggtgggagccaggcaggaatgatgtcctgagtggtcccccgcgggtagggaagaggacctggctctcaccttggatggctcggcggatgtggggacaggggccccacagctcctgcagagtcacagggtcccctgagaagccctcacgcagccccaccaactcctccatcaggcccctggagaagcagatggagggaaggacccgggtgagctgctgcacgtcctcgcgctgcctctgggcccttccagtgctctccccacccaaatgaagaggaaggattgtgcgtgtgtgtgtgtgttatcacactaggtctgtgtgtgccctcatccctgaggttccgtcactgagggtgtgtgcctgtgtgtgtcattttgtgggatgagggtgggattcctaggtgtccccctgtgtccagcagcagactgtggacaccgctcccaccctcctgggtcgcttggtgcttccactactgggagcagtctctgcccagggctgtgactctctcactgcagagtcccatggatggctccgactctccctgccaatctcggagcaccctcctttctccccgacagctcaggtcacagaggcaggaaaaccccaggaccagaaggcctctgcaaagccaaagtgaggtgctggctactgcccctaccatcccctatgccctgcctgcctggcccttccaggttcatactccagtccacgcccagagacccctcacctgtcagtcctcctgctgcggctgaactggccctcctctcacagagcctcctttgctcccagctccagtgcacctggacaggtatatgctctaccaatcatcactctctccctgccaccccccttccccgccggccggggtttaccatggagattaaaaacgtccttgacaaaccaaccagaactgtggaggccagagctgtgcagggcagaactgccaagagagaaggggagcaggagcctccccacccatcacagctgcacagagggtggtgcccagctgtactcaggctcctgggtgctgctggacgagggctgggaagggggagctcatgcacacagcaggacagagaggggtcatctgccaaggctgagactcagggtccaggggtctcagagctggacatggaaggtttgaaaaagcacagagggagaggggaggaggctgggaagggaaggagaaggcaggggggcaatggtgagtggggccagcatgaccacagcctccctgtgtgtcaggtagagagtcagccttctcccagattaattaccctgagtgcccacggaaatcccacgaggcaggcagcgtgatcccgttgtagagaaatggtgtctcagggagctggggctgcctgtctaagatcacggaggccgaggcagagccaggattcccagcccaggtttgcctggctccaaagcccgcaggctgtgccacacggtcccatcctgatgacccatcttgtccagggctggcgaggaggccgacacctggggcaaggcagtgaattggggtcaggaactcggacttgatcctgtgtccagaccctccaggctcaggaaatgcttctcaaagcacacgtccaagggccagcggctctggtggggacttctgggtaattccacagagtttgtcccaccccaacagaggatggcagcacaggtgtgaggggacatggcgaggaacaagcacctgccgtgtgcctgcgacgtgtcaggagcgtcacatctgcagctcaagtcctccttcccacaccctgtgaatggggagagcctcgccattttgtagatggtcagagaggtgagtcactcatccaaggtcacacagcagaggctgaacccagccccacactgtgcagctcttcccctgcccaaagctcctccagctcctgaggctgaaccagggcaatggtttgggcacagaacagaagagttgtgtctgatgccacttttgggcaagaggttggggacaattgcctccactcccacccagacaaagccaccctctgaagcttatgatagcccttggatgattgttaaaatctgggaccctgggccaccctttgcccctagatgccaggcaagtcaaatcaaaatcaaagatgtgtgttgtgggaggtgggatgggagttgccgctctgtatggactcgagcccaccttcaccttggccaccccgacctgttgactctgcacagcaccagaactggctgccctgtcaacatcccgatttccagtgtctggtctggggcagctgctggctactgtcccacagccagcactgcacgtccacatctaccctcaccccccagccctgtgtgcaccaggaggctgagaagagggcagccagggtggctcagcaggatgaccggtttgaagccagcacagctctgctgaccctaactctttcatcaactagagcctcagtttcctcttctgtatgatgaggtgagcctggaagcaggggcctgtctctgccttattcatctctgagtccttcagagcctagaacagtgcccagcacctatttatagcaaggtttcaatgaatacctactgagtgatgagggcttcatcactggcctatgagctggctgtgtggggagctgatgggaagagatgtgaggtcccttccccagatcccaaatcaaaatcctggggtccaaggaaagggtctgtgtttgtgaaaagctctcctgggtgactgggattcaaaggactgcatcatctttgtagctccttctgtctctgtgatctgaaggtagaggcaggggaatgtccttgatgaccttttgaggtc

SEQ ID NO: 438 - DNA, 4001 bp, Homo sapiens
agagctcagaatcccttggcccagagcagcacctgccatggaggggttacctcggaccacactctcaacagccaagtccatggcacagctgaccagggccatgagcaccccgagggtcatcaggaagtaccagtcctcgcccaggcggaagagcttctgcttcagccactccaggccacctggggcagggcatggggtcacggcacagggtggggcaggaggcacagacagtcccatccttggaggcctgctgggcttcaggcagagaggctggggcagggggatggagcttggtggtatactctggggtagtcccgagggggccctgcctcacataagtggccgggcaggatttgtgggaggtgacagtggtgacacagtgggtgccaggactgctgcccctaccagaaagccgttgacctgccgaccctccgcatccctgcctgtactgggaggttcctgggggacagggagtatggagggggctggcagctacagctttcacctgcatccccgcagagtccatagcttagagagcaccaggatctagcagactcctgcgtgtcccaggacctgtggcgccaggtatcctctgggtccccagcaatgctcctggcccactggctgctagcccagcctgggagctggccctcactggctgtgggcaccagcccctggggttgcagtcagcctccttctgtggtccctacttgctctgccccgtagctgaggggacagtcaggtctcaaagtgaacaaagcacatggggctccaaggaaaggtgccaagtgtaggctgccccagccccttgctgtggccccagctgtcccagcagctaacccccacgtcccctcattggcacaggtaggtgagggagaggcctgggtggaagatgggcacagtgaccaggccttgggctgtatctcccgaaaggcagagggcagatgcccggcccatctgacccacagacagctggacagacagaccccttccctccctgccacccaggagactttgggcagtcatgtcctggacaaatgccaggaggagggtggttcctgggcagggaggtggggtgggagctgggcaggaatgatgtcctgagtggtcctccagggggaagggaagaggacctggctctcacctcggatgcctcggcggatgcggggacaggggccccacagctcctgcagagtcacagggttccctgaggagccttcacgcagccccacaaactcctccatcaggcccctggagaagcggatagagggagggaccgcggtgagctgctgcacgtcctcgcactgcctctaggcccttccagtgctctccccacccatgaagaggaaagattgtgcgtgtgtgtgtgtgtgtgtgtgtatgtgaagttatcacactaggtctgtgtgtgccttcatccctgagtttccgtcactgagggtgtgtgcctgtgtgtgtcattgtgtgggatgggggtgggattcctaggtgtccccctgtgtccagcagcagactgggcacaggccggagcccaagccctgctcagagccccttccccttcggtggcagccgctcccaccctcctgggtcacttggcgcttccactgctgggagcagtctctgcccagggctgtgacactctcactgcagagtcccatggatggctctgactctccctgtccacctatgagcacccctgaccccagctcaggccacagaggcagcaaaaccccaggcccagaagaagatcccaccagggccaaagtgaggtgctggctcctgcccttaccacccccccccccccgccctgcctgtctggccctggcaggccccagcatcttgcagcgacccctcacctgtcagtcctcctgctgtggctgagctggccctcctctcacagagcctccagctcccctgcacctggacaggtgtgtgttccaacaatcaacatcctcccccctttcccgcctgggcccagggtttatggcgaacacttagaatgtccttgaaaaccgatcagaactgcccaggccggagcagagcagagcagagctgccaacagggaggggaacaggagcctccccacccaccatagctgcacagagggtggtgcccagctgtactcaggctcctgggtgctgctggacgggggctgggaagggggagctcacgcacacagcaggacagagaggggtcatctgccaaggctgaggctcagggtccaggggtctcagagctggacatggaaggtttggaaaagcacagagggagaggggaggaggctgggcagagaaggagaaagcaggccggcaaaggtgagtggggccagcatgaccacagcctccctgtgtgccaggtagagagtcagccttcccctagattaattaccctgagtgcccacggaaatcccacgaggcaggcagcgtgatcccgttgtagagaaatggtgtctcagggaggtggggctgcccgtctaagatcacggaggccgaggcagcgccaggattcccagcccaggtttgcctggctccaaagcccgcaggctgtgccacacggtcccatcctgatgacccatcttgtccagggctggcgaggaggccgacacctggggcaaggcagtgaattggggtcaggaactcagacttgatcctgtgtccagaccctccaggctcaggaaatgcctctcaaagcacacgtccaagggccagcggctctggtggggacttctgggtaattccacagagtttgtcccaccccaacagaggatggcagcacaggtgtgaggggacatggcgaggaacaagcacgtgccgtgtgcctgcaacgtgtcagaagcgtcacatccgcagctcaagtcctcctccccacaccctgtgaatggggagagcctcgccattttgtagatggtcagagaggtgagtcactcatccaaggtcacacagcagaggctgaacccagccccacactgtgcagctcttcccctgcccaaagctcctccagctcctgaggctgaaccagggcaatggtttgggcacagaacagaagagttgtgtctgatgccactttggggcaagatgttgggggcaattgcctccagtcctacccagacaaagccactctctgaataacatgatggcccttggatgattgttaaaatctgggaccctgggccaccctttgcccctagatgccaggcaagtcaaatcaaaattgaaggtgtgtgttgtgggaggtgggatgggggttgccgctctgcatgaacccgagcccaccttcatcttggccaccctgacctgttgactctgcacagcaccagaactggctgccctgtcaacatccggatccccagtgtctggtctggggcagctgctggctactgtcccacagccggcactgcatgtccacatccaccctcaccccccagccctgtgtgccccaggaggctgagaagagggcagccagggggcgcaggacccaatgcaggtccctcccaaacccactgcctccacatcagccctaatttctccccttccatattagtcgcctggcagcagtagcgggggctcagtagagagacagcaggggagaacccagggcggctctgtgaccctaacaccatcaccatccggagcctctgttttcctcctctgtcaaatgagctgagcctgagacctgggtctctgtctcatgacagtgggggtcgggtgcccaggacctgcacagccccctcgcctcagagcagctgaggacgggatgggggacagggcacgctgaaagagacagggcaggtatgggtgggagcggggcggtacagagaacccacattcagaggtcactgagtccccacactactttgcatcctggcaggtgacatgaagcagggtcccctgccctgcttttattccaatggttacacccccactgccaggtgcctaggaggggagggaggctctggttattcctggcttcccagaggaactgtggggacagctggggagcta

SEQ ID NO: 439 - DNA, 4001 bp, Homo sapiens
ggccttgggcagggctctgacctcccgaagctgtagtatcatctataaaataatgctgaggcatctcccttatggggtattggggggattaagtgagatacacgcaaaggaggcaacaaatagggcttccccactcctgccaccccactcaaggccccttacccgagaagctaggaagcggccggcgctgggtgggtaggtgatggaggcgagaaccaaggtggccagagcggagtacacaggcttgctgtgggggatgggtgggctctagggctggccctccctttcccacatcccaaggagagggaagcagggcctagcaaggcaaggactggggaggaagagcaggaatgggggacatggactgggccagctccaggggacagaacctgtggggtcagccccacactcctgggtatttttaggggtagaggctgataggagaattggggcacaggcaggctgggagggaggacagagtggggccaggctagggcagggctcatgcacctggggcaggagggcttggccaatgccatgggcacacatggtttaaagggagagagggaccaacagggggttaaaggtcagtgagggggttggggttcactgagggggtatagactccaggagatatgggggttaaatggggaggtttgaggccagtaaggtagtcgggcagtgactgtggggacttgtaggtggtgttaggggctccacatgtggggcatgggctaggatgggctttaggggctcaggtggcgggtagagctttctacataaggttgggagtacggtgaggggggagctcgctgagaggtccccagcccttagcccggagcctacctggtggccagcagtttggagctgaacctattgttcctgatgaagccaaagaagattcgctgacagaagaggtaagcgctgcccaggatgccacagagacccctggggagcatggagacatgagcccagagcccgaccccagtaccaggggccgcagtccaggccttggggggaatgccttttggactctcaggggcccaaggcacccactcaccccagcgccacaaaaaagaagatctcaggcaggtcgaagggaacgtccacccggaaactggtcttgtagagggaggtgatggtctctggggaaggagggcagtggggagccaagatggcgctcccacccgacccaaactcaagtcccagactaacagcccagggtggagggggtgccaggtcctgactcggaatctgtgtcctggcattccaggcccccacaaccaggctcctgcctccctgcccagcctcatcccttctaccctcagggcccctgcccttcttgctcaacacaggtcagccccctccatcctcccagaaggaggtgggaacaaggaagaggaaaaagagggagagagagggaaaggaagagcaaggggtgtacacaggggagaagggagggccccctcgccccggcccccaggcagggccagggtcaggcagcccagggggctcaccctgctcgctgttgaagaccgccaggagccggaacatgaaggccccgcaggtggccgcaaagaagcccctccagtaatcccagacagagaagtgggaagacatgacctcgatgctgaacaggacgcctgggggcgacactgatctcaggtgggccctccacccccacccacctgtgactgtaggaccccctccccatgtcacctcctccctgacccatctgtcctgctctcctgcagcccggacagggacagacaggaggggagggcagggcatgcgccctgggcggggaggagcccgctgcccagagacccgtccagcctggaatgcgggtgtgcgccctctcgctatcgggtggggacggttgcgatctccattttgtagaggaggaagccgggctcagagaggccaacgggccagggtcatacgtggatttcaaacccaagtctgtataatgttacactgaagcctcttagcaccgccaatcaagtcacccgccccccctccccccggtggggggcggtggctgtgcccaaggcggggctgaagtgagaactagaatgagccccaccccctcctccaggctctcagctgggccgaaggagcccagggtgtgaggggaggagcttgagggacccagggggcggggcatgaaggggtctcaccgctgaagggagctgcaaagactgtggccacgcccactgccgccgctgccaccagcatttcgttttgcttgctcttgttctgggggatccgagtccagggctcagagtcagccccctccctccccactcccatttctccaaggaagcccccgagtccctaacctcaggctccccgatggtcgtggtgcgcacacggcccaggtaggcagccatcatcacagacaggtgcacgaaagggccctgcagagagaagggtgggcccagggcccaggtgagggcagcagagacggtctcacccagagtcagcacggcttccccccaacaccccctcctccatctcccaagcccccacggccgtcctcagatggcttttgtcacactccggggacctggcctgcctcttcccccaagactgagttcctggaaggcagggaccagcccaagtcccctctgacgcagctttcgtggggtgatgggggtgagactggggtggctggggtgggtagggtggttgggatgccctcacccctgcccataccactttcccgaggaagagggtgctgccacaggccagggtgcaggagaggcccaccactttggccccaaagttcttgatatccaggtagtcctccaagaccacacccgccaacatggtcttcacctccgggattccagaaccttggcgggggtgggcagggccaggagggggacaatctctaggttaaaaatctcaacactctacctgtgtgatgttttcacattacgatctcgccagatcagcagaaccctctgaagttaggattattttcctttggggacaagatcttgctctgttggccaggctggagtacagtggtaggatcatagcttacagcagcctcagttgccagggctcaagttatcctcctgcgtcagcctcctgaatagctgggactataggtggagaccacttcgcccaccttatttttctaaagagatggagtctagctatgttgcccgggctgctctagaactcctgacctcaaacgatctgtccacttccgcctcccaaagtgctgggattataggtatgagccagtgtgcccagctgggttaggattcctttgtttgtttgtttgtttgtttgtttgtttgtttcagacaggggtctcactctatcccccagactggagtacagtggtgcaaacactgctcagtgcaggatcaaattccccaggtcaagcagtcctcccgcctcagcctcctgagtagctcggaccacgggcacatgcaatcatgcccagctgatttttttctatttgttgtagagacagggtctccctgtgttgcccaggctggtctcaaactctaggcacaagtgatcctcctgcctcagcctcctaaagtgctgggattacaggcatgagtcactgcacccagcctagggtaaggtccttaaactcatttagcagatttggacaccgagcatcacagagggaatgtgagttgttcacgttcctcccgccaggcctggcagaaggctgtggcaggataggggaagcccggatgaaatctcaggccaccactgagtgagctttgagctcccctctgctggcctggagcaggaggcagggctgagcggcctgggggagctgtgcctcctccactggcccctccctggcactggccactggaacaggcttcgcagaagatcctcccaccaggcctcccatcaagtcccagcggagcccctggaaagcaggtagggccagcagtgacccaaaagtcaagatctggccttcttgctgtgtccctttgggcaagccacatgactcttcctgg

SEQ ID NO: 440 - DNA, 4001 bp, Homo sapiens
gaagaactcctgggtcaccagggtggcataccacgagacagcagtcaaagtgcagaggcctaaagacaaagcagaggggcgctcagctctgctctggccccccgaggccactggggctggggctgcctgccatggttgtgattgtgcaggagtgaggggcactcacctgccaggatgaagagggctcccccggcgatggcaacacggcccttggcaatggggttgctgtctcccacccgcgtacacttcatgccaactacgctgaggaccatggccacgaagcccaggagcacggccaccaccatcagggcccgcgctgattggatgtgacctagggtgggcgggatgacactgagtcgggctggcggggatgggggttgggtcggtgcctggggtcggtggaaggagcccagcttgagaggggcttgagcaggagctggcctggggggtcagaccaccttctggcaggtgcaggatagtgaggagtgacagcccgggcatgaggacagggtgtgggggtgagagtccccttcactgtcaacgccattctccactcgcccttgcaggcttttccggtagtatgattcactctgctgttgctttctggcctggggactccctcttgggcttggcccatcctcccaagcagctgagggcagctccagggtcccctcaggtttggtaggtggaagagctgggggtatctgaggcccagctcaactcagcctgagccccgcagcaacccctccccagcagccattcagacaacagtcactttcccctctgcccatggcagctggaagcttgcctcttcacgggtgcatgggtccatcctgggccctggggggtgctcaggagacctgggtccctcagcgaggctagatgacctgcctgaactgacctgcctgaactggcacaatggggctggttgaaggccgctctgctcccagctcccatggggagcagattgtccctgggggctcctgggcagattgcaggtggatcacctccaccccagagttagaacttcggcggtgcctgtcaggctcatctccacaccccagaaggagagggactgcatgcagacacacctgtctgtgcatgcatgtgcacgtgtgtgcgtgtgcatgcgtgtttgcatgcatgtgcatgcacccatatgctggcacacaggcctgggagcaggactagggagcaggtgtgcatcatacagtgtgtgtctgtctactgactgtggggagaagtggatgaagggtcttaactgagtctttcagagtgccacaggtattagtattcccctttagagatgagaacatcacaatgggaagaggtttggtgactagttcaaagttatagtgacagagcaggaatctggacccacagccgccagaccctagagccctcccctcccacagggcagcaggctggcctggaccgtcaatgggcacagggcagtagtgggggaattgtagagcggaggctggaggttggagcccagcgcagatagcagactgtgaggaaaacttgctccagactcccctgctgttcccacctcccatctcccaccccgccggcctggggcctaccgtccagggcgagcagcgagtcgtagagcttgcactgcacttgcccagtgctctgggaggcgcaggacatccagagcccttcatagaggcccacggcagtgatgatggcgtcgcctgcgtaggaagactgcttccactgtggcagggctgtgctagcaatgatgcccacccagccacccagggccaagaagtagcccaggagctggaggcctgagttggccatggcccaggagagaggaccgagggtcccaggactcagagctgggccagggtgccagcaggggctttggtcatggccaggtgggaggagcagctgggcagggggagcagcgagaaggagggtcagaggcagagaaggagaggtggtgcggcggcagcggctggagcaaaggcagtggctctggactccagaatgcagggggaggcccaggggctggaaaaggccagggcccgcccacagcagccgcctaagccagagcagggtccccagcaaagctcatgcccagccccctgggggcggagggccggcccatggcccaggtggtgtccctgccccgccccgttccgcagggatagggaagggaggggctgagaggaatgacccagctgccctctgggcctttccccacagggaaacccctttaggaacctgattcgggtgtcctaaaattcggataatccctaacccaaacaccagccctgggaggatggactttgctcttgcaaggctgatctaacccttggggttttctgccctttgactttaggacagaagggaaaggaatgccagtttgcagcgggtaaaactagagttagatgtcaaggataactttttggcaggggctctgaagctggatgtggggaggctgagctagcggtggggtgttgggaagaggggtcatgggtacctgggagctgtgtgtgccaaaaatcagggaggccagaccaggaaatatgtactgtggggtctttttgagatctgagggggacagaaaaggggccctatcgaggctgggccagcgctggctgccggccagcaaggggcctggtggggagctggggagacagccccaaccttctggcatcagcctgaaggaaggcggattgctcagccccttaatccccttgctggctggcttagtagctcctgctgggactggaacactgggccctggcccccaactctagagcagcctggcgcggagcagtggcctctgcacattcccggggttcaggctgcccgctccgagcacccccacctccctcttctctctcccagtctctcttggtcttcaggagtaggggaatgtttaactctcttccacctcattagcaatcccctcacgttcaagtgggccccactgcagcgtgggtgcagaaggaatgtcacaaccctgcttccactcctgccagccccccgccgccccctccgtccccaacagcccacccacccttcctggactgcactgggggaaggcagggtcctgctgcagacccctgctggcttcctcccccacagccccaacccccctctgaagggacaagtccccagcccgctcttgcattcttcacgtggctatgcaaacgagagggtgccaggcgctgagcagacaatggcagccctgtgtgcccgcccagggcgtaggcctctggtatggcctgcagctctggccagagatgggggagtggtctgccatctgagggtcaagggtgggcactgcttgacctgtggtggtgcacactgggaccctcaggctctctgtgctgggagggtcagagccacgtggatccgagcacacacagacctgcttcctggacgacctgtgggtcccaagaccaaatggggtctaggacagtggcagagaagtaagtcctgagctcagattcttctaccacaatgacaagacagtaggattgaggggagcctcctccatcctactggggccgcaatgggcaccctgtgaccagtgcattaatttaagcatgtgggccactgttgcaggcagcaggcctcctaacagtaaggagaccacggcagagggaggtaatagacccccagccaggaaacagcaggaagggctttccgcttgaaactgtgtggtgctggcccctgtggtctctctcccacactcctccctttttgagggaggcaccaggtccagattgaagggggctgcgggcagtgacaagatgctccccaggggtgacctgaatgactgtggtgcctcagggtcctcactctaaatgggaggtttgcttcatggagttgtggtggtccgttaaagtaagcgatgtctggggagggcaggggcctggtgctgggtagctgctccgcatatgctcctccaaaggcaaagtcctccttctctccacgctgggccttggccccttttccccgccatctgcaggcgctct

SEQ ID NO: 441 - DNA, 4001 bp, Homo sapiens
gccaccgcgcccggcctccttcctttcttgtatttcaggttccttcctacattctacgcatctcaaagtactatatctgccactcaaagtaaccgaaacgctttgatattttgggggttctatacctgtctgctgtttcagttccctggaccaaaaaaaaaaaaaaaaaaaaaatcgaaaattgacaattgaaagaaaatcctaaggcaaacactgttccagtcattactgaagactgcagaggtaaatgcagattatttcttctctccatctcttttgtttgagacagggtcttgctctgtcgcccaggctggaatgcagtggtgcgacgtggctcactgcagcctcgacctcccgggctcaagcagttctcccaccgcagcctccagagtagtacaggcgcgtaacatcgctcccagctaatttttgaatttttttgtagagacagggtttcgccatcttgttcaggctggactcaagtaatcctcccacctcggcctccgaaagtgctgcgattacaggcatgagccaccgcgcccagcccttctctatctcttaaacacatcctgaaatgtcctttctttaaagtaaaaactcggggaaaaaaaagaacccaatagttctagatgaccatttactttccggtatgttgcctagctctgaatgagcctggctttttaagtggctggaagaagctcaaagtgttttttttaagttttgagggaaggagctggatccagatgtttataacttcgactctctcctttgctaaaataaaaagtattaaagagaaaagcaaaggaagaggggtagtatgtgtaagcaaataaattccacacatgaaagctgaagacacaagggaaaaccaaccctttaaagcccaagcaagttaagaattctctccctcaatttctttcaaaacaaaagggcacacacaatccttcccgaagcagcaacgccggggggagaagccaaaatgttgcatcatacagaacactccgcgcttgagaaacgagaaagccagtaaatgcccaagacagaaaaacacaagttgggaatctcggtcttttccgaaggtccaagagcacctgctctttggtaaatttgtttaagattgcatcgaaaattaaagtttccgtttcagaccagtggggagcaaatgctttttcaaaaacgcgttcaaagaagttcgtttgaaagctcatcgggcggcgggccgcagttcgggctccgggcggcggaccggagcgctggggagcgggtggggccgggccccggcgcccgggcggggggtggtgacaggacccgcgcgcgcccggcgctggggccccggggcaggcaagtcccgcccgtgggctcttcccgacccacccgggcgcgggacgctggtctggcgtccgccgatgcctacgcgctggagacggtggccgccgcccgggtccccaacccggacccctcgacgggccctcggaggcgggaaggcgcgggcggcccccagacaatgggccgggggcgcgggtgcccgcagcgggacgggtgctggcgccgagcgggggcgcctcaggagagccccgggacgccgctccccgcagccgggagggagccgggggatctgccgggcgggaccgcgaggcgagcgctcaccttgacgaagagctcgatgaggggctctttgtcctcctccttcagcccattcagcggcatcgacaacgccatggccggctcggctgcgctccgcgaacggcgagggctgctgctgctgctgctgcttctgctccgggactgctccggctgccggttcccgccgtgctgctcgctggactgtccggcgtcgagctggccacggcttcagctcctcagcaccgccccacgccccccgcgccactctgagccagccgcagcccgagccgcttcaaacggctgggaggggcgccgggggcggggcctcgggctgtaggcagggccaaggcgcggcgcctcgggactctccggggaaaataaggcggcaggagcacgggggcgtggcctcgagcggggaaggcggagggaccgctccggagccgaagaaaggacctctgcggcgccccacagctggtagggggcgtggccttggtgggcggtacaaagctcaggctctggcgggcgggacccgggtacgcctctctaggggactggtgcgggggggaaaggaggggaggaattccccaggggcccgagcctgacactgcctcccgccgcagcgcctgcgcgtcctccgcagctgctgctgttgctgtgccaggtgacctcatgcctcggccgccctggggaagctaggaggcgcctcctacccactcccccgctgcagcaccccaggactcatcgccctttcccgcagcggctacctccccaagtccctctattacgcggagttgccttttccaagacaacttactggaaagttttcatcgcctggggaacacctttttcttctgcctctgacttcgtttttccctttgacgctcctgatcgtttcgatcttggcagccagcatattcacaaatatatatatatatatatatattttttttttttttttttttgagacggagtctggctctatcgcctaggctggagtgcagtggcgcgatctcggctcactgcaaactctgccccgggttcacgccattctcctgcctcagcctcccaagtagctgggactacaggcacccgccaccgcgcccggctaatttttgtatttttagtagagacggggtttcaccgtgttagtcaggatggtctcgatctcctgacctcgtgatccgcccgcctcggcctcccaaagtgctgggattacaggcgtgagccaccgcgccgggcgcatattcacaaatatttatgaaaccttactgtgtttcaggctctgagctagcccttggagagtaacaactcccaaagctcaagatcttgaactgcaatctcagtgcctgcaggccactaaggacttccaagtcgttgtccatcttgttccccactgcccacacccatttcttccccccggctcacctgtcaaatttgagtgtgcatcagaatcacctaggtgctacacgcagccccgctttttgtgtttcccagatcctctgggaaaaagagaaatccacatcttagcaagcaccaggacaattctgaagtaggtggtccgcaaaccagttaaactgccctgggatttaagcccccgagggcaagagctgtgcttgccttgagattgtaggcacctggtcctagtttgctgctgttgagtgcctggggcaagtttcacctcctctggaaacaattacttgtgcccttttctgactttccataatacttgactcacagctactcctcccaacttcccaggttgggataaatagtgagttccaggaggcccagacatgggaggtttgtctccatatcctcggtgcctagcacataccagaatgtttgaacaaattgtacgtaggcatgaaaatacagtgaaacttgcaatttcttcctctgccagcccaaagtaagttgctcaaattttctcacagaggctctgtgaaagagccagtgtatcccagtggtcaggaacacgtgctctgtagtctgactgtttaagttcaaatctgacaaggcagtgtccttaaaacccctaagcctcagtttcattatctagaagtgggtggggctaattactgattcttgccttaccatatgtgctgctccgtcagtatggctgttaactgcattgagacttattctgtccctaccacccctgcaggctagaatgtggcatcatattctactctctctatgcccggctagttcgttgaaaataaataaataaattccaggaggctccccttagatgggggcttgaaccatgaaaatcctgaagtgactgactagactctggactgaaccgtgttaatttttcatagaatcatgaactgaagcaaagtttccttccagaatccaccctctctgccctaccaaaa

SEQ ID NO: 442 - DNA, 4001 bp, Homo sapiens
agtgttctatccttattttcttcaaacacagctccatgaagaccttcaggtctaggacacagttcactacagagcaaagtgtatgacgaccgatggagactgccacagtgtatccccgttcaggatctaagatatagatctgtgtgatgctgagttcctcacaagtcaatagagtaaagctttggtttacagttatgataaatgttgtacactcattaagagtacatctcatctcctcaagtagactatcagtgtcctgagggtaggaatccagtctcccaggtttctacatataccaggtaaacgccaaatactatcagctccagggatctgggtcgggccccttgaattaacttaatcatctctcacatctttggccaactctcccttgagaggttttaatgtagtaggccacaaaatacagtcagcatcccatctggcccctccactcttgtgcttaagacgtagataacaactgtttcttgtgtttttttttttttttttgaaacggagttttgctcttgttgcccaggctggagtgcaatggcgcaatctcggctcaccataacctccgcctgcagggttcaagcgattctcctgcctcagcctcccgagtagctgggattacaggcatgcgccgccacgcccagctaattttgtatttttagtagagacagggtttctccatgttggtcaggctggtctcgaactcccaacctcaggtgatccgcccgccttggcctcccaaagtgctgggattacagatgtgagccaccgcgcctggccagtaagtggtttttaattaatatcagccctacttagctgacagctggccaccttccagttaatggaattggaatgggatggttcacaaatcctttttttccttcaaggaaaaaagagaaaaatcactgtcacaatccaggaagatgagaataggaaggcacaataaaatgaaacaggcccagggacataagtcttggtgggggtgtatgagaatcgcgtatgcaaaaggtttaatgattccgatgtctgaccaccattctgtatcacttcttcccaacctccccaaattgaggagggtggtatttgatgcattcttggtgtaactggggccggtagcataccaagctgcaagcacaagattttcccagcatagttatcctaatcagcatagccacataaatgccatctcaccacatactaccatcaaacggcctcacagcactgtcccctcaaaacatcactagcctacctttctcaagtttgaaatcttttgctttttcctttcttactcagaaaatccagaactcctacaggcaaattcttcctgcatgttccaagtgacacggtgatgtattcctcccctccagctttgattggacccgagtccaactttgatattccactccttcacatctctggaaccactcccatccttactctatcatcccttctagtctggttccgcccaagcttcctacaggtcttcttggtacatctaacgcaggccgacctccttccccctcatctccctactccgtcgcttcgtaggtctcaactctcctcctctccaaatctcgcccccgtcccttgcccccaacccaagcctaaccccgcccgccccgcggtcgccatcttttcgcgcggccagccaacccgcgcgctcaccgttctggcggcgaggcccgtgcgcttgtcccacaggaagtccgtgatggcggcgacactgcggccggagtcccggcacccccgcggcgacgaaatgctgctccacccccccaacccgggaccctgggacctcccgccccgttcccgggctccgcttcagtcccgcccgccccggctccgtccccgcccctaagatctgcttggcgccgctcgcaccgcccccgcccggggcccgatcccagctcggtctccggctctggcctctccgctccgccgccgccgccgtgagcgagcacgtacgcacggaccgacgtcctgcgtcgcttcccagctaccccctgggctccgcccccaggaccgcgcgcgccaccacgtgctcacgtagttggcaggcatccgcctgtcagagcctcggaggtactgggggcggaagttcataggggcgaggagggtccacagggacaagctggaagccttccaggcccgctatgccccgcctcctgtcctttcccactccgtcttcaatcttttaccctttgcatggagacgtgtggcttagttaggtttggagtttaaaagaaaggattgtcattgtcaatacagtgtcgctgctctgcaagcctgactgtagtgaggcttgatggtgaagtctcattcttctgcatagcctgaaaataaccatttcttaaaacacttcacctacctatccccaggacaaaagtctgccaccttttgtcatcaacaaaagttatgcacgactcggggtggggacacagccatggaggaaaggtttgagcaatggagggttggagaatcgggtgccgaaaagggggacttacttgagaactgtatcctaaggtggcttacataatgtgtgagaaatacaagtttactagggccgggcgcggtggctctcgcctataatcccaacactttgggaagccgaggcgggcggatcacgaggtcaggagttcgagattagcctgatcaacatggtgaaatcccgtctctactaaaaatacaaaaattagccgggcatggtggcgggcgcctgtaatcccagctactcaggaggctgaggtaggagaatcgcttgaacccgggaggcggaggttgcagtgagccgagatcgggccattgcactgcagcctgggtgacagagcgagactctgtctcaaaaaaaaaaaaaaaaaaaaaaaaaagcgcgcatcaccacgcccagctatttttttttttcttgtagagatagtgcctcactttgttacccaggctagtcttgaacccctgagctcaagcaatcctcccccatcggcctcccaaagtgctgggattacaagcatcagccacggcgcttggccagtttactaaatcttaaaaaagaacaggaaggctgggcgaggtggctcacgcctgtaataccaacactttgggaggccaacgtgggtggatcacttaagcataggagtttgagacagcctgggcaacagggcaaaacccagactcttaaaaaaatacaaggccgggcgcggtggctcacgcctgtaatcccagcactttgggaggccaaggcgggcggatcacgaggtcaggagatcgagaccatcctggctaacacggtgaaaccccgtctctactaaaaatacaaaaaattagccgggcgaggtggcgggcgcctgtagtcccagctactcgggaggctgaggcaggagaatggcgtgaaccccagggggcggagcctgcagtgagccgagattgcgccactgcactccagcctgggcgacagcgagactccgtctcaaaaaaaaaaaaaaaaaaaaaaaaaaaaatacaaaaattaggccaagcgcggtggctcatgcctgtaatcccaacagttttggaggcccaggaaggtggatcacttgagcacaggagttcgagaccagcctggccaacctggtgaaaccctgtctctactaaaaatacaaaaattagccgggtgtgatggcaggtgcctgtaatcccagctatttggaaggctgaggcacgagaatcgcttgaatccagaaggtggaggttgcagtgagccgagatggtgccattgcactccagcctgggcgacagagtgagactgtgtctaaaataaaataaaataaaaaataaaaattagccattcatggtgtctcccacctgtagtcccagctactcgggaggctgaggtgggaggatcacctgagcctggggaggttgaggctgtagtgacccgtgatcgtgccactgcactccagcttgggcgacagagtgagactctatctcaaaaaaaaaaaaaaaaaaaaaagaaaagaaaagaa

SEQ ID NO: 443 - DNA, 4001 bp, Homo sapiens
ccctagatgccaagtctacctccttagtgttctcagggctctgaatcaacttattaataaagggagaaatatgaacatcagtaatgtaacagggcacaaggcctcagctgagtggtttctcaaaaaattattaaattggtcaggcatggtggctcacgcctgtaatcccagcactttgggaggccgaggtgggtggatcacaaggtcaggagttcgagactagcctggccaatacagtaaaaccccgtatctactaaaaatacaaaaattagctgggcgtggtggtgtgtgcctgtagtcccagctgctcaggaggctggggcaggagaatcgcttgaatccaggagacagaagttgcagtgagccgagattgtgccactgcactccagtctgggcaacagagcgagactccgtctcaaaaaaaaaaaaattattaaattgatttgaatgcaaggtacaaattttttttttttttgatacagtgtctcactctgtcacctaggctggagtgcagtggcaggatcatggctcactgcagccttgacctcccaggcccaaaggattctctcacctcagccacccgagtagctgggaccgagtagctgggaccacaggcgacgcccggctaatttttttttttttgtagaggcggggttttgccatgttttctatgcaggctggtttcgaactcttgagctcaagcaatctgccggccttagcctcccgaagtgctgggattgctgagaattaatatgtatgcactgatgatcctctcaacaatccaaagcagtaaaactattacttctgtttgtgagtgtggaaaccgaatttaggtaaccagacagctcaaggaatagggctgctttgaatgacgattatcttctaggcaatttgcagcaacgtcaaagggcagggccagtaacagggtggggtgaggtctcaaaaaattcagtaatcaaaatgaataacattaatgcaatattttttaaaaaattaaatcaataatctacagctcatgaggtaaataatatgcccgcttttgtaaataaagtttattggaaacagggatggaattagggtgaggtgattgaggcaaggtcgtgcaaatgactggtcggatctcgtctttgtttaaacgtctgatattttgttcaatatcaaatcataaaaagtttttgcattaattttggttttttaaaaatattgcattaaaatatgagtttgattgagggttttggcgcccctttaaattttgctcctaaggcgggagtgccttgcccgaatccggcccagaaaggacacagctctggaaacatctgttttctatgcccaatttcgccagggagctgccagccaccagccaggagccccagcggtgacttccccactcggggcccggtcggaaaacgcaaagggcctgcgcgcgatgacctccagggcccctcccaggcccagtgtggaactccctaacaccctcgctcgccctctctctgcggagaatccccccgcaccgctgcggccgggttcggctagagcctcccggctttcagagcaccctgaggggaggagcttccgcgacaggaaacgcgccaaaggggagggctggcggcaggaaccggctgaagaggggctgggctgccggcagtgcgcgccgcagagacctggagctctccggccacggagcccgaagcgcgggaagcccggcggcgggacgggatgcccggtcggaacccatcccggccgagtctcgaggccgcgggagccggcgcggcgaacgccgggagccgcagtcctcccgcccgggcgcctcgggtcagcggggtctaccccggccccacctaacctctcggtgcccggccttctaagcccccgtggggggcgtgtgcataaactcacctcagaacccacctcgcctgtcatgacttctgcctcccctgcgctccactagggacggagctgtctctgattccctcagccggagagcagcggctcccgccgtctccagcccagcagtgctgttcttgctttcccgcccagccagagtggaggtcccacccagatggtttgcaccaatccagagggggctttccagcgagtccccgcccccttccgacccaccaatcacgcagcgcctctggccgcccaatctcctattacccaggctgagttggcgggtcgcagctgctggtagcggagcctgggggagctggaggtgcacgggggcggggcagtcggtaccaggcgagccgtggtctttgacctttgacacttgccaaagcatcgagtgcgattggaggggtgagtctttcggggggaagtgagctgggaaacggttcctgggcacctgggagtgtcctgtacctgaactttttagaggaattccaaggttcccgtggggattttctccactgacttcatttctggagcagctagatcctgtgtgcctcttgtacatgacacttaccactgaatatatatatatatatatatatatatatatatatatatatatacacacacacacacatatgtacacacatatatacatacacatatatacacatacacatgtatgtgtatacacacacactttttttttttttgagatggagtctccctctgttagccaggatgaaatgcagtggcgcgatctcggctcactgcaacctccgcctcccgggttcaagcgattctcgtgcctcagcctcctgagtagctaggattacaggcacccgccaccaacccctggctaatttttgtatttttagtagagacggggtttcaccatgttggccaggctggtctcgaactcctgatctcaaatgatcctcgcctcggcctcccaaagtgctgggaggcctcatacccctcacaggcgtgagccactgtgcccggcccacttttattttttaaagagggccgggctccatggctcacgcttgtaatctcaacgctttgggaggccgaggtgggaggatggcttgagtccaggagtttgaggttagagtgagttatgatcgcaccactgcacttcagcgtaggcgatagagggagaccttgtctctaaagaaaaaagttttgtgggctgctcagataccaaagaatatggttggataatctttataattctctgtagagttaatttgaggatgtagaaagcactcatcactcctagagggcattctacctttaaacaaggctggaaaaagaattgaagctctgaaatcaggtttatcccagacacagttcttttttttttttttttttttttgttgagacagagtctctccctgtcaccatggctgggtgcaatggcgtgatctcggctcactgcaacctccgcctcccgggttcaagcgattctcctgcctcagcctcctgagtagctaggattataggcatgtgccaccacgctcagataattttttgtaactttagtagagacaagatttcaccattttggccaggctgatcttgaactcctgacctcgtgatccgcccgtctcagcctcccaaagtgctgggattacaggtgtgagtcaccgcacctggcctatcccagacaattctaatcccagttttgccactgtgctggccattattttttgcctctccaggtcaattctctgtccttcctttaccctggtgtgtgtcaaggcaaggctgacctctctagactgtattatcccagctcccttgcccttctggttgggtcaggcccctgtaaagacaccttataaggttactgtaaggagatgagaggccaccaggaaagaaaggtcagagtatttattgctcacttcaccctccatggtcatatccactgccagtgtggccagcttggcccagcttgcccaggactttcctagttttagcactaaaagtcctgcatcctgagaacctcctcagtcacaggtataccaaatggttggttcttcacccaatccactggcctcctcttccaagtttccacctttagctgggttcagaaaaaagctccc

SEQ ID NO: 444 - DNA, 4001 bp, Homo sapiens
caaaatttcttttgattaaaaaaaaatcagaacaacagatttaagcctacagtagattctacagactacacctagattactctgctctaaggccaaggaaaatgtttacgatttcaagatccactcagaagcaaatactgtatctgcaatgcgtaagcttttcgttggcaagaccagtcaatagcagaggcatgcaaggtttaaaaggttaagtggatgaaggttaaaagctaataataaattagccaagaaatactacttcccaccgagccataaaataatttcggtcctacaatcctaaaaaaccagagaggtttctcgtttttgtagagaacatctaaccctccacggtctaaatgaccgtcagaaaaacagcaccaaggcaccaggggtagcagagacggagatttctaacactgggtgagcccgcggtcgcaaatctcatcgcgatttcacctttgggtgaaaaggtgggagggaagcactaagtttcagcctcggctccactggaaacagacaacgtctgaaggactctgggaggaggcggaaaggggcgaagtcgtggtgtccgcggtgcagcaacacagaatcgggatcttggaaacgggatgcggaggagtgggctcttatgtaagcacacaccaaaactgtgcgtgcaccccccgcctgatgcacatctgagcacacgtacacagagcatctcacccaggggtgcagccccagcctgcgtgcgccgctgagcagggcggactgacccttcggcccgtctgcacgttcccccaaatcagcgcagccaccaccatgggctgcagtgggggcagcccaggctcaggagccccgcccgggacggagcctggcttccccgggacgcctgcagcgcgcgcccacagtctcctgcgccctggccccggctccgcgagcccgacccccaacccgaaccccacgccctgacccggctccctgcgctcggacccgactccccgcatcccggctcgaatcccggcatccggccctactcccgcacccggacccgaatccccgcaccgggacccgaatcctgcacccggacccgaatcccgcaccgacccagcggcccggcccagccccggggcttacctcgcgcggcccagaccccgccgccgcacagcagcccggccagcagcagccgggcggccggggccagcgcgggagcggggcggcgcagcatcgccagcccggggcgggagcggcagggaggcgcgcgggacgccgagcggagctctcggagctctcggggctctaggggcctggggctagctgctccgcggcgcggggagctccgggggtccaaggaggagccgccgccgccgccgccgtgacgctgggccgcgcgctcaggacgcggcgccctccccgcctcagagcagcgtcttgctgaaggcagcggcagcaactaagatggcggcggcgctctctctcgggtccggcgagggtacccggccgggggcggggtggcggcgggaggggcggggatggggagcgacgcgaggcgcgcgcgcggcggaccctgggagcgcgcgggcccgggaggggcgggggagaggagcggagggagcgcgcgcggcggacccggcagcgggcgcgcgcctccgagcccgtcggccccgcctggagcgcgcgcccgcggggacgcgcctggggtgggttccgagcggccgggaggggcccgggggactgtatccctttccctggccgcagatggagagcctcaactccgcgtccctacgcgcgctcccgggctcctaaggccgggtgagcggtacccggggacccgctcctccttctccaccccgaggactcatccttcccacccgctccgccgaggagcgcagaccccggcggagcagtgcggcccaggacccttgtcacttcgggcaggtcgcgtcgccccccagaacctcggggtcctcgtctccccagtagaggtgttgagaggggtcacgaaagggggtccaggagacgaggtcagcgaaacgcgcctggtaaacagttaagggccgcgcagcactacccacaccggctcccgccccgggacctgcccccggggagtctgtcctgaattcactgaaggaatctatttgtgactttcaaaaggcggctggtgtgcgcgctctttctcagtgacatggtgcgatgctggttcttagaaatgcggaggtccgaatggatagagaggacagagaagccctccccctctaccgtggatccctacagggatcttggggtcctcccaatttcccagcgtccagcggccccctcctcctcgcctctggacccctggcacccccccgcagtggaggaaaggcctggaacagccgtggatgggcgtgtgtgcaggcactgtaccctatgagacactactggctccattttgcagataaggaaactaagtcagaaaggtgaaatgacttcccccgttgggacaactattgtaaaaagaatcagccctcaaggacaggatgttcgcattagggggacaccaacagcaaaaagtggaaccctaaaatgttcatttttcgagaccgctggaggagctatccatgaatgtcactgctccaggtgggggtggaggaggctggcagcactggaggctgggtggagactggtttgtggggcgcagaggacttatttaggagactagtgggcaaagagcccaaaaacgtagactgaggtcagattgggggaatggacttgatcctacagtcaacaggaagacctggaacggctgggaacagcggtgtgatgtgacctggggaaggcttcaaaagcaatctggaatccaactccctgagccgtgttccccgtaagcgtcctgcaccaaagcctacagattccatcttgttaatgtctctccttccttcccctgctccccctcccctgcgtggaggaagaccggactctccttggctggacccttcccaaagcacctgcctggcccgggcaggctccaagccacacccaccactccttccagccaaggctttgagtcatcctctcccctggtgacgggtgttgccattgcttctgcccctcctggagttataaactcagtgagtgcctccctgctgccacctcgtcaggtccagacatctctgctgggcttcccatcctccacccagctgacctcagggcatgctgtctgccactgtctcttcttattcattcccctcccagggccaacatcacacttcctcctccacccatacccaagcctcaggtccttacaaggagcttctgggctgtctccttcaggaagtcctcctgccagccctccctctccagccccgagctgctctaaccaaacagttcagctttataatctgctgcctgtgctgtcgactgactaatccatcagtgtccttttctcctccccactgtattctagtgggaaggacccagatggtctagtcagacgggactggacttcagtgctggcctctgcaaatgcaaacgaccttggccaggttatggaactttcagaatctcctcacctgcgaaatggaacaatatgtacttcttagagttgtgagaattaaatgaaatgatgccacatagatctagaaataccaggctttatgtggcaaataaatgaaagtgccacatagagcctggtgtttctagatacatgagtttctttttcccttcaagaagaaggcttctgtgcttctagtataccagcgatcagagtaggtactcaataaatagtgatgaactcaatgaattgctgagttaggttttattattatggagctcacatctcagagggtgaaaaaagatgtaccctgtagatttccagggaccttcgagatttgcaaaacataaaatcggaaaggtataatctcagaactatgttttcagtccatagactgatgatgccaaaaggggaaatttaatgtgttcagttctattaaaaacacaaacaaaagctcttcagtgtctggaatcctgatccctttatcttc

SEQ ID NO: 445 - DNA, 4001 bp, Homo sapiens
gtgagactgtcacaaaaacaaaaacaaaaacaaaaaaacaacaaaagaaagagaaccaacaaaaaaaaatttttttaagaggatgtaaatgttatgtatttttttagttggactagttccactttgacacctaaaatgattttttttttttttttttttttgagacggagtttcactctttcgcccaggctagtgtgcagtggcgcgatatgggctcaccgcaacctccgccttccggtttcaagcgattctcctgcctcagccttcggagtagctgggattacaggcgcccgccaccacgccaggctaatttttgtatttttagtaaagacaacgtttcgccatgttagccaggctggtctcgaactcctgacctcgtgatccgccagcctcggcctcccaaagtgctgggattacaggagtgagccacagcgcctggcaaaatgatcaatatttataaatacatctgtccaacacataatgacttgttgaactcatctaactttctctggatgctatttagggaataaaatacaggacaggagttgattgttatgaacatataaggagagaagcaaaagccccatgctaatattggccatatcctagaagaggaggaaattataagttctaggtcaaaaaaacttttgttggttacagggtttcagagtgatttcactagaggccaccaatggtcgcctcttctgtttctagatatcctgttttccttctttcccaagcattccccagattgtccatgaagcctttttttcccacagtgtcaatgcagctaaccaaccatacatctagctcaaaaattgttaaaagaattgaactggtaacctgtctcaaagcaaaagaaaaaaaagtaacagcattttacatttgggaggtgttttatatcctgagaaaatctgggttcagagactctttttactgtattacaagggctaactgaggctgggagacaggaagtgaccgagggccgagcgtgagttggcagcagggccaaaggttgaagcttgatctcagaacagcactcccggctttccccatccccgacccgggccgagcctcagggctggctccgccctaaagcttgcggggacggggctcgagagtgccagcggcagcccacagcacgcctaaaataacaccccgccccacgggcctcctttctagagtaaagacacgttcggtgacagtgcggagtttagggaaccagagggaaggcgcggagaagaaaaataggtctctccttcagacaactgtgggcgcacacggcctctaacccaaatccgcgctcctgctgccttcacctgccacacgatcagcgacacgctaacctctgcgcgctgggggacccccaaaggttggcctccgggatccctctcccagcccactctagagacgaatctggtccccaaaatgtaagaaaagaaggggcgcaggaacaaagcgacctcaagcggtggcccccaaggcgggcgggcgcggactacaagtcccggcacgccgcgcgccggcggccctcggccactgccacgcgggcggcgcggtggccgccgggactcgtagtctgcggctcggcgactccgcggggcgcggactaggggcggcgggacaggccggcccgcatcccgtcaagccccaaggagcccgcctgctgcccgggcctcacctcgacgatgcgggcgcactgggtccccttgccggcgccggggccgccgaggacgaacacgaccagcggcttcatgagacgtggagagcagaggagaatcggccggcgggtctgcagcaggaagctaaggcccaggacgtggagcagcccgctgcggcagcggctcagcatacaccgcgcctcggccggacgctgagggagctgacagcggccggcgcggcgcggggcggggcggggaggcggcgggagaaaggggcgggctgagccggcgcccgccgcggccccgccgccgtggctgcccgggcgtccgcggccctgtcggaaggggaggagcttcgcacggcggcggcgtctcggcgacactcgtgcggtccgcgccagctttcctccaacccttgggtggttattagtgctttctgactgcagatattttatcctgcgccctcaagtgtctggtgctgagctggaggctgggacgtgatccgcgggagagcaaaacctattgtctctgctcgcaatgagtttccattccagccagtgaggtatggggaggtagccagtgtgaatgagtaaacaccagtacatacaaaaggcagtacgattttgaagaaataacaagtaggacataagatggccagggtcgccagagaaggcttcagaagaggtgacattcaagccaagacaaaaggatagaaaagagcgaaaccaggcaaacaccaggatagagtgtcccacagagaaaagcatgtgcaaaaaatctaagttggtttggcatgttaaagcaattgaaggaaggcctggctgggcgcggtggctcacgcctgtaatcccagcattttgggaggctgaggcaggaggatggcttgagcccaggagttcgagaccagcctggacaacatgacgagaccccgtctcgaccaaaaatttaaaagccgggcaccgtgacccgtgcctgtgatcccagctactgggatgttcacttgagcctaggagccgtaatagcaccactgcactcctgcctaggtgacaatgagactgcttcaaaaaaaaaaaaggaaaaaaggccagtgacagtgagaccagggctgagtcaaatgaggggagaatggaaggtgaaaagttgagaaagtgaggtcggtggcagatcaggacttttgattatggaaaggaatttgggctgtattctaacagcaatggaagccctttaactccgttcgcctgcccccttcattagggaagaatcttaagggagaagaaaaggagacgttcaagaactgagccttggtgcatacaggcctttaaaaggccttctggccaacgttaagagctcatttgatatttgaggtaacggattcaaaataattgaagatgtttggccattcaggcacaggcagagaaggcagcttgttgcatttactgagggttgggattttgcctggcaagtacaacagagagagggggccaagtgatgagagtgtttggaagagaatgttcatgatgctgtgtgtagaatcaaaaccatacaggaaagcaaataatggcacatgaagcctggtagtggaggggttggagggtggtggggaaagggaccaatgtcttagagcattggcccaagaaagattgcagtggggtatatgagcaagtgctctggcagtatggatgctgctggtctgagtgggatatttggaattgaaatgtcccagcttctgagtttctgatgatgccaaggtccagggtgagaccatgggaatggaagactgaggcagaatgcatgtcctgtttttagaactaagagtccagggtgttagatttgtcgtacaggtacaagttcaagtcagatagtgctggagtgaacaaagactatgggaaaggaactaagctgtttagggcagagtgaccaggacgttagtaaacgaaagcaaacaggagaggaagatagtggtatagccctctgtctgaccacccccattctcctttttcttttggtggtcctttcttagctcactcagcattttctggctcttccccatctctactctctctccttgctttctttttgttgttgttgtttttacttattcccatccttcctacccttcttttcccatttataagtccctcccttctccctgtctcttttcctgtccttctcctcacctacttgcctttgtttgcccttcttttccattctccctttaatttctacctctttcctctccacaacttctaccttttccttcccaccatagaaaggagaatgggatattttttattatcacagctggaaaaaaatttttttgggggggatagagtctcactc

SEQ ID NO: 446 - DNA, 4001 bp, Homo sapiens
gaaaacaagggcatctcacccaccctgcaattttctccacgtcttcattttgggtcatccccactgtatgagagtctgtgatgctcaccagaaccatgcctccaagaattcgtctcagggtccttctctgtcacctagacgctgggcagggcaaggctgttaaaggtgggaaattatgcactggggtgctccttctaaacatttggccttggccattcttcccaccagccctctgagggtgaggatagggggcttaaacaacctcagagaaggaagccttgagagttgcatgcactcgctaaatgttgcacagtctttgagaggaccggcgtacgcactcctgcgcgctctctcagtacttctcttcccctattcagaagcttgcgctcctctattcccacccacacctaaagaactgggatccacggctgccctccacctggcgtagccccgggaagggtgacaggaagcttgtgtgggctggggacgctgggggcctagcggaggttcgccacctgcagggggtcttcaggagtcggacttcagacgccaagagggcagatggaggacaccgtcgtcgctctccacggtctctcttcgtgactttcctccatggccttaatgatgcctgcccttcccagtctccctcgcctccttgctcttctccttctcgcctttcccccaccgccttccacttcgacccccatcgcctggtctccttcctctccgtgggctcggcttctccctacctcttacaaggcgctcccgtcgtgtttccactttgtctccaattatatctaaatgcaacccaccacagatgctgacattttaaatgtttagttattatagctacttgactaattgccgggaccgacggcggcgcttctccttcgcctcccgccggcaggagaggacggggcgggagaggaaggggttagttgtggttgtagccgccactccccggcgcccgggacccgggacgcccagtcgggccctgcagagggtgtcctacctgggcaccagcggcccctcgcctccagccagggcaccgaaggcgcgcccggcgggatgcagcgaactgcctcctgccccgggacagtggagcggcagaaggtccaaccttccggttcgcccacgcccgcaaggtggaaaaagtggggtgaaatcggggaaatttagcgaaattggggcgaaagaagagagaccaaagcgtgttactcacgtgccagatggcgaagaagatgagcgcagcgcacagcaccagagacagcatgtagcagaacgcagcgaaagtgaaggccatggccggcggaccccaatcccaccacacacgccaagaagcccctaggagcccgatgcctccctagaggaccgcactccctccaaggagccgcgtctgcacgctcctctccaggctagtgcccaggagggcgcacagctagcgaagcgactcgagggtcagcgaataagcgctggattcccgcaggctccggcgaccccagacccggccctccggcgaagacaggaaaacgtgtgtcgagagtcgctggagggaaccgtccgcaaatcgaagaagaaaccaaatcagcagcgaacacctgcaaattagtgccaagctgtgagcccctcgagaccaacacgacaagcgatgcgacgactccacggaggaccgagggaggaggtcccattcgccccaggaagagctctctgcttttctccactaaaccgctgaggagagacgagcgctccgctccggaccctcccgcgccaccggggcgcaaacggatagtgtccagcgaggtgcccgagcggcctccgagctcctcccaaatcccagagccgggcagcgctctttcccgagagaaggagtctttaggtagccgggaggaggtaggtcccgttggtcctgcgccccagacgcggcttccagcgcagccgtgcgctccgaggcgcgcccgtccccaaccgtgactccggccagccggcctccgcaacccaagtgtcccggaaaccgggggtcggaccggggcgagcactggctccacccaacgggccaactccagcccgggtggctgcagcagtgggtttcaggccaaacgctgtagctcgctccacctgctgctgccgctgccgccgccgccgccgccgcctttgccactgcgagaactgtagcggtgcgacccgggattccctcctctcggcgccccaccctcgactcctgttccgctgagcgcgccctccccggcgggcggagactgcagcgccgggggctgaggaaaggtgggtggcgaagcgccgccgggcgcttggtggccgctgccgccgccactgcagctgtgcacgcccgcctctcggaggaaacttgaagccagcagtacaagcagggctggaggccgagcggaggtggggcgggaccggttggagcagggactctttaaacacgtgcgtctggaggaggtgggaagctgcggaagggtatggtgtgtgcctcgcgcctaaacgccgcagccgcccctcccggttcttgcagtttcgcctatcggagtgggaagtgtggggacttggggcgttgcctagtgttggttggggatacagtgcaagccttggatcccaaagctgcttggatggattttaccaaactgtagcatactcagtgcttagggctgcgtttactgctctgctcccagaccctgcaaaattctccattaacgtccttccgttgcatcctctaccctccccagccatccgaccttgggactagggaaacgtggacttggtgggctattctgcgctgaagaggcagcaacgagggctcggtggtattggtgttggtcctagtggaattgtcaagaggatgcttttgaaggtagaccgttttctagctgcaagttacctaacctctttaatccttagtttccttatcagaaaaacataaataagagtagagtcaagccatttcaaaggattaaaagggaacataagtaaaaaacctagcacttggtatacgttcaataagtggtagggattattaattgcaccctttcccccagtggcccagcatcttggaagttcaccatgcttgctttgcaagagattcctgacgctgcagtgaaagaggtccagtcattccagagagaacttcagtttcagacaagtcatcaaatccagaaagcaaggaaaaataccctgaaagacgactggcaaatctcggtgaaagagtagacgcacttcatggattggagtgaatcttagagcacctggtaccttgcacagggtgggaactagataaataactattgcttgattctgactctggtgtgctagttttcctgttcacagatgtgattccaatgccttgagagctggaagggatgaattccagcaagatagagatacagctttctagtgacagaactggaatcctgtctgcggactcctaatcctgggctctttctactatgccccaacattcctgcagctatttggccacatcttttacttatttatttatttatttatttatttatttatttatttatttgacggagtctcactttgtcgccaggctggagtgcagtggcgtgatctctgcaacctccacctccctggttcaagcgattctcctgccttagcctcccgagtagctgggactacaggcacgcaccaccacgcccagctaatctttgtatttttagtaaagacggggtttcaccatgttggccaagatggtctcgatctcttgacctcgtgatctacccacctcggcctcccaaagtgctgggattacaggcgtgagccaccgctccaggcccttcaatttattttattttatttttttgaagacagtcttgctgtgttgcccaggctggagtgcagtggtgctatcatagctcactgtagcctcaaactccttgctaggactacaggcatgcaccaccacacccagataatttttgttttgttttgtttgcagacataggtctcaatatatggccaggctg

SEQ ID NO: 447 - DNA, 4001 bp, Homo sapiens
taccatttctctaaatgcataaattggtgtaaaccagggctatttaaaattatcaagcctggttttccaaactgcaaaaagaaaaaacccagctacatttctgagcataagctctagttcaggggtgtccaatcttttggcttccctgggccacactggaagaagaattgccttgggccacacataaaatacactaatactaatgatagctgatgaacttaaaaaaaaatcaccaaaaaagaatcataatgttttaagaaagtttacaaatttgtgttgggccacattcaaagctgtcctggaccacatgcagcccgtgggccgtgggttggacaagcttgctctagttccttatatcacaagaggggcatagaggtcatcaaaacttaggcaagtgatgctgccctttcaatcagctccccaaacctactaaaactcagaaatcttgtcgttagatatcatcaaagtaaaaactgctgctcaattggggagggtggggacacgaaggcagagcaatatttactgaacattagctatggggcaggcactgtgctagggtgctcagcaccattctcattgtgcatatctaggaaataaacatttcctattttaaagatcagaaaactgaggcttagggaaataatgtgcaagcaaagagctagctgaccaggaaatctgattccaaattttgtccctttccactacaacaggatgccagtccacaatgaaaaatgaagctgcactgaacatatactctgtacgactatcctaaagcccgcatgctctagcaaacaaatggtttaatccgatcagaaacaggtacatgtgatttccaagaaaggaagctgaaatgcggagttcctcatacgttttttcttatatttaattacttaaacctggatggtgcaatacaacattgggcaacaactaagcctagatgctttgtcaagagatgggaagagttgtagccgacatggctactgcagtgctaaattcaaccaccatttattgctctggaaaacagtttgaatactgcaacttaagttttaacatggatcgatagaaaaatttaaaagctgagaaacgattgggaactacagcagatgtagttattgaatttacagatctgcaaccaccggggacaaccaaaataatcactttgtagacagttgttaaaacaactcctttccaacactcactacaaaacggcacagtgaaggaagcaacttcgctcctttggcgaatgagtcaactcctggatgtgaaaggtccctgcaagtactaacacccgccagaacaaaggggcgggtgccgggggtgttgcgtggggaacaggaggaggcaaatggcccgcacttatcccggcacccgactgtcgcaagcgaccgcccttgggacccccaatatccgacgaagagcacggcgcagggcctctcccagaaaaacagcgacgcttctctcccgagggcggccgtggctcaggcagggctggtccgggcgccgcggggacgagcggagagcaggcgggcaggccgagacggggcgcgcccggagaggcccactcggacccgagtgaggggcggccggcaacccaggcagggcaagtgcgtgcagggcagcagggcccgtcgggtagggcagccagcctctcctacccgctccggggcccgcgccaccgccccggccaggccagctcccagggagcccacgcccgccgccgggcgcctccctagtcccacacacctgcccgggtgcccaactggcccaccctcagccgtgtcccccggcaaggcgttcgcctgcctcaggcaaggatacgaagtagaccgagaggaagatgagcgcgcaacaatcgaggagagagaagacgaacaccaccgcctccatcctcctcctccgtcgccgccgctccttccgtcaaacccgctcggatgccccgacccacccctgataggcccttgccggggctggctgaggcgtgtggtcctcgaatcctggtgtggcatgccgggagttgtagtccatattttaaaaaactctacggccctaattctgacgcatgctgggaattgtagttcattagtacaagtccatatcaaagaggtgggcagggcctctttcataaatccgattatttccagaaatggaattaatcaacaagtatttactcaacgcttttcttttaaagagctggggtcttgctctgtcgtccaggctggagtgcagtggcgtgatagagctcactatgacctcgaattcctgggctcaagcaatccttccacctcagcctcccgacatgcccagctaattttattttattatttctcattttattttattttttgagacagggtctcactctgtcgcccaggctggagtgcagtggcatggtcacagctcactgcagcctctacctcctggcctcaggtgatcctcccacctccgcctcctgagtacctgggattacaggaatgtaccaccacgcctggctaattttttgtatttttaatagagatggggtttttgccatgttgcccaggctggtctcgaattcctcggctcaagcgatctgcctgcctcagtctcccacagtgctggaattacaggcctgagccactgcaccagtctctactgaacgcttttaatccggatatccagtaggatgtatttcccatgtgtgaaattttctttagagttggctctagaaccattgcattccctgacttaggatttgtaaggggttttcatctcaaagcacaaatctaacttaatgctcctggcttgacttttgcgatttgcccttcccttcctgatttcaatttctccagagatttcacagtcctttgtttatcctctcctacagcaatgtttctctcctctctagattttaagatctttaagaagtgaatacgatgtcttactcatccattcattcatttaacaaatacagttgtatttgcaggggctactttccaagacccccaagtggatgcctgacacgatggatagtaccaaaccttatgtgtactatgttttttcctatatatacatacctatgataaagcttaatttatagatcaggcacagtaggagattaacaagtaataataagatagaacaattatactgtaataaaagttatgtaaatgtggtctttctgtctcaaaatatcttattgtactgacccttctttttgagatgatgtatgatgataaaatgcctatgtgataagatgaagagacagatgcagcctctccagtgatttttatatttttcagtccaaatctattcttacattcatgtaactatccattacttgcagtaagtggcttggtatcactcgttttagggaatccctcactgaagtctttgtataggctcaatactttctggctcaacacgttgccatcaattggcacatgttttctgttcatgtcttccacccacaaatgtaatgcctcttccatcttttttgtggttgttgttttagtttttctgagatgaagttcactctgtcacccaggctggagtgcagtggcgccatttcagctctctgcaacctccacctcccaagttcaagcgattctcctgcctcagcctccggagtagctgagattacaggtgcatgccaccacacccagataattttttgtatttttagtagagttggggtttcgccatgttggccaggctggtctcaaactcctggcctcaagtgatccacctaccttgacctcccaaagtgctgggattacaggcatgagccactgtgctgtgccgccttttccatcttaactaagcacttatcaggcactgtggccataacttttgtagtctgagttgcaacagcaaaactagcacaaattcctttttcctttttcagaaattcacagataaaagactggttcttaccatagatcttagcagtctcatagggtttttttttctttccttaagtcaagaactttgaccatttcacttaaagggagcacttcatggct

SEQ ID NO: 448 - DNA, 4001 bp, Homo sapiens
aaactcaacatttcagatgcacagagctaattccttgcagctcctggaacacccttttacctcagcgtccttgcaagtgctattcctcctgctggcgttgctcttctatctccttcacttcctttttcatctaacttcctccaggaagccttccataacttcccaggctgagtgggatggagggctctcctcttgttcccactgcccctgagcctccacaaacccctgcacttgaccatcggtctttcccattttatcacaggctcttcaaagatcaggccttagataaccatttgtctctaacccccggcctgtgcctggacaaggtaggcactgaaaaataagaaaagtgtctattgagggcttactatgtgctatgcaaatctataagagctttacacatattaacacatttgattctcactgcatttctaggaggtaaagactatcattatcctgcttacagatgggaaaactgacacagaggttaagtagcttgctcactcttcgaaggaattcttccccttctaagccaggctccttcactgggggaggtgtgtgtgtgtgttccctgtgtcacattgagagcactggactgggagttcatgaacctatcactccctggctatgggcccctgagccacctccttcctgcacggtgactgtattgggctggtgccctcccaatagacccaggcattgagctacaaatgaactatgtcatgattgtctcactttgtcgacttcataaggtcagagttgcctttcccatttgatggacagaaaaactaagacctatggtcacagagctggcaagcggtgggggtgggcctggaatccagcctgggagtctgaacccagccctgaattcctgcccttacccgggctggtcctcctgagcctgtctctagtgcgctccagctccccactctgggaggggtgtcctgactgcctgctcctggtcgcactgtgtgtcaggaggcccttccttctctgagtctgcctgtggggtgtgttgcttcccatctgtgtgggctcgctgagcctggacagcaccttgccccttggataggagccccagggtggggctgtgtcaacctcttcagtctggcctagggcttctgcttctgtcactaggagctcagggtgtggagcggggaaaatgacaccagagactgagcaaatcatttcctggctctgtgtgtcagtttctgactctaagaaacggatttaacaacagcccactggccctggggccagggaagatgaaggagatacagtgggtgtgggcctgtcaggcctccctcctgttttcatgacaccgcctccccattatcaccctagaggcctcttgggctactgccatgatgaggggcccccttctgggtccttgggccccccagggtcatctcatctgtctctctgcccagcacggttcctggaacatgttaggtgctctgtaaatatttgttgactgactgaccgactgatagagcccgcagtttattatttttttttttcttttgagctgaatctcgctctgtcgtccagactggagtgcagcggtgcaatctcggctcactgtaacctctgcctcctgggttcaagcgattctcctgcctcagcctcccaagtagctgggattacaggcacctgccaccacccccagataatttttgtatttttagtagagacggggtttcaccatgctggtcttgaactcccgacctcaggtgacccacccaccttggcttcccaaagtgctgggattacaggtgtgaaccagcgcacccagtccgcagattttttttccttttcctctcctcccgcttcccggtgggacaccacacctagtccccttcaagcccaactctaccccagccccacccacctctcagccaagttgccacctttccgggggtccaggtctctaccggttccatggcccagctctgccagctcgaatcagctcctgttttgccctgctgtcgccggaatttccgctcccagagcccaggcctaaggaggggccgggctgggtcctgggcggagcctactgcatacctgggctcacacagacggcaagatgaggcactgcgacagccattggcccacgcccgtccgcctcctgcccggcccttcagacatcctagggctctggcatctcgcgcctgctagggggcagtgccactggcctcatatcgcggggtgggaccctgacccttgggctcctcaagaaaaagccacaagaggagcgctgaaatcagtagcaaagcacagaggctagggggccaggtccctgggtgcctaggccagctcttgttagctgtgtgacctggggctgaccctaacttctgcgcctcagtttctgggtctgtaaaagagatataatagaccgtacttcaaagggcagctgtgcacagtatctgaatggcttgaaaacatttagaactggggtgtttagcctcccttggattttgcagtatggactctggcatctggtgaggcctgtgaatgctttctcagaatagctgcttataaaggcataaaacaggccgggcgcggtggctcacgcctgtaatcccagcactttgggaggccgaggtgggcggatcacttgagatcaggagttcaagaccagcctggccaatatggtgaaacaccatctctactaaaaatacaaaaaattagctgggcgtagtgggtgcttgtaatcccagctactcaggaggctgaggcaggagaatcccttgaacccaggagggggaggttccagtgagccaagatcgtgccactgcactccagcctgggcaacagagcaaaactctgtattataaataaataaataaatgcacaaaacaaaatgcttaggattacaatgagaacaattatcaaaactatatttaaaaacaaatttggccgggcatggtggttcacgcctgtaattccagcactttggaaggccaaggcgggtggatcatgaggttaagagatggaaaccagcctgcccaacatggtgaaaccccgtctctactaaaaatacaaaaattagctgggtgtggtggtgcacgcctgtagtcacagctactcaggaggctgaggcaggagaatcgcttgaacctgggaggcggaggttgcagtgagctgagatcacgcctctgcactccagcctggcaacaaagcaagactccgtctcaaaaaaaaaacccacaaaaaacaaaaaaaaaatttggagctggggagtgctggcacacgactgtagtcccagctactcgagaggttgagaggttgagcgggggagtatcactcaagcccaggagtcaaagccaccctgggcaacatagcaggagcccatctcaaaaaaataaaaccagaaatttatattatgtgtttactaacattaataagactggccgaaagttaaatttttcttttttaatgacctcagtgtgttgtcgaccagcttgaataaggacattaaactgtggggtggtctttgacgcccctcctcttacatattgatcagcaaacaactaaaaacagggaatgctgggccgggcatggtggctcacgcctataatcgagacgggcggattatgaggtcaggagatcgagaccatcctggctaacatggtgaaaccccgtctctactaaaaatacaaaaaattagccaggcatggtggcgggcgcctgtagtcccagctactcaggaggctgaggcaggagaatggcgtgaacccaggaggcagagcttgcagtgagccgagttcgcgccactgcactctagcctgggcgacagagcaagacttcgtctcaaaaaaaaaaaaaaaaagacagggaatgcagaagagtggagaagccctactcagaacaggcagattcgccctttggtcactgaaccactgctaagcctggaggtaaccaattaatggcggctacatcacaggagcatctgaaacagaagttgctcacgaacaatttagtggtggtttaacaaccac

SEQ ID NO: 449 - DNA, 4001 bp, Homo sapiens
ccagccaagaatcactggggggaattacaatgaatgtgcacaaccaggccaaagtatcacatcacatccaacattttggacatgcccattcctctgaagtttcctaaagttcggtttgtaaatcctggaaggaaggaaacagtaacttgttacaaacttttcagttggtgaggtttgcactcaatcatacacaaaccattcacctttctgctctctaaaaaaattgttagcaaactgttgtctaatacgggcaacacgtttgaaaaggtaaaggacctaaacatttcaactttagatacatagactaaaatcaactccttgcttcaaagacagtatgatgtgcagactaacagcgggagacaagagccacaactctcccttggggtttgacaacggtgcgcttcattacctctttacataattcgcttcacaccgcctacccccgcagccccgggatgttccagctctgacaatgccagtgccttccaccagcggtcggacggtgcggtggcaatcctgacatgcttgggctcccgggaggttaatgggaattaaaccacaggcagccctcctttgtggcgctttggccagaacagcagaaaggagacaatgagcgttctgtgcacagttccgcgccgattggctggtctctccccccagaaacccctgatgtcatgggcttggaatgcagggagggaggaaggaaggagaggatttggggagggggacgcctctcatctctttcccaggccaaaagtcctaaagataaacctaacgcattcttgggctcagtggcaaagctgagcgtcaccaaatcccaatcgctccaaactataagccgcctcagcaaacaagccccaaacaaaagcaacccacaaaaataatcctttatgtcgtgaaagtctaatgtacttcaaacttctcagtgtttcataaaaagtctcaagcctaagcagatatcactcgcacagtggcgcgctcaggctttgtctccatttcccgcaaaagcaacagcagaagcagcagcagcaatctgcctccaaatgcctcccaggcaccgagatcggagactgtgatgggtcccggaccggcttccgttcctcggggcccctggggtcggcgggacattaggcggtctctctccccgtggggaggcgcggagtccgccagcacccggggcccgggcagatggcgggggctgcggcagcggctcgccgggtccctggccgcgcagacgggctccgcctaagggcgagtggccacgcaggagcgcccccttcccggagggcgcgttctgcagtcaccaaacggcccccgagacccccgcagccggaaaggctggcgccgcgggactccaggcgcccgggaacccaccgccagccactagtcctgtcccacggcgcgggaacaaagccaggcgggtgcccgggagccggccccgcaagcccggggactggacgcgaccgggacaggcagagacgctcgcgccgcctcgacggcccctctccaggaaaacggtgagccacagcgcgaagagcaaacgaagcacggcccagcgccaggccagcccaagggtgccccgggggcccccgcgcccgcccgagccaggcgtaccttgttcttgacttcggccgagagcccataggaagggcccttgttgaagtgggtcatggtggttcgggcggcgggaagagacagcgctggggtccggggtctctcgcacttcgcttccccgctcctggccccgaggagtggccgccgcgggggatgctcgaactccctcctctgggaggcgcaggagacggccgcggggcgcgggcggtgcctgggcgactgggtccaactgggtgctacagagcctcgagctccgctgcgaagcacccggctgcctcgctcgccgcccgcacctcggttccccacaggccgcccccgcctccgcctgggccttcgaggattggccgccgggcccgaccaatggagggccgcctcctcccgcctctgcgccgaggggcggtgcggccaattgaagggccgcgggggccgctttccctcccgctccctccccgcgaggtccccggcccccgccccagccctcacgccaccggggccggcggctaggcggccccgcccccgggctaggcagggcgcctgggggcttcccagccacaggccattcacgtcaacctccaggcatcctccgcggcgggccggaccgggccggcggaggggagcggaagcccaccggggctggcccgccgctgacccgccgcctccgtctgcctcctcccgggctctgggcccagcgcgcccagatgccgggcaggacccctccgcccgctgctggaacaccaatagcagcgttggagcctctgggccggaggaactggggcctccaccgacacctgcttcttccctcacctcgcagccttccacacctgttgatctgacctctgccccgctgccgcccaggagtaacctaaggcttttggcctgattcgagctcactccgtctaaacctctaaatgcggtgcgaaaaaatcctggggaatgtgccatgcaaagcctgggcatttcaagtgcttttctggattcgcatcaactcctctttacaggcatctttatccggaattcagctcgtcccaaaccccacgtggtgtagctctgcttgtgtttttgaatcccggggcctctttgaatcagaagccctttgtatagagataagtatcctttaggccagaatcagcctccatttttttcgcagtcccatttcctacccgtaatactttcttctgattttaaagccatttgatagagaagggacagggaacagaaccttcgccccccgcctgagcagctggtagactagatatcttccaaacattatctcatttacttccctggagttacaaataggtagatttcatgtccgttgaggggtgagaaagctgaaactttgagacttaagaatcctggccgaggtcagcctcctccgaagcttcatctcttgccaccactttctggtgcacacctaggacagatttcaatccctgagatcccaggatgaaacctatgtttgccaaataccagctactgtgccagaagagatcatggaaccaggtgtggaaagctgcttgagaagaggagccaaaacatcatagttgaaccgtcctggaatagaagtgagtaaggtgaaccaggtgtggtggctcatgcctgtaatcctagcactttgggagaccgaggtgggaggattgcttgaggcctggagttcaggaacatcctgggcaacatagcaagatcctgtctctacaaaaaatccaaagtttttttaaattaaaaaaaaaaagtgagtaaggcagcttgaaccggaaatgcacaaaactgctatccagtttgcaaggcttttcccaatgactttgagggatggaacctgaaggaagcgggaggaggcaaatagggaggaaagtgaaatgatttataaatgacttgctaattttgtccaaagggagtaatgataattagggcattcttcccacacgaagatgacacaattgacccaatatcattgaggctaacagtttgggctgtttttccagtagtatgacagtgacggtgtgtcaaccgcaggacctcacccacatttctttgggacctaggagtgtgggaaatagcagccagatttgaggtacaaatcatggtgtccagcctgcaaagcctttttgcagcaatctaagcctgactgctcctgttgtatgctcaaagtcattttaatctactttagcttattgtaaaatgttcaagaattgtattttgtcttgaaaaccatgaattttattgtttagggggagttattttttaaggagtgcaggatttcagttttggatgatgaaaaagttttgaagatgggtagtgacagtggtcacacaacattgtaaatgtacttaatgccattgtacacttacgtgactttaaagtaaacatgaaattttctacatttgttt

SEQ ID NO: 450 - DNA, 4001 bp, Homo sapiens
tacaatacagtcactgagttgagtataagccagacacatctccacaacatggtgtctgggggtggcaactattgttttcccccattctacagaacagaagctaggagagagatgtcaagtagctagcccagcatcacagaaggcaggaagtggcagaacggggactagaactcacatatgctagactcccaggtccactccacactgtctccccaggatgtttctatacttctttgttaaatgagatgtgggggtagatggggggaatctagcattcaagcaatgtatcaattatgcaataaagaaaaagcaggaaggaatcaaaaggtgtcaaaccacgcaatgtcacttttgtatatacccacctttcacccgggagtcctgaggcctcagtcaaaatgcagcatctcatacaaaggcctagcaaacatggctatttgattcccaggcccagaacagatcagaaacagtatgacataaataatcacaatgtcaagaagtgacaggtgggtagcaaaaatgggaggaagggctgggcgccatggctcacgcctgtaatcccagcattttggaaggccaaggcagggggaatcacctgaggtcaggagttggagaccagcctggccaacatggcaaaaccctgtctctactaaataatacaaacattagccgggcatggtggcaggcacctgtaatcccagctactcggggcgctgaggcaggagaatcacttgaacctgggaggcgaaggttgcagtgagctgagatcgcgccactgcactccagcctgggcgacagagcaagactccgtctcaaaaaagaaagaaaaaaaaatggggggaaggcgacagacagcagagtttgtgtagaacatccctaagtacttcactcaactaagacatcgcttttagagttaaaattcttagaatagtccaacttctgtgaccttgagcaaatctttctgagcttcagtgtactgatctgtaaatgatgttggataatcccagcaatcctcctcaccttacaggactgctctgctgttaagatcaaaagacttcctatgaaagaatactgtctgaaaggactacaaaaatgaaacgggttattaaaaaatgggtttggtgcttaaagggataaatccacagctttcataactaactttccaaaggttctaaaaactgaggttttaccgtttttaaatatttacaataattacagtgatctagcctgtgtatgcatttccttggatctgctcagtattaagcaggaaaagggcaaaagctgctacattagtcagcaaaaaagaaattagcatggatattattaacatccaagaaaagtaagtcacttgaagggctgccaacgttatcagtacctcatttacaatgcaaaaggtagtagagactcaactgctgccagccaagaatcactggggggaattacaatgaatgtgcacaaccaggccaaagtatcacatcacatccaacattttggacatgcccattcctctgaagtttcctaaagttcggtttgtaaatcctggaaggaaggaaacagtaacttgttacaaacttttcagttggtgaggtttgcactcaatcatacacaaaccattcacctttctgctctctaaaaaaattgttagcaaactgttgtctaatacgggcaacacgtttgaaaaggtaaaggacctaaacatttcaactttagatacatagactaaaatcaactccttgcttcaaagacagtatgatgtgcagactaacagcgggagacaagagccacaactctcccttggggtttgacaacggtgcgcttcattacctctttacataattcgcttcacaccgcctacccccgcagccccgggatgttccagctctgacaatgccagtgccttccaccagcggtcggacggtgcggtggcaatcctgacatgcttgggctcccgggaggttaatgggaattaaaccacaggcagccctcctttgtggcgctttggccagaacagcagaaaggagacaatgagcgttctgtgcacagttccgcgccgattggctggtctctccccccagaaacccctgatgtcatgggcttggaatgcagggagggaggaaggaaggagaggatttggggagggggacgcctctcatctctttcccaggccaaaagtcctaaagataaacctaacgcattcttgggctcagtggcaaagctgagcgtcaccaaatcccaatcgctccaaactataagccgcctcagcaaacaagccccaaacaaaagcaacccacaaaaataatcctttatgtcgtgaaagtctaatgtacttcaaacttctcagtgtttcataaaaagtctcaagcctaagcagatatcactcgcacagtggcgcgctcaggctttgtctccatttcccgcaaaagcaacagcagaagcagcagcagcaatctgcctccaaatgcctcccaggcaccgagatcggagactgtgatgggtcccggaccggcttccgttcctcggggcccctggggtcggcgggacattaggcggtctctctccccgtggggaggcgcggagtccgccagcacccggggcccgggcagatggcgggggctgcggcagcggctcgccgggtccctggccgcgcagacgggctccgcctaagggcgagtggccacgcaggagcgcccccttcccggagggcgcgttctgcagtcaccaaacggcccccgagacccccgcagccggaaaggctggcgccgcgggactccaggcgcccgggaacccaccgccagccactagtcctgtcccacggcgcgggaacaaagccaggcgggtgcccgggagccggccccgcaagcccggggactggacgcgaccgggacaggcagagacgctcgcgccgcctcgacggcccctctccaggaaaacggtgagccacagcgcgaagagcaaacgaagcacggcccagcgccaggccagcccaagggtgccccgggggcccccgcgcccgcccgagccaggcgtaccttgttcttgacttcggccgagagcccataggaagggcccttgttgaagtgggtcatggtggttcgggcggcgggaagagacagcgctggggtccggggtctctcgcacttcgcttccccgctcctggccccgaggagtggccgccgcgggggatgctcgaactccctcctctgggaggcgcaggagacggccgcggggcgcgggcggtgcctgggcgactgggtccaactgggtgctacagagcctcgagctccgctgcgaagcacccggctgcctcgctcgccgcccgcacctcggttccccacaggccgcccccgcctccgcctgggccttcgaggattggccgccgggcccgaccaatggagggccgcctcctcccgcctctgcgccgaggggcggtgcggccaattgaagggccgcgggggccgctttccctcccgctccctccccgcgaggtccccggcccccgccccagccctcacgccaccggggccggcggctaggcggccccgcccccgggctaggcagggcgcctgggggcttcccagccacaggccattcacgtcaacctccaggcatcctccgcggcgggccggaccgggccggcggaggggagcggaagcccaccggggctggcccgccgctgacccgccgcctccgtctgcctcctcccgggctctgggcccagcgcgcccagatgccgggcaggacccctccgcccgctgctggaacaccaatagcagcgttggagcctctgggccggaggaactggggcctccaccgacacctgcttcttccctcacctcgcagccttccacacctgttgatctgacctctgccccgctgccgcccaggagtaacctaaggcttttggcctgattcgagctcactccgtctaaacctctaaatgcggtgcgaaaaaatcctggggaatgtgccatgcaaagcctgggcatttcaagtgcttttct

SEQ ID NO: 451 - DNA, 4001 bp, Homo sapiens
atgagacacagtggtttcaggtcttacaaagaatctggactccaggcatgccagggaagtgggcaaggctggacttcagacaatcaagtccatttgggcaatgggcatccatcgtaggaggacccaggagcctccctcacgcttatgttctgtgtgtcctctgggtcaatgtgcatgggtggggatgggagtgagggaagctcagtgcacttggagattaaatttcctcctagcccagtaggatgaggctcagggtcctattgaatgtgacttcaactgaataaagaaaagatcaatttatgcacacccgagggtgtgcagtaagagtgactggtactgtaaaatgaggtgggaagagagggggctggcgctggagggctctgcttggctgagccaggctgccattttcccgtcttcactgccttatcctggccttagccggccaaagggtaaaggatatgcttcacctgcccagcgcaggttagggggtcactctggtaagccacaaggtggttacagagctggggccaggattattgggactccacctcctgagctctccctgaacttctccccagcctccatcctggttttcatgctgccaacgtgtctacttgccactcattccagggaaaagcagccaggcctcattttatcctcatctcagatccacagcaagagcagatggggtgaagatcaaactctccaccacagccattcccgagccctgtgctgctgcccgccctgtgcccgcatcagacagttgactcgcaacaagcctgtgagtgaccttctcaggcccatgtttctcagaagaggaagctgagcaggaaagaaatggagtgatttgcattaggccatcgagctaccagtggcagagctgggattcagacctggacgctgaccccagggcacactggaaaatactgctcttccctccgctgagtggaacttacaccaaagcagacccctggcctcctgagtccagtgtgcccctaacactaccttgtggtctccccatctataaaatgagagcgcaggactcacctggtcatctcaaaggcctctgccagcccctgtcatttcctggcccccatctactgttgcagtccacacctcgtaaggcaggatagcctggtggctgaagggtgggccgcgaagccggagtgcctaggctcaagccaatgctctcattcaatgcccgcatgatttcaggtgggtcacctagcccccacctatcaagtggacaacagtgatagctcctactgcatacggctgttgtgaggattaaataaatccaaccactaaaggctcttagggcagcgcctggcacacagtaaggccatctctgtgtgtgtgattcttgtctctgtaatgaaatgaaagccaaagtcctgattcttggtcctaggagggggatgccagccctgaactttcctgcgactggtcctccacaaccccaggtgtcctgaaatgacatctatcccctgccccagacaggcccacctggcttcttgtgtccctggagggaagggataaggtaagaatacaggttttggccaggtgcagtggctcatgcctgtaatcccagcactttgggaggccaaggtgggcagatcacctgaagtcgggagttcgagaccagcctggccaacatggtgaaaccctgtctctactaaaaatacaaaaattagccagacgcagtagtgcacacctgtaatcccaactacacgggaggctgaggcaggagaatcgcttgaacctgtgaggctgcactgagccgagattgtgccactgtactttagcctggtcaacagagcaaaactccgtctcaaaaacaaacaaacaaacaaaaaagaatacaggtgttggggaatgaggaagaagcctaaaataaacaacaaaaaaagctactcacggttgtgttgtgggtggctgggcactgggagctgccgggggctgaggagtcccagttgttttctgtcctctcccaggacctggccgtgggtgccactcagagcacctgttgagtgccaccccaagccagctttctcttgcttttgtactttctcacagatgagtgagtgtgaggaggtctggccttccgtgcctgttaccacttcccctccaggtccctggtgccacaatgctcttgcccctgcggttgagttatctcttacaacgaactctggccagggtggggcatgggcctagaccctggagtcaagggacttgggttctaatacagcctcgttaaaatgttgattcacttaacttccccaaaggcaagtttctttatctgtaaaatggggataatgcaccaacattacagtagatcacctaaaaggacatgccattccaatgcctcttcaccactaggccagagctttgaaatgcaaatgcctacaggcagattaacataatgggtgatggatcctggtgtggggcaatagggagtggtagggactgtgggtaatagggggaacacaggacccaagtggaaaagcttggctggagctgagaggtacctgaccctctctactggcccagctgagaggtatctgccccacaccccagaccctgatctgggccagtagagaggggcaggtacctcttagttccagccaagcttttctgcttgggagtataggcaaattgtcagatattccaagcatttggaagttgtgctgtatttttcaagagataccagaaatcttgacttatgtgatagcttcctgtgtgtgtgtgtgtgtgtgtgttttgttttttgtttgtttgtttttgttttgagaccaagtctcgctctattgcccaggctggagtgcaatggcgcaatctcggttcactgcaacctctgcctcctgggttcaagcaactctcctgcctcagcctcctgagtagctgggactacaggtgcacacaaccacctccagctaatttgtagttttagtagagacagggttttgccatgttgaccatgctggtcttgaactcctgacctcaagtgatccacccaccttggcctcctaaagtgctaggattacagggtgagtcaccacgcccagccacttcctgtttattttattttactttattttattttattttaattttttgaggcagggtctcgctctgttgcccaggctggagtacagcggcacgatcatagttcactgcagcctcaaattcctgggttccagtgatcctcccatctcagccttccaggtagccggcagaacaggcatgtgccaccacacctggctattttttttttttaatttttttgtatagatgggggtctcactatgttgcctagcttggttttgaactcctgggctcaagcaaatcctcccgcctcagtctccaaaagtgttgggattacaggcatgagccaccatgctcagccagttgccaattttagaatgtaaagcccaaagtcacacctttaaaaaatgctatgtgagtcaaactaaacattatcttcagtttatatttattagggagtatgtccctaatgtccagtcctgggctggatgtactcaggtatggtatctgatatagttccaagtgtcctcacacccactctcagataaaatatttaatgagacgccattatattctaaggatacagagatgattatggcaaagtttttgcccttgtaaactcatggcctatgattatctcatcagatcctctcactaactgctccccacaccccagaccctgatctgggccaatgaagaaagattttgcccctgaggtagagttgcaagattcttcaagtaaaaaatgttacaggcatgagccaccccacctggcccaatgaattatattcttgaagatgatggagagtagattttaagtgttctcaccacaaaaataagtatgtgaggtaatgcaacaatagttgagacattcaggcactaaaaattacttgttgcttatgtgcgattagaatgctcagcctagcgtggtggctcacgcctgttatcccagcact

SEQ ID NO: 452 - DNA, 4001 bp, Homo sapiens
gtaattctctttcccaaaaccaagagaaaataataacactcaaaagcaaaataaaaaatgacatcagtttttctaggactcagtaggctaactttggtccacaaacattatgaaataagacagtgcattttaaaataactgttttgtttttaaccacaatgtgtttatttttctttttctctttttctttctttctttttttttaaggagacagagtctatgttgcccagtctggcttcgaactcccggcagcaagtgatcctcccaccttggcctcccaaagtgctgggattacaggcatgaactaccatacccagccaccacagtgttttttttaaaaagtcagaaattcaacgacacatttctatgagtgaaccatgaagacataattctattttatctgatttaaaaatatttaggactccaggtcctggagggggaaaaaagtgtatttctgaatctatgaaaatgttttttaaggggagagggggaggcagctcagtaatggagagaggttcagaggatgcaaagtcacctctagaaaattgtcagtgagaaaactgtacgaaaaaagaatttaagcaaattaagaccaatgagtgagtccccacagtttgcacaacagttgatgagatattttctatgatgtcctaacaaatttataatacacaaaaggtcatatttagttgtcaattctttatccgcttgagcttcatcagatgagtataatcttcagactatttgctgggtgatacattccttaggaaccttttcctcgtgcatttaaatgccaaactcaattacactctcagtagagtaagcagaaaggattgtacgtattctaagacacggagttgattggctgccgtttcttgccttggtggtaaggataatgggtaaaagctctaagtttgatcctgaaacacggaaaacactctcaaagaaccgtgtcttctaacattgcccaataggtaaaaaaaaaaagactgccaaaatttccattacagcatcctatttttagtcttcaaaattgggtcttttaaatcgcattccacagtacgatgtgtttgactaagtttacataaggaatacagtaagcatcctaaagtcttaatctttttaagcttagaaaggaattgtaagcttttacatcttcatttttaatcttaactttaagtcttttaaacacacaaactgaaaaaattaaggaaaatattggcccagagagaggaatggaagggagacaccacgcggttcttgacaaccaaagtggtagtgatgggggggaccaggtgtgggggggaaatgaaaaccatccacgagggtggggagagcgggctgtgggccacacaacagaaaggaacggagaccgtggaagccgcaggctcctccaggagccgggtgaggaacgacttctggcgctagtcccctagggagggagaaattggcgcgacgcgcagcaataggagacccacagtagctgagaaaggagaggaaaacaggcgacctgagaggcggaggaggtaaggggaccgggctacacctcacccggagggcagaggctgcgcggctggaggaggacagcgcagggggaggagcgagaggcttccgaaaggctttccatcccggccgcgagccggcgggtcccctgcatcccgctcctcctctcctcacctgggaatcggaggcgcaaggagggctaccgctgggcgccgggtctgtttccagccccactcggcgacatggcggccgacgtgctgtcacggagcttgctcgggtctcccctggctccggtggaggagacacctctcgcctttccgccccgcctccctctgcgcacccctcgcggctggccggctggaggctggcggcccgcgaccgcggagcatagagcactggcggctagagaggaagcgcagagcgcggacaaccatagagtacgagtccggacaccagccggatggtcggtcgctctcctcaacggtccactcacaatcctcgggcggctgagccgaggcggaagcggaagtgagggagaaaagcaggaaggctccgctgttcgcatgcgcaggctctagtgtttacttccgcttgacctggcccggacgccagaaaatgttccacgtgggataccctgcgtggggttcactgtagtagctgcactaggtgattcttggagcgggcctgagagacaaggacatgtggatcccagtggtcgggcttcctcggcggctgaggctctccgccttggcgggcgctggtcgcttttgcattttagggtctgaagcggcgacgcgaaagcatttgccggcgaggaaccactgtgggctctctgactcctctccgcagctgtggcccgaaccggatttcaggaatccgccaaggaaggcgtctaaggccagcttagactttaagcgttacgtaaccgatcggagattggctgagaccctggcgcaaatctatttgggaaaaccaagtagacctccacacctactgctggagtgcaatccaggtgagtccagctgaattgcattttcttggatgttcatcatttattcaaacgtattgaccctcctcggggtgctattttagatactggggggtcttttttgttgttcttttgctttgagacggagtctcgctgtgttgccaggctggagtgcagtggggcgatctcggctccctgcaacctccgcgtaccgggttcaggcgattctcctgcctcagcctcccgagtagcaagaactacaggcgcgcgccaccacgcccagctaattttcttatttttactagagacgggatttcgccgtgttggccaggatggtctcgatctcttgacctcgtgatcctcccccctaggtctcccaaaatgctgggattagaggcgtgagccactgcgcccgtccagatacgggtctttgtttgaagctccttagttggagagattgcccactacataagcgtagagtctgtatcgttaatgacaccacaaagtatttctgtagcagcttgcactttacacaatattttgataaaacatgctcttagatcttatctccccaaaagagttgcaagcctctgccagctgaaaaaatgatgttatcttattcttccgtgcattccctatagaccatagcaggatgctaagaacacaagatttataggctttttgaatgatagttttttaaagcaccatttcatatcacagggagtcagttctgtttaggcttgacaatctctttgatggttaaagcatccgtgtagtccgtgaggaagtgataggctagaggcaatctattttgctgtgacttttttcttctaagaggtagtgaatcatggtgatgaagagtgcaagttttgacctggtgcggtggctcacgcctgtaatccagcactttcagaggccgaggcgagtggttcccttgaggtcaggagttccagaccagcctggccaacatggtgaaactccgtctctgcttaaaatacaaaaattagccgggcgtggtggcgggcgcctgtaatcccagctactcgggaggctgaggcaggagaatcgcttgaacccaagaggcagaggttgcagtgagccgagattgccccactgcactccagcctgggtgacagagtgagacttcgtctcaaaaaaaaaaaaaaaagagtgcaggttttgcagtcgctgacaatgatttcaaagccaagctgcatcacttttgacgctggagtcaaataagtatatataatctcctgtttccttatatgtaaaaaggagagtgacatctactttgcggatgctgtcagatttaaaaaccaggtaataacgtgtgaaacatctaatgaaagtttggtattgaaagagattatgtttcttgtacaaataaacttttcgttctgttaatgtgccaggtcctggaatcctgactcaggcattacttgaagctggtgccaaagtggttgcgctcgaaagtgacaaaacttttattccacatttggaggtatatttt

SEQ ID NO: 453 - DNA, 4001 bp, Homo sapiens
gagagtaagagagaaagagccgggaatgagagcagactcctggagtctgaggcactcatctgcataaggagtgtgcctctgcttccctcaccgctcatggtgtgagcacagtggtctctgcacctgtgaggcaggtggaccttgggtgactttgacatcatcaggtcaggggccctttcctgtctgtctcacctcctgcctccctcttattcgctgaggacttccacgggagattaggaaggactctgaccttgtggcaaaagccctgtccatggttctgcagcttggctagaaaggggttaactggtgggcaccctggggaggggcttggatgctgctgtctttaaggggagagctcccttctcccaaggccaggagtgagggcacctgttgtgacctccaggccatctccctgtccaggtgcgatcacagcagcctctcccacaggtggcccaccttttgctgcactcgatctccagtggctcatccggcccctctgagtgggaccaggaggtagagagactcggaggctaagtgagctgaggcgtctttggccagacggttgggagaggaggccgaaactgttgcccagacgagaccagaacatcacctgtgcactgggtttcttgggctgttcctcctcccagctccttctgagcagagggaaaagatgctgaaacccacctttctccagggctggggccatggcatgcacaaccccactccctcctggcctcactggacccccccccccaggacacaggctcaacccccaggggtctggggctagagggtgcccgtctccatccccaagtagcagcaggattctccccttccataggcactgccttctccatgccccgctgcttcccagacctgagagaccctcttggagaaggtgacaggattcagctctggacactcactggctggggctgccccccacctccagcccattatgtaagccccacggtgctgggcagaaggattgccctctctttccagaactccccagctctgccccttcccttccccataccattctggccccagcccctttccttactggaaagccaaactttgtgcaaattcttccctcccaccagtgaggatgggggggagggatttgaggagaagctaaggttgggagggggaagggaaggaaaggaatttcagcccggtagccccagcctctcgccctttgggatgtgactggcctcaggactctcctccccgagtcccagttcctggacaggcccttgcccaaacttgtgctccactctcccctctctcttccacagcccccctctccatccagctgaagcaagactttgcaaagaggtcaccctgcagaggtagaccctgggtgacctcaaaactggggactccggctcaattccatgcagggacttctggggcaggccagggcccagggcctggctgtatggactggtcctgtcctggaccgggtgcccagggccggcccaggagaaactgccctctccacaggcagctgccactgcccgctggccaactggaattcctggacacactcctggggtccagcttttcggccaggctcggcctgagagagccctgcgggatgccgcccacgtagacagggcggaggggagccccagcacccaccctggggctgaggggagaagtcagaacggccccagcctgccagtgttcctgtccctgttccctcccaagttacaagggggatatttacaggaactgagccgggagccccggcccataacagcacgcagggaagtccctgggttggaggagacaaaagcggttggcacctacctggggcgagagaagggtgttggctggggcaggtggatgctgcccgagtcggtgagccggggccggccgggccgccagcccctgtctgggccgctgtcctttgggccctggcggcctcagccgctcgctgtccgggtgcggcggcggccgcggcggcggtggcgggtgagggcgcgtgtgtgtgagcgcgcccggagccactgcagcatctctgcatcaagatgtgctcctccctctcccaggctccgctcactggctggctctggtcctcagccaacgctcgggggccctggagatggcttccttctgcccccctcccaccccacttccgtccccaccctcctggctttacctcatttgctgtcatttaaggaccagggagcgagcccagcgcgcgtcttccataatgcatgggccgctcatggacaggccgcggggcgctgtctggcccgcctgccctcccgatcctgcccagccccacttctagtccccctgcccagggctgaaggggcaggagaggggcggggtgaagagggaaaagaaagtggctcttactcctcaaaccctggagacccatggagccaaaactcctggtttccccagaaatcccctatccgaggaagagatccaaatcagaaatcccagcttgctgtgtggggcaagtggcagggaggggctgtctctgttgcccggtccaccccatgttcctctttattgtttcccttgttcaaaagtagtttgagctttttgtcaaaatatctaaatattagaggacatttaaaaatacatagtgaaagtccctcaaccactactcttaataaatctaagtacatgcccccaggtttattattttcgtgtatacaattacatgggttagtagggttatttcacacaaatgtgattacataaaacagtaggattggccaaagacttttaactgtgtaactgatcttggacacttttacgcatcagtacgtttggatccaatcccatttttaagcaaccagcagtgtgatgtcatgaaaagctccctggattaggggtctgggtgtctgaagcatactctgggctccacaaccgactggctgtgtgtgcttggctaggtgccctgccctctctgagcctcgctggtacctgaagggattaaagatggacacagtcctgccagctctgagattctaagtgctcacccttgtcagcgatgcctttctcctgccctgctccggtcacgtgggggagtgcccaggaaggctgtggcccggaggcggagggaccagccatctgcggcaccagtcggccctgtcaggctgtcactgttgtctcacccccctctgatctgcctgctgtccagcttgcacaggcaagaccggtgagcagtccagatgctgcaacagctggcagggccaggccagcctcccagttttaaatggctatacctgtcaagcctggatcatggctccatgtctccctgagtggaggaggtcctggggacctgggccagaatgagagggtctggaaaaggagaaggagtcggggaggttctgctgctcagcctccaaggctggaatgtctgcccaggtcccacatgcgctcccctcctttccttctgagcccctccaaagggcttgcccaacttgagagatagtcttctttgttcctgatggggaggacttggattttgctaatgatgtttcttaaataatgttgaatgctgttatatagacagacacatcaaccccttgccaggatatctttcccttccttcccctgcccacactgtccttgcctatctgtatgtctgagggctggcacattggctctgagctcctgaggtgaaccttgctctttggcaccattcaagtcagcctgggctccaaagagaggctctgcaagttctctcctagcagaaaacggcaggaacaagtccttgccaagaaaaggatgctatgtctgctgcagggggctgacgggccaggaaataggctggcccaggaaccaacagtctggaaatgcttgcaaggattgctttagacggagacagctgtctttgtgactctattttaggacagctgctgccctgtggtgggagctgggtctctggggagggtcgttagcacaggtgacttgggtcttaaagactctcagatctcaatgcaaccagcatgctccatgtggactctggc

SEQ ID NO: 454 - DNA, 4001 bp, Homo sapiens
agaacctgtctctaaaaattaaagaaagaaaaataaagtaatttctgttcactgtgttcatccccagctcagccaccaatacgacccctccctgcatcacagccttcttgtagcctccttcagagccttttaaaggtttgaggtatgagagggcaaaacccctaaaaccacttcaactctaaaagtatctgttttccaactacatggtatattttgcagcagcataagacagtgaaaaagcacaggcaaatccaagttcaaatcccacaccagccagttaggcctgccttaaaattacagttttgccacttgctgagtaataacaagcgagttacttcaatgctctgagcttcagctgcctcctctggagatagagaataacaacgtctcgctctgtggcccaggctggaatgcagtggcgtgatcttggctcactacaacctccacctcccaggtcctggttcaagcaattctcctgcctcagcctcctgagtagctgggattagaggcatgtgccaccatgcccagctatttttttttttttttttttgtatttttagtagagatggggtttcactatgttggccaggctggtcttgaactcctgacctcgtgatctgcccgcctcagcctcccaaagtgctgggattacaggcgtgagccaccgcacccagccaacaacacctatcttaacaggtactggtgaagatgaaaatgtcaagcacttagcacacatggccacttactaacctcagtaatagtcctctttccaatccccccttatactaaggacaggggatacagcgcttgaatgcctgtcagggagacagaatccaccatatgaaccttttctttcttctgcttaccaaactcctttctttatattttgggtatatgatgacttacaggatttttgggtgagcaactgggaatgctttatttctgatagtagctctaggtcaataattttgccaactcctgcccaagattaaatactaccccttcagaagatcctggaaaagtctaccagtgaaatgaactggaattttttggttactgttcatatgtttgttgtgtttttcgatgctctttaatgtgtcagttgacattctccaaagatctagctgatgtaagtgcgtcaaataaggctgaattaccaggcaaggttttctctgcgcctcaaagaaactgttaattgacatgcctcagagagcgcttcatgtcagcctaccactcacagtataagctcgatgtatcttaacagggaagagaaacacatcaaagtgtgacttacccactgttggggacaacttgattcgaaagagcttcttaacttcttgcattgagaagcatcctctaagttctcatctaaacacttccagtactcatcccgggccccccagcagacctgtctttccttcatagatggggctgccattcctactgcgatgaagctgttggccaaaataatatttgagattaacaatgaactttgtaatctgaagagaagataaggaaagaggaaaaccgtcaatctcctcttcctttaaaactaaaaaaaaaaaaaaaaacaaaaacaaaacaaaaccatgcttagggattttgatgaggcaactgaacccaatcagttctcagtggcagcataaggccacccgctcttgaggcttatctcacactgtgtgatttgatccctgctggggcggcagcgtgggctcagaaagcccggctgagaactgtggttctgtcccagtcgcttagggcagctcatttattctctccgagcccgtttcccaccagtaaagcggggacagcagtgcctagtttacagggttactgttcgaacctaagcgctgtagaaacaggtgtgtgggggccacaatcaccaagcaggcgattggagtgccaccccgttttgcacaagaggaacccgcggctcggggacagtaagggacctcccgggcccatagtccacgcgcgccccacccggacccatcagcaagccgacctctctgcccgcccacgtccggcttcctttcgatgtcgacgggaggaaactgtcacgcaggccaccaaccggcggtggagggcgcggtgccgagtcctgccactgcagggtcgccccgctggctcaagctctagaagcgtagacctccccagccgcaaaaagcaactcacgcggcgaaaccgcggactcttttgacccttccgagctaccatttactttccatagaggggcgggacttcctgtttcgcttttatctgtaagaccgacttccggccttcaagggcaagaggggtatatacgtatatatcatcgcacggtgtgtcccggaaggcttgatatgctagtcccgcgggacaaggcgagccgaggagtttgtgtggaagtttgcatctgagagtgcgagagctggacggagtgttacagagccgcgatgccttctcgttttgttttgttttgtttttgatacagtgtctcgctcttccgcccagtctcgagtgcagtggtgagaacacggcttactgcagcctcaaaatcctggacccaaaagatcctcccacctcagcctgcctcccaggtagctgggactacaggcgcacaacaccatcgcttcttggattaaaagaaaaggatgaaacgggccccagaaagaggcggtgacgtcccagaacccatggcaggggagttgggaaaataaatatttgtattgttttaatctcccttgtggctttttttaacccccgaaacagcaaggtatttttaaaagggatgaagagagttgcttcaaatgttttgagacgttgttatttttaatatgtgagtgaatatcttagaaacaaaatgaacaagaaataaaaattttagaaaatatatgagttaatctctcagcagagtctttattaaaaagcatgtttatggtcagtcatctggcaccccgttctcttaatagatcccatctgctccatcatctagttctaaaacatttatataagatgcaatttacaattttgcactcagtgcagtttgatccattccaaattcaatatatgcagacttttccgggtggcgatgtgaggctacgtaccaccaaatatgtgttctgcaatatagaaagtatttcccccatagttaatgcactctcatagtggagttactttagctttaccagagccacccccttcttttacatcatgtctattgacgtcagtttacatatagatatcttttaaatatgactgatgggatataaaaggaatgaaaggaaagagtcttagatgacttctgagtctaaaaaggaaatgtgttttaaatttaaaatttataagtacctaatgaaaaatacatatgaaacaaagtgaagtgacagaattacaaagaaaaaaaatgcctggtcatattgggtaattttaacaggactttctcactaatcgttaagactagcaagagaaaagttaaggatataggaaacgtgaataacatgatgtaaaaatgacgcaattaatatgtacagaacaacacgaccaaaatcagaatgtacagttttttgaaagcagacacatcaccacagtcaaccacatacttagttataaagcaactcaagaaattttgaaaattgaaataattgtcattttttactacagtgcatttaagatagaaatcaataaagaactgtaaaaacaagcctgaataacacagagacagagtcaatggtattgagaaaatattttgaactgaaccataaaataacaatagcaacacctgtgggatgaaactgaagcagcacttacagggacatttatagccataagtaagtgtattagaagagtctgaaaagtcttgagctgaaaatcccttttcaagaagttagaaaaaggacagcaaaataagacagaaaatagaaggacagaaataatgttaagagcagaaattaacgaaatggaaaataaaagcagtggtgtaccagagccagcctgtactggcataggagagccaattgtgc

SEQ ID NO: 455 - DNA, 4001 bp, Homo sapiens
agccagggtgacagattgagaacctgtctctaaaaattaaagaaagaaaaataaagtaatttctgttcactgtgttcatccccagctcagccaccaatacgacccctccctgcatcacagccttcttgtagcctccttcagagccttttaaaggtttgaggtatgagagggcaaaacccctaaaaccacttcaactctaaaagtatctgttttccaactacatggtatattttgcagcagcataagacagtgaaaaagcacaggcaaatccaagttcaaatcccacaccagccagttaggcctgccttaaaattacagttttgccacttgctgagtaataacaagcgagttacttcaatgctctgagcttcagctgcctcctctggagatagagaataacaacgtctcgctctgtggcccaggctggaatgcagtggcgtgatcttggctcactacaacctccacctcccaggtcctggttcaagcaattctcctgcctcagcctcctgagtagctgggattagaggcatgtgccaccatgcccagctatttttttttttttttttttgtatttttagtagagatggggtttcactatgttggccaggctggtcttgaactcctgacctcgtgatctgcccgcctcagcctcccaaagtgctgggattacaggcgtgagccaccgcacccagccaacaacacctatcttaacaggtactggtgaagatgaaaatgtcaagcacttagcacacatggccacttactaacctcagtaatagtcctctttccaatccccccttatactaaggacaggggatacagcgcttgaatgcctgtcagggagacagaatccaccatatgaaccttttctttcttctgcttaccaaactcctttctttatattttgggtatatgatgacttacaggatttttgggtgagcaactgggaatgctttatttctgatagtagctctaggtcaataattttgccaactcctgcccaagattaaatactaccccttcagaagatcctggaaaagtctaccagtgaaatgaactggaattttttggttactgttcatatgtttgttgtgtttttcgatgctctttaatgtgtcagttgacattctccaaagatctagctgatgtaagtgcgtcaaataaggctgaattaccaggcaaggttttctctgcgcctcaaagaaactgttaattgacatgcctcagagagcgcttcatgtcagcctaccactcacagtataagctcgatgtatcttaacagggaagagaaacacatcaaagtgtgacttacccactgttggggacaacttgattcgaaagagcttcttaacttcttgcattgagaagcatcctctaagttctcatctaaacacttccagtactcatcccgggccccccagcagacctgtctttccttcatagatggggctgccattcctactgcgatgaagctgttggccaaaataatatttgagattaacaatgaactttgtaatctgaagagaagataaggaaagaggaaaaccgtcaatctcctcttcctttaaaactaaaaaaaaaaaaaaaaacaaaaacaaaacaaaaccatgcttagggattttgatgaggcaactgaacccaatcagttctcagtggcagcataaggccacccgctcttgaggcttatctcacactgtgtgatttgatccctgctggggcggcagcgtgggctcagaaagcccggctgagaactgtggttctgtcccagtcgcttagggcagctcatttattctctccgagcccgtttcccaccagtaaagcggggacagcagtgcctagtttacagggttactgttcgaacctaagcgctgtagaaacaggtgtgtgggggccacaatcaccaagcaggcgattggagtgccaccccgttttgcacaagaggaacccgcggctcggggacagtaagggacctcccgggcccatagtccacgcgcgccccacccggacccatcagcaagccgacctctctgcccgcccacgtccggcttcctttcgatgtcgacgggaggaaactgtcacgcaggccaccaaccggcggtggagggcgcggtgccgagtcctgccactgcagggtcgccccgctggctcaagctctagaagcgtagacctccccagccgcaaaaagcaactcacgcggcgaaaccgcggactcttttgacccttccgagctaccatttactttccatagaggggcgggacttcctgtttcgcttttatctgtaagaccgacttccggccttcaagggcaagaggggtatatacgtatatatcatcgcacggtgtgtcccggaaggcttgatatgctagtcccgcgggacaaggcgagccgaggagtttgtgtggaagtttgcatctgagagtgcgagagctggacggagtgttacagagccgcgatgccttctcgttttgttttgttttgtttttgatacagtgtctcgctcttccgcccagtctcgagtgcagtggtgagaacacggcttactgcagcctcaaaatcctggacccaaaagatcctcccacctcagcctgcctcccaggtagctgggactacaggcgcacaacaccatcgcttcttggattaaaagaaaaggatgaaacgggccccagaaagaggcggtgacgtcccagaacccatggcaggggagttgggaaaataaatatttgtattgttttaatctcccttgtggctttttttaacccccgaaacagcaaggtatttttaaaagggatgaagagagttgcttcaaatgttttgagacgttgttatttttaatatgtgagtgaatatcttagaaacaaaatgaacaagaaataaaaattttagaaaatatatgagttaatctctcagcagagtctttattaaaaagcatgtttatggtcagtcatctggcaccccgttctcttaatagatcccatctgctccatcatctagttctaaaacatttatataagatgcaatttacaattttgcactcagtgcagtttgatccattccaaattcaatatatgcagacttttccgggtggcgatgtgaggctacgtaccaccaaatatgtgttctgcaatatagaaagtatttcccccatagttaatgcactctcatagtggagttactttagctttaccagagccacccccttcttttacatcatgtctattgacgtcagtttacatatagatatcttttaaatatgactgatgggatataaaaggaatgaaaggaaagagtcttagatgacttctgagtctaaaaaggaaatgtgttttaaatttaaaatttataagtacctaatgaaaaatacatatgaaacaaagtgaagtgacagaattacaaagaaaaaaaatgcctggtcatattgggtaattttaacaggactttctcactaatcgttaagactagcaagagaaaagttaaggatataggaaacgtgaataacatgatgtaaaaatgacgcaattaatatgtacagaacaacacgaccaaaatcagaatgtacagttttttgaaagcagacacatcaccacagtcaaccacatacttagttataaagcaactcaagaaattttgaaaattgaaataattgtcattttttactacagtgcatttaagatagaaatcaataaagaactgtaaaaacaagcctgaataacacagagacagagtcaatggtattgagaaaatattttgaactgaaccataaaataacaatagcaacacctgtgggatgaaactgaagcagcacttacagggacatttatagccataagtaagtgtattagaagagtctgaaaagtcttgagctgaaaatcccttttcaagaagttagaaaaaggacagcaaaataagacagaaaatagaaggacagaaataatgttaagagcagaaattaacgaaatggaaaataaaagcagtggtgtaccagagccagcctgtactggca

SEQ ID NO: 456 - DNA, 4001 bp, Homo sapiens
caaatccaagttcaaatcccacaccagccagttaggcctgccttaaaattacagttttgccacttgctgagtaataacaagcgagttacttcaatgctctgagcttcagctgcctcctctggagatagagaataacaacgtctcgctctgtggcccaggctggaatgcagtggcgtgatcttggctcactacaacctccacctcccaggtcctggttcaagcaattctcctgcctcagcctcctgagtagctgggattagaggcatgtgccaccatgcccagctatttttttttttttttttttgtatttttagtagagatggggtttcactatgttggccaggctggtcttgaactcctgacctcgtgatctgcccgcctcagcctcccaaagtgctgggattacaggcgtgagccaccgcacccagccaacaacacctatcttaacaggtactggtgaagatgaaaatgtcaagcacttagcacacatggccacttactaacctcagtaatagtcctctttccaatccccccttatactaaggacaggggatacagcgcttgaatgcctgtcagggagacagaatccaccatatgaaccttttctttcttctgcttaccaaactcctttctttatattttgggtatatgatgacttacaggatttttgggtgagcaactgggaatgctttatttctgatagtagctctaggtcaataattttgccaactcctgcccaagattaaatactaccccttcagaagatcctggaaaagtctaccagtgaaatgaactggaattttttggttactgttcatatgtttgttgtgtttttcgatgctctttaatgtgtcagttgacattctccaaagatctagctgatgtaagtgcgtcaaataaggctgaattaccaggcaaggttttctctgcgcctcaaagaaactgttaattgacatgcctcagagagcgcttcatgtcagcctaccactcacagtataagctcgatgtatcttaacagggaagagaaacacatcaaagtgtgacttacccactgttggggacaacttgattcgaaagagcttcttaacttcttgcattgagaagcatcctctaagttctcatctaaacacttccagtactcatcccgggccccccagcagacctgtctttccttcatagatggggctgccattcctactgcgatgaagctgttggccaaaataatatttgagattaacaatgaactttgtaatctgaagagaagataaggaaagaggaaaaccgtcaatctcctcttcctttaaaactaaaaaaaaaaaaaaaaacaaaaacaaaacaaaaccatgcttagggattttgatgaggcaactgaacccaatcagttctcagtggcagcataaggccacccgctcttgaggcttatctcacactgtgtgatttgatccctgctggggcggcagcgtgggctcagaaagcccggctgagaactgtggttctgtcccagtcgcttagggcagctcatttattctctccgagcccgtttcccaccagtaaagcggggacagcagtgcctagtttacagggttactgttcgaacctaagcgctgtagaaacaggtgtgtgggggccacaatcaccaagcaggcgattggagtgccaccccgttttgcacaagaggaacccgcggctcggggacagtaagggacctcccgggcccatagtccacgcgcgccccacccggacccatcagcaagccgacctctctgcccgcccacgtccggcttcctttcgatgtcgacgggaggaaactgtcacgcaggccaccaaccggcggtggagggcgcggtgccgagtcctgccactgcagggtcgccccgctggctcaagctctagaagcgtagacctccccagccgcaaaaagcaactcacgcggcgaaaccgcggactcttttgacccttccgagctaccatttactttccatagaggggcgggacttcctgtttcgcttttatctgtaagaccgacttccggccttcaagggcaagaggggtatatacgtatatatcatcgcacggtgtgtcccggaaggcttgatatgctagtcccgcgggacaaggcgagccgaggagtttgtgtggaagtttgcatctgagagtgcgagagctggacggagtgttacagagccgcgatgccttctcgttttgttttgttttgtttttgatacagtgtctcgctcttccgcccagtctcgagtgcagtggtgagaacacggcttactgcagcctcaaaatcctggacccaaaagatcctcccacctcagcctgcctcccaggtagctgggactacaggcgcacaacaccatcgcttcttggattaaaagaaaaggatgaaacgggccccagaaagaggcggtgacgtcccagaacccatggcaggggagttgggaaaataaatatttgtattgttttaatctcccttgtggctttttttaacccccgaaacagcaaggtatttttaaaagggatgaagagagttgcttcaaatgttttgagacgttgttatttttaatatgtgagtgaatatcttagaaacaaaatgaacaagaaataaaaattttagaaaatatatgagttaatctctcagcagagtctttattaaaaagcatgtttatggtcagtcatctggcaccccgttctcttaatagatcccatctgctccatcatctagttctaaaacatttatataagatgcaatttacaattttgcactcagtgcagtttgatccattccaaattcaatatatgcagacttttccgggtggcgatgtgaggctacgtaccaccaaatatgtgttctgcaatatagaaagtatttcccccatagttaatgcactctcatagtggagttactttagctttaccagagccacccccttcttttacatcatgtctattgacgtcagtttacatatagatatcttttaaatatgactgatgggatataaaaggaatgaaaggaaagagtcttagatgacttctgagtctaaaaaggaaatgtgttttaaatttaaaatttataagtacctaatgaaaaatacatatgaaacaaagtgaagtgacagaattacaaagaaaaaaaatgcctggtcatattgggtaattttaacaggactttctcactaatcgttaagactagcaagagaaaagttaaggatataggaaacgtgaataacatgatgtaaaaatgacgcaattaatatgtacagaacaacacgaccaaaatcagaatgtacagttttttgaaagcagacacatcaccacagtcaaccacatacttagttataaagcaactcaagaaattttgaaaattgaaataattgtcattttttactacagtgcatttaagatagaaatcaataaagaactgtaaaaacaagcctgaataacacagagacagagtcaatggtattgagaaaatattttgaactgaaccataaaataacaatagcaacacctgtgggatgaaactgaagcagcacttacagggacatttatagccataagtaagtgtattagaagagtctgaaaagtcttgagctgaaaatcccttttcaagaagttagaaaaaggacagcaaaataagacagaaaatagaaggacagaaataatgttaagagcagaaattaacgaaatggaaaataaaagcagtggtgtaccagagccagcctgtactggcataggagagccaattgtgcacacctcttggcaactccatgatcaataacatcaaataagtagcttgaagtcacccacgatgggactgtttacactatggaactcaacaaacaagccaggattttgttttatgtttggagccaattcaaataagtagcttgaagtcaaccatgatgggactgtttacactatggaaatcaacaagccaggattttatgtttggagctaactcactagcacaccacagcatagaataggttgaaaga

SEQ ID NO: 457 - DNA, 4001 bp, Homo sapiens
taatcatattggtcaggctggtcttgaactcctgtcctcaggtgatctgcccacctcagcctcccaaagtgctgggattacaggcgtgagccactgtgcccggcccaaccccaggttcttttcaagccatcatactgcagagcaactctgtgtcatgactatgttatgatatgtatatggttgtgttatggtctatgttacggattagcctcaaggaatagctatgtcatttctgcaaactaaactgactaaactgcaagctattagaaggtagggccagtgccactttttttcttttctttttttttttagtagtgacagggtttcatcatattgcccaggctggtcttgaactcctggcctcaagtgatcctcccacctcacctcagcctcccaaagagctaggattacaggcttgtgccaccacaccagtcctttatttgaaagaaaaaaaaaaaaaaggctgggcacggtggctcacacctgtaatcccagcactttgggaggccaaggcagatggattgcttgaggtcaggagttcgagaccagcctggccaacatggtgaaaccctgtctctacgaaaatacaaaaattagccaggcctggtggtgggtgcctgtaatcccagctactcgggaggctgaggcaggagaattgctttaacccaggaggcaaaggttgcagtgagctgagatcgagccattgtactccagcctgggtgacagagtgagactcagtctcaaaaaaacaaaaaaattaaaaagtaggcagtgtgcagtggttcatgcctgtaatcaaaggcgggaggatcacttgagcccaggagttgcgaccagcctggacaacgtagtgacatactatctcaaaaaagaaagaaaatacaaaaaataaaaataaagcaagaagaagaaaaccacccaaaggtattagctgctctgggtggacccctctggtcaccaccatccacctatactcttaagtcaattcaatgttcacacaacacacaggacacatttgtgattcagggcgtcttcgccagctgttacctatggtaagaactgcatggttcactcccttaccttcttcaaggctttattcaattgccactttctcagtgatcttccctgatcactcaatttaaaactgccctcctgccctcctgacacccttcacccagtcttttttccacggcacttactactttctttttatttattttttttgagacggagtctcgctctgtcgcccaggctggagtgcagtggcgcgatctctgctcactgcaagctccgcctcccgggttcacaccactctcctgcctcagcctcccgagtagctgggaatacaggcgcctgccaccacgcccggctaattttttgtatttttagtagagacagggtttcaccgtgttagccaggatggtttcgatctcctgacctcgtgatccacccgcctcagcctcccaaagtgctgggattataggcgtgagccacggctcccggccggtacttactactttcgaacacgatttcatgaattacctgaggcttattgcccgactccccgcactagcttggaagctccacgagggcagggagtttcatctgttcaccgatggatccccagtccctaacccaaaagccccagcacgtctcttcctacccgccccggcctcctggctcggtcttcccgggacacatcgcccttcccaacacacgcggtcaccgcgatccacagaccccgtcccccgcccgccacgtgattccttctccagcctctcagaggtcgcagaccagacctctccgggcacgtccctccccgacgcgtcgccgggctgcgctggagccgctcaccgtccgggtccttctcgtggtagcagtggtagttgcactccacctccatgttctccaaaaaggacttgacctgctcctcatcctggaagtccaccatgccggccatggttcgcgccggcccaaagacggtcacgtgagccggcggagggggcggggcggggcgtggggctgacgccgacgccaaccgcggcgctctcccgggatcccggggcgagccaagcgagcctgtgcttcccagcagccatcgcgccgttaagggcgctggcagccacgcttccagggctaccgccttcctgaaactgggggctgtctctctgcagcaccttacctatgctcgctttgtagccttagtgattttccacctgcagtcatttatctatgtataatccctaagcgcctactgtgtgcctcaccagtgcattgttctagggatatgacagctaggaatatggtccctgccttcaaagaacttggagttcaataggaagacattcgcttatccattcagcaagcatttagaggagcttctatatgtgccaggtgtagctggacaaagtgcagtgagcagtctgattcatctgtcttcttcccagacctgtcttggccaccaacatgaattacctaagcaatgaatggctatgggagatgttgactggcacacagtagcagtgaagggtgtagcaacgtcactgttataacacctagtactcaaacagtgctgaactttgttccaggctctaaatgctttatatgaattaactcatttaattctcattatatatcatgtcactgtaaaaacactcacagtgacactgtgggtaggtattattattatccccattctacagataagaaaactaaagtacagagaaattaagtagtttgtccaaggtcacacagtaagtgagggagttggtatgcaataataattttttttaaaaaaataaaagaatgaatgaggccgggcgcggtggttcacgcctgtaatcccagcactttgggaggccgaggtgggtggatcacctgaggtcaagagttcgagaccagcctggccaacctggtgaaactctgtctctactaacaatacaaaattagcaggggtctctactaaaaatacaaaattacagggagcacacctgtaatcctagctctttgggaggctcaggcaggagaattgctttaacctgggaggtggaggttgcagtgagccgaaattgtgccattgcattccagcctgggcgacaagagcgaaaaagaatgaatgaggtagaaaaggaacatgtcaaggagatggggaggaggagaggaaatttacctacattttgctttgttttcctgctcctgttcctgctaagaatcatcagttccataaagcttagatggaaagttctcctaagacagccacttcctattcgtcttttttttttttttttttgagacggagtttcgttcttgttgcccaggctgaagtgcaatagcgcggtctcagcttactgcaacctccgcctcccaggttcaagcgattctcttgcctcagcctcccgagtagctgggcttacaggtgcccaccaccacgcccggctaattttttttgtatttttagtagagacagggtttcactatattggccaggctggtcttgaactcctgacctcaggtggtccgctggcctcggcctcccaaagtgctgggattacaggcgtgagccaccacacccggctgacttcccattcatctttgaattccatccagccctacttttgaattctcaatggagctaaatccatggcttcccatcgcctataacaatgctttccaaatggctccattattaagctatccccaatggcagcaaagaatggactatttccaaccacttatttattggaaggcagccaataatgtctgaaatcccagttttattttttaaattcataggattttacattcatttccccataatacatctttcataggataacagaagattgccttttctcccccaagcctttgagtaaaattgacattccaggcaatataccacatttacctgtggtttcttataccctgatcaccttaggggactcctcagtacacatggcccaggatgggaatccttgaactttggtttgaggtcatcttcttta

SEQ ID NO: 458 - DNA, 4001 bp, Homo sapiens
aatgagacacaaacatagaaatatagcctggacaagtgttccaaccatcctttctgccatggaagtgcaacttatatgtagttttatatgtttaaggcaacacaaattgcaaataacctttatcttcaagctccacctaaaaaatcaacaaaattttacacagaacagctgttctatgtattttcttctatgtatgttgtcacttttataagcactacaaaatgtaccgcatattcacagagccacgaaatatgcaattgctggcattccagccaccaccccagtttgcactctaagttctattttagaacttgtatttctgtgatttcacttcctgaagctgcatttaccaaaggcattctgtcaactcagagtgggaaaggtggtggggctagtgagtcagagaagatgctggtgttgagccttaagaagtcaagagatggacaaactgagattattctgtactctgagattcttgacgtcaacaaggcccctgatctccgtgtatggcctttcctcttccagggcacctctccccagcatgtacccttagctgtttctttctaccctcatttcagggtagctcttagccagtaggcaaaacgaagggtttctggatcaatgagttgattctgtacattctttgagacatcctaatgaagttacaccttttagtacagtggtctaataggaatatcacttacaagaataaggtacattattcctgggtatagataagtcctacatacgaaaaatgatatggtcacactggagaagatacagatctactttaaaaaaaaacagctttggagatgtaatctgaatgcaaatattatcaaaaagagataggctaattaatctagaaaacattatgtcaccaagaaaggcagagtaagatttcaactcacttgctcaaaattgtagatgtctactaaccagctaaaacttttcgctttttaacactgaaagcagctactaaaaggtgtcaaaaatcctagtcctcaggaaattaaatagaaacattttttgaatggcttaagtgcagacccagagggatacaccaagtaggagcaaagctcctcccagctctcactcaaagcctggccattttcaaggctgtgcctgatgaactttatcatcagtgaagtgttttcagtttatatttcttttctctaagtttatgacctacaactaccaacttcttcaaatgcatcacgtaaaaagtagagcaacttctttaaagagtaatggtttgctttgtcgtactgcaatagtcggtaagaatgttctaagcttctaaatatcccattctggaagctttagctgaatgttaagcaaaacttcagattaagttctttttctttccgacccgagtccctaggaaagtacgtgggcttggagatttattcaacacacacttaatgagctccaaggccccggtccacaagcttctttccgacaaggggactggcaatctgactgcactgcatggtaacaggaacgggtaacagtggctttgacatgcagctcaaaaccacttgcccagaactttcaggcctttccatgtaacacgcacgattttacagaagtgctttctccaggctgcacccgccaaacctgacgccaaaagactcattgcgaagtgcagcgaggtctcggcggaggacctgacactgagcgtgcgcaggcaggagcagccgaccgaagagaccgccacagagggcacagggcagaggcaccctcatggcccggctccggggagcggacgccgcgcgcaccttcatgaactcgtccttgtcgaagcagagcgtgtccggccccttgggcaggttcatcctacttttctccatcccgccggccaccgcctctcagtgccaagatccaagcgagaaaacgcaggaggctgcgcagaccgactcggcggccgcggccaccgccagtttccacggcacaggggggtccgcttccgccaacatggcagcgcccgcgccgcggccaatgaacgacggcaccgcaagccggcctgcgcctggctctggccaagaggggcgcgggggccgccgctgctgcacgggtaggccgtgctgccctcatgtggcggagggcggtactgcagcctcgcgcgggctcctgcaaggctgcccacctccctaggaggcgtggctgagctgcaggggtgggtcaaaaggggtgagcgggtctccctcccacccccaccgtttctactgggaaaaattgtcctacaacgcttttccagtgccttctaccctgagactgctctgcttcgttatgcatggccagaagttggccctttggttctcaggcccgttttccaggttggacgtatcaccgtggtcgcattcttcacctccctgtgcgcggtcactgccgctggtgggcgctaacgcctctatggagacccccgcccttagcctctgtccccacagagaagtgtagcgtctcctccactgggctccgttactgggaactcatagggaagaaggtggtcagctaggcggctttgggtcctctgagtagctccctgctcaacctcggtctccgttccaggtgggcagcctctgagcgcaactttgggtcttcaaggtgcttaaaggagtgcctcgctatctgattaaacacagcagacaaatacatgtgcatgcacatttatttttaatttcaaccaggaatggacaaatttttgtgttgtggccagtactggtgcaaccaaaccaatttcttagactgtcttcctcctcctccccccacccaccccaattttattctgagacgttcttcctttatctcctcccttgcttttttctcctcttgtcccttccgctagctgtaaataccgtggtcaaatgatgatgattcatttttcttcttttctccttgacattcggatgattcaaaccacaaacctcacttcacactcttcattctgcaaacctttccttcccgcttctgttgaggaatctaggcctctcttcccaatttttctccttggagataagattaacgccatgatggcctgtaaaaaggaatgggacagcagagggtaagacctcaccatgagactttgtatttcaagtatctcaactagaaaactggtcacttaaaaaaaaatgtaggcgtagaatccaaaacgctctactccctagcactggacctagcaggccctgttgaagagcctatttcctgccagtatctacagaacagatgaacaggataagagccggaagctagctggaggatcaaaatattctgccagaggagcgattgggaaaagtacatcctaagtccctgttatgtttgttttgctggaggaaatgaaaacctcattttctgtttaattttttgttttctcttgttatgaaaattttcaagtacacagaagtgtggagagcacaagaaccccaccctatgtacttagcacctcgcttcaaccatcatcaacctgtctcctctgcccttccccacccaccgcatcgagaccttctttttttgttgttttatatatatatatatatacatatatatatatatttttttgagacggagtttcactgttgttacacatgctggagtgcaatggcatgatctctgcttaccgcaacctccacctcccaggttcaagcgattctcctgcctcagcctcccgagtagctgggattacaggcatgtgccaccatgcctggctaattttgtacttttagtagagatggtgtttctccctgttggtcaggctggtctcgaacccctgacctcagatgatccacccgcctcagcctcccaaagtgctaggtttacaggcatgaaccactgagtccagcccttttattggaatatgttttaaagcaaattctaaacaccatatcatttcctatcccctaatacctcagtttacgcatcaaaagaagaaaaaaaaaccctgacattttgtaacacctaacaaaaccagcaattccaataaccaatctatagtggctctgaaaggt

SEQ ID NO: 459 - DNA, 4001 bp, Homo sapiens
aaacaaaaccagcagagggcagaactgctgacagaattgaccaatccaaccggtgaccaggtaccaaaagtaaaatacaaactttttgatggatttcactttcaaagacactcttatctatccttgaaaatgtggaaatgaatgaatcaacataattaatcaacataataactcctttcaaaattcaaatatagtcctaataggactttcactgtatttagcaggaaaagtcacccaagggaataatctagcgctgcctgctactcgggaagctgaaagccactaagcgtgtggaaggaataacctggtctcagagatcggcctccgggagggctgactctcattagggagagctcagatcttggcatctagacccagggccacactcaagtttctgctaaagcctacgcatttgggcttgaccatttttatctcccttgacccaacctcgtcagtcaccctccttcctatcccccagcttctttctgcactcctcacaaagcttgctttctactctaagctgtctgggctccctgacctccaaaggctttcgcctgccagtcgattctaaggcacctaacggaccgctccagccagatgccttttcgggaaagggcgggggaaagagggagggagaaggcggaggggaggagtgaagtcgctctccctccgtgggtactgacagggttgcagacttccgagcaggtctggccattgaatatttggtggtgccacgtaggaactgttccttacctctctcctcccaccctacccacaccccctccccttccctcccaatccctagtcctccgcccccaccccatttgcttggcgactttcatcattctccaagagaactgcacgtccaacctgcaagaagaagcggaggggtggggtggggggagtcactgaaattcaggggaaagtgttctccctatcttgaacctattcctaataatctgccaatttttgtccacttaaaatagattgaccctcccccgccccccaaacacacagagtgttcctaatcttctagattcacccccctggtttctcttatatccccaaaactaaaacagcctgcttctcacttggttgcagacaaagaactttatcaaggttcattttataccctttatattttctcctcagctcacccttaaaaagatattcccattagttagaatctgaagaaaccagatgtgttccaagggcagtctaaagactgtgcctcaaacaaaagctttgtataactgcccttgtgttcaaggtaatatttttcctcttttcaaagaggctggaaagtggtgaagggcattttcagcaggctctcctcctgacagatctttttttcctgctacctacctcgtctccctttattgtcccgcctacattcatctctttctccagtttccaattccaacctggtagcagctacaatctggattgtatttaagggaattgcttttttttttttttcttgaagagcggggaggaagggtaaagtggggggaggggcgcagaagcagtaggaccgacggcaatctcccacctccccaaatccattttttcttacctcctctgacctctctagcttggaagaggaaggtcaatgcgagggttgttacggtgaaatcccagagccaccgtttcgttttccacctagaggaccacggctccatctccgagccccgcactcacaactgtgaactcaacccacgaaattgcgactgcagaccaacttcgtcctttccaaggtatcgccagggatgtttgctacacagccattggggagggagagggggaaaaagtcaaagggctttttcttctaaatttgatggtttgcgttcttcgtgtctctagccctttcctctccctctgagttggccccaccggccgggaccctccggccgcgaccctctgatccttcctctgccgggccctgccttcagaatgaaggcagatgaggggcttccaccaacaagctgagagtactgtgtgcccctaaaggcttcatgccgtcagtgggctggacgagtggctccgggcagccccctcctccgcccactcccctccctgctcccagctccccctcccagggcgaaactgacaagcaggctgagggtcagacccaatcacacgactctggggcggccccaagcccgcccccgcctccctcagcccaagaatgaggactccgagcaggcccagcccaccaaccaccccccatctccccactcctctcctccctcctcgcctaccaaatccccgagaaaaaatgggagggagttacgggggacgcgtgcttggctccagcactttgggaatgaaaggaattgcaggagagccccggagcacacggagttttcaaggagcttctgtattcaataaaaacagctacttgtctacttgcacccgtctgttagcctctcgctggtcggcgggagaggggaggaggccagcgcctgatcggccacaccgctggagtcctgggctggcagcggtaaccttatccttgtgcaaaaatctgcttcgtatggcagacgtggaaccagtggactcattgcgctgcctactctgaaaagtgtttttatttttatttttttaacccaataattagaagaaaggaatgaagatagaatggagggaccctagaagtcaaaacctagagcatgtagggaagtcctctttggagatctgaaactgacaggtttatctcttaaacgtttaaattcagcactaggttcattcagtggctttcctcttaaaagagttgaactgtactctgagggagaaggaggaaaaaatttatgggagctgacattaagagggtgagtaatttaattttccagctgattctgttctgatcctggatgagggggtactgaggagtgtgtagaaaaggcgaggaaagcaactagcagaaatctccaagaggctcggcccacagctcctcattaagggcctggccctggccctcagcctcgggagccaaaaacgtggtcactccacagtgagagtaatgaagagggcaggtttctaaattccctctctacttaacccatcctcaaagtaatcctcttacacctggaatatagattcccaagtcactttttccacgttaaaatcattccattctattgactcctttttgttcgttaataattcctaagatgtttctctcaaagattttctggaacagtgcccatcagggtgccagcatacattagccactcaatagagatgggttggatgaatgaacacatttttctgttgacaaagactagaagcattggccagggcctactttgagtatttaagtcatttaaatgcttaaaggccctcaactaagtttactgggtacatatgttcaattctacagctgccactaatctttaggaactcagttttctattagtcatcaaaatatgcctcatgatctatcagattacatcaaatctcttcatgcagtttaaaattggaagaaaggtgatcaaagactagattgagcccttataggggtataacagcatgaacagagacatataaactgaagaaagcaactagaaaataccttcaatataaatatcactctccataacaaagaactactcctttatcaagaagctatctcttagatcacaggtaaaaaaatacttgacatttgtaatgctgttggcagaatgtttgggatgcctcatatcagctgcagagaaatatcatcaactagttcttcagattacaaccttaaactgttggttaaaataatttaatatcatattgcatttgaacctgaaatgcacaattacaaattaagacccttacagtaaaaatatatgtatttaccatcttcattatccctcatcgtctcacagatggaaaatttgtatatattggctgtttccaaacttgtgtacaaactgatttttctgtcgactcttcagatattttaaaaattactttttacatcttctctcaaatgtaaaatagtgaaatgaatg

SEQ ID NO: 460 - DNA, 4001 bp, Homo sapiens
aggccaggagcccaggatacccacatcccggtccaaagaggtcagctacagccacagcacctgaaaaccacagagaccgggaaggcggatttctgagttcacacagcacaactccacacgtgggcaagtcgtggacagcctgtggggcccaggcactggtattggggtggcaggaggtctggccaggcatcagtctctctcagaggcccaaccacagcccttgggctaggatttgagcagaggcgatattcaaaatatttaaccaccggtatggcacggataccagctttcaggcaaagcagaaagctgcctactgcactgaaatagtgtccaggcagcatctggctgtgccagtggatacttgctggattgggagaggtctagaaggtcttagaaggccagagaagttggaatagtgatgagggcttaaagaagaggctattcttcaagacacgtggaagtatttcaagtctagcatcttgtgcactgtcctggtatatataccagcctgataccttactagcgcacccagctcagcccaggaagccctcccaggcacccacagggtcaggggctggtgactgggctgagattgtgggccacagccttccatagggctgtgtgggggccaaggaagctttccccataggtatagtgggcaggagagcaggtctctagggctcaggacctcattgccagccacccccgcccccagctgatggatgcttgtcttttagttttattaaaccctgatggatgggcccagataaatcgatgcaggctcagcaagtggccagcagagccatacatcgtctggcctcccccaggacaggcagctcacgtgcacaaacacagagccatgcatgtgtcagcacagcacatgcagatgcgcaggtacatgtacataaggacacatatgtggtaccagtgtgcatacaaagctatctgcacacaggcatgctcacggaaacatatgctcgctgatatacccagacacaccagcttgcatatacccacatgcgcacagccagcctatgaccactcctcctgtaggtcttcctgttgggaagttctaatgcaagtctgactgcattccttccaactctaatgaaatccaattttccttccctcaatcatggataggaaatgaaaacagaaaggaccccttaccccaatatatttggagataggactccagcccccttctccctgggacagaactgtgcccccagcctgcctattcatcccccatcctagtgatatacacatcccagctctcaaaccctatcctggtcttcctcctgccagccaatagaagggctgccagctgtggcgccatgtgggtgcatgtggaggcgtgaggatggatgtgatcctgtccccttccggctcctagtctctggtcgccactcctcaggctccagccagagtgcagggctgcaaggacagagccagagaagcttccaaggagacggctcaccccaacacagaggcatagatttgggcgcagggagtcagaaccaggatggagtttagagctcatctcgctctagagaagacgaccaaggcccagagagggaatgccactttcctcaggtcacacagcaagtctggcagaaagggcctctcagcccagagccctgaggccgcccactgtatccctacttaccggtggccggggatccccccacctcactgagcagtccaggcagcaggcggaggaagcagagcccaggttcctcaggtccgctaggggttctctatctctccgtgacggtcacgggtccccagcttcctggcgctcgagctctcccggctgtctgctgcccggcgcacgcctgccggggactgccggccactccgggtgggggaagagaggcggttccagggggctgggggcctgccagggacactaatggaacacagctggaccggcccgccagggaggaggaggaggagggcctagagggggctccagcggcaccagaggcggctagactgcggggtgcacagccccgccccgggtctggccgagctcccaggcccgcccctcctgcctcaccgccaggtgagcgatcctcgagctaggcgggaccctacgtgcccagagctgccctggaagggggctcctgcgggccctttaagagtcaggcctggagtttgaagagctccccctttccatgtccctggctgggcccccagaaggctgcggggtgggggggcggggaggggacaggggtggagggagcagggtagagaccctcctcccaagtgcgtggcacccatgatgtggctgccgcccaagcctcggtggtcagctttttccaattcctctgcctaacattcccagtcagtctgtccctaggtctgtctgtactgggaggaggagggtgggaaccccctccctcctccgtgctaaattaaccccctctgctctggcctgactcccagagaagtgagactgagggagtccccttattcctccttactccatgaggttggaagggctcaaatccctggcccctgctctggctttgcggttccaaatgtgctgtgtaaccatactccgttttctcatctggaagatgggatcgtgagagtatatgcctcatagacctttgctgtaagcaggaaatgggccaaaggctgtaagcgcttagcacacggtctggcacatgagaggagctcagtaaatatttgctgctattatcgttattactgtgatccctggcaggggacgggactggatttcaagcctttacaccagcactggggagggacctgctttatattcacggtccaaggacgcaagaggaattgagctgggctgaaagattggagctctgaggaggaaggagccggtaatgttccgagttctgcccagaggcagggccgttgaccaaggtggaatccccaccaagggtctcctcccgctgtagaccgaaagcaaatttattggcaccaaggctgaggatccacaaagtaggttcaagaggccatgagatgctgggctgaagagggagaaactgagcgtccccagttgaggggggctctgggggctctgtggaagcaacgcgcctagccctgtggcctcggctaacccggggtagggggaggttgtaggggcaggcctgggatttcccgcctccagacccagaggcgctgagtcagcggaaaccccaaccacgccacagaggcgccccactgtggtcccagtgaggagctggccccagatgtggctgtggcagtggtggggcctgggaagtgctgagctcagcaggcgggaagcggagggggtggggccttctgagcactctggcctgcggggtgggtgggcacaggccccgcctgccctaccagagggtgctgccccagcagtgggcactcgggagaggtgggaagcgcatataggtcaggctctgtgctgagaacttcacatatgctaactccttcgatctttacaacaacgccttaaggcagaattccatttttattcccaaacctgcagcacaggaaaaacacaacttgcccgggatcccacagctagtcagtggtggagcagaactcatgtccagccagcctagactcagcacgtgctcttaaccaccatgccatcctgacagctcccacccgtgccccagacagggcaggtggctgggccagggatggaggaacctgagaagggagagccagatgccttcccacagcaccccaagggtgctcacaggaacagccaagcctgggacacaccttacgcctagaaacactatcatagacagtctaggaatgtgcccatgccccttcctcccttccacacatacgtgcacacatccagaaacacgcagtcaggtaaagttctagcacagcacttgagtacgcagactccatatgcatgtataggcactcatgttcacacagacacaccctggccctagaaacagttacacacagatgtgtagagactcaagatacgcctccacatcaaagatacacagaaacac

SEQ ID NO: 461 - DNA, 4001 bp, Homo sapiens
ttcatccagaacctgctacttatccccatgtctctgcacaagggttctcttcccattccacgttttataatttttcttcagaagttcctccggtgcaatccattctatttggtttctctgcctccctccccccaaatcatctggacccaatttacaaaccccaaactgcccaagaatttatgcagggccttttctgggagcgtctggaagggaagtgtaaaccagacaagacaaaacccaggagcagatctgctttaactccggtggttggtcacaactaccaaggggagtgttagtcaccagcgtgggcctcgcgcggtggcagagggaaagccctcggggcaggagctgcaggagggccgcatgcggaggctggctgggcaagaagtggagggcctcactccgcctctcctggagtctccaggctggcagggctagagcctctctgcatccgcccctgatcagcgggaagatctgtcagttccgcaggatcggctgcaacccccgactctccaggctggtccacacagagggatgtttatcgagaacagtggcgggaaatcttctgcctgggaaccccatgcgacctgcgtgagccgctctgagaaggcaacccgcagagcttgacctctactcgctccagggactccccagcctccagcaccccgctgcccgcacggggttgaggagattgggaggtttcctcttcactgttgcatggggatgggggtgtgcggggaggtgcatgtggtcagctgggaagcccagcagcgaggcttccaggggtcggaagagagcgcgcgcgcgagccccagccaggctgggctgcacgcggctgggaagcacatgttcatacaaacacgaccacaaggcgctctttctccgcaccctgcctccgcctgccctcagctgacacggtcaattctgttccttgccctcctcccacctagcctcctgaggggcagcctctctgcagaagacttccacagccgcgttcacccttctcgcccaggggccagaagcaaacttgtgtaacccactgacctcttccagggggaccagggcatccagccaaagccgcgcaacccctggtccgagcccttttcccagggaaggcatgggagcaggtacagcgcccaaaggggaggtggggtgcccgtcaggacccgcccaaaacctccgcaggaggggcaggcccgcccccgtgtcctgctcccctccccagtccccgccgcgagtgccacttccccagtgacagggcaatgatcagggcgcagcctcggctcggatgggcaacgtttgttggccttctaaccagaggggattgcctctgagcccgtgggtaaaacaaccccccgacgcccgaggttctgcagccacccccttccccccgctggcgacccttcctcacgcctgagtccagtggtccaggctgcgcacactgaccctgggggacctctagcgtcacagcaatcgccaggctggacgccctgagaagcacctcggggaagcaggacctcgacagggccctgcgggaggagaaggggaggagggcgcgagggcggcgggagctggagccagagagatcgtcggagcccagctctggagcttagggagccgctgccctggacctcgggactcgcgccagcgagcttttcctctcgagccaaaagatcgctttagcataaactgtctgagatctgctggcacgaggcatcctttcaaacacggtattttgcaagctgagaagacaaggggaagataccgcgggtactcggccgctcctaaagccaaaaagtgccaaggagccggacttcagatctccatcaggctcagcagaaccagggggtggagagaggggttggtctaacccctaccctacccggcgggtgggctacttacgtttttgccgtgggggagacttttccacgccttgttctgtgggctcttaaatgcatttgtatgcatttgtccgtgcagcaaagcgctaacggaaaacagaagccaactctgaactgcttagggtgcaggtactgtccatgaaaaagggaaaaaacaatcacatgaaaaccatgcttcaaacccgcaacaagaaaaaaaggaggggagggggtgaagtcgggaggaggtaggaaatagcacccgaaggggaggacaggcttcctagctctctggctcggtaacgaacgagcccagggttgcgctccccggggagggcgggcgaggaggtaaacctcactgggaggcctcggggcgccggcggcagcgggagccgggctgctagtgcagcactcaagttcacttgcggttcaaaggcgactctgtgactccagtggagtcctctgctttgggcctgggaggagaaaggggtgggggtagggaaggagatgaagtgggggaggaagtccttggaaacagcccgcgcccgaacgtttgtcaaacaagcacacacacccacttcggaaatcaagtcggtgcgagggggccggtggcaactgcaggcgctcggcgttgactgccgccggctgctttgcctggaagaagaggagccaagcaaatccggccggtgttaaatttcaccgctcactgacttgcaatgacatcaccaaacactgcgcacacctccccctctgcccccgcaaccttccccgacccagcgtccggcccaggcgcccccgttcgccagcccttcggggtcgggctgggccaccgcaccccgggcgcgctcgcctccgcctgggtacgacccggatggtctcctttcccacttataggcagctagtatccttccttccataccatgttcatgctccattccccatctcagcagtccccaatttgatgtttccctcttgcttctctctcatccccaatctttttctctacccttttcacccacatcttctgaaatcacacttagaggaggccttcattaccctgcgaccttcttgccttctttgcagttaggccagtggcctacgtggtattattaaatgactttaactgtcctcatttctacctttcctccctttactccttcctttcagtctgtcccccttacgaccttctactgacttttctcctgtaattcacctttctgccttttcctgtctacaagtattactggttcacagcaagagcacaccacacacactacagtcacacagtctctctctctctcacacgcacacaccactaccttaacaatttgaataccttctccaacttttgtagcaaatttcttcttttgatacaagtctctatgcccccatggccttatactaagaaatccaccttctgatttttgcaaaaacaaaaacaaacaaacaaacaaacaaacaaacagaaaacaaacgttctgattttatcttccttattaataagactggaaactccaagaggccaggaatctattgtgttgttcatagttgtgttcttagcacctacctggcatatctgttgaatgaatgctgcatatcactgagaatcattgctccaaatttttcttgtctagcctgtgtgccttccagagctaatgacccttccacatgctgaaagggatcccacattacacacacattataaaggttaaagtgatcatattggtgaatgacaatgattgatgtgactctcaagcttggtaattttttaaatgcaagaatatagaaattcattatgcccccctcaattttttgactgtttattttgaaataattttagattatagaaagttgcacaatagtacagagttcctatatatacttccctcagcttcccctaatgttaacaacttacataaccaaattacagttatcaaaactggacaattgggctgggtgtggtggctcatgcctgtaattccagcacggcaggccaaggcgggcagataacctgagatcaggagttcgagaccagcctggtcaacatggtgaaaccctgtctctactaaaaatacaaaaattagccaggcttgatggtgcacgcctatgatcccagctact

SEQ ID NO: 462 - DNA, 4001 bp, Homo sapiens
ggcttgcatggtgcccctcctcgggtacctagtagggcaccgtgagaccacagccacaccccagaggagaggccgctgtgtctctctcgttcctccgacccgacactataatttcctcctgccacggatgggaccagcgcatctgagaccccacttccctgtaagaggtgccccatccctgccactgagagttctggagcgggctggggggccagcagggcaaggaagctggggctgtgcgtcctttgttccggctcaggcaggagcagagaaggtagtggagtacaggggctcaggctgacagccctgcttagtatctttctcctccctcttgctaacagacacattcacttccatattttctttccccttcctctgagccaaagagcggaaattctcattttcactgtggtagacgaagtgaaaccagagaaagagaccctggtgagtgtgtctgggtgtgagcgtatgtgtgtgtgtgccgtcctgtctgagtatgtctggctgggccacgtggggcctgccatgtgtctgtaggagtttgggtgtgtgtgcatgtgtccgcctgtgtcttgtggtggtgtatgtttcattagaggagggtgtccgcatgaatctaatgaatgtttgggtcggtgtgtgactgtgcatggctctcagaagggtgcaaggctgtgtgtggctgggtgagcatgtctgtggtttctcctcattatcatctagggtcattgtgtgtccaagggtttgtaggtgttcaccagtccactgggaagccagtgacagcacctgtgccctgatggagaccaccaaccatggtgtctctccagagatcaccaactcctgccctgcggccccctctgcttggggcagtaaggatcagtcgatcttagctcagtccccagagaggaaccccaggctgcctgaccctccagccatccagctccacggcccccagatttttcaaatgcccagtacagctgctgggaggctgtccttgccaaggggactctgctaagaggagtggatgagcccctgctgccagcctgagcaagaggtactgatagcagacaggagggatgatttctggttgctccggcacccctaaggaggtcagccgcacgtctgtgtcaggaacccagcatggtctcacacaggcacacacacgtgcgtgcacacatacaaccagcaaagttttccccgtggcaatagcgttcctgggccctctggctgaatagcatttctctacctggaggatttccggggctagggtggctccagacccagggcagagacactgggaggttgttctggggccctgggaccccagtccctcttggccaggcagcggcccctcaccccctgcaagtctcagtctggagctggggggatgctgagcccctgacaggaacattcctgggaacttgtcttcagtttggggcgaggggactgacagggcacctagaataggaggaacctgggggctaaggcagaaaaaccttataactggaaggtctccagcaaatcagcaatggcagagagatgggggcaggagtgagagcggggggatgctaaggcccctcactccctcctctctcctccactaccctgtgaaggcggcttttttatccccactttacaggtgggacgggagatcgggaggtggtgacgcgcccagagccacatcgtcgggggttgcacccggcactgtcttatgctggagccctcgcttctgggagaggaagggaggagggggctttactgggatcctgccggggagggaacggggcacagggaacgggatgggctcccccattctaaggcgaccccctggcccgagtcccccaccgcgtccccaccccggagtccgaggcgccggccctgctatcccgcatggtgttgggggaagcccagcccaggtcttgccctcggagccccccagcccgagccccggtgcccgcctcctggcctttacctgcgggcgcggccgccgggcgccgctcccggccctcgagggcggcccgggcggcgagggctccgggcaggggcgtccgcggctgggcgggcggcgttggggtccggggtccgcgccggcggggttccgcgtcgctctgccggccgcccctcgcggctgccggagtgggcgggcggcaggaggggcgcgtcggggcggggcctccgccctcctctttccacagccacggccaaggcccgcgccccgcccggcccagcgcgcccagcgcggactcggacggctgcctccctccccgacacccacgccgagccccctccacacacgcgctcccgggcggcccgcccccatccctccccgtccacctgacccgcggctcggccgccggggagtccgcgcagcccctgccctcgaggggccacctgcctgtggggacggacgcggctgctgagaaggacggccaggcgtggtcctgcagggaaggggcagctcgggctggtggcccccagtgaggagtccccagaaggctgcctgcagacgtgacctcggtaggctgagcccggaggactcacaggggccagtcgtgacccgcacattcaggctttagggcattgagccggggtcacagaggcaggcgggagcaggccagacctcgtccctcggaaatggggagtcacggaaggctctggagcagggcagtcacgtggtcagatgtgtgctttggaaagagcctcccgaagctgtgtggaggaagatagaggcaggccaccgaggaggctgcgggaataccctggcatggtcccatgaggtgcacagtgagggggaaggaaagggagggcccagtgtgaggggagtgaggaggcgaactaggcagagtttgggcgaggggcctaggaagaagcagtgtcaaggacagtgcgcaggctttgggctaggcctgggggcggcagggtctaggagaagaaggaggacggatgtaatgaattggatgagcctgtgggacttccatggatccggaagggaggtgagagttctgggatagcgaggaggaatccacggtttgcagatggcgactgatgccatagaataaggagcgggcccagggaggcgggcagggcgcgggcaggacactcatcagcattcacggggctgcccagggagaggggtcggcaaaggagactgagaagatggcagggaccgggagagcagtgtcccagaaggcaaaggcagagtgcttctagaaggccagggaggcccacgggatgggctgtcacagaaggacattcttagggacagcaattaagggttggaggttggggtgggggtaggggcagtagccaggcagcaggggagaaaggaggaggcagcaagtgcagagggaaggggagatgaggtcaggaaaggattttggggtgtgtgtgtgtgtgtgtctgtgtgcgtgtgtgcatgtaggtgagtgtgggtgtctgtgtgtgcatgtaggtgggtgtgggcgtgtgtgtgcgtgcatgtgtgtgtgcgcgtgcctgtgtgtgtacgtgtaggtgggtgtgtgtgtgtgtgtgtgcatgtgtgtgtgtgtgcgtgcctgggtgtgtgtgtgcatgcgtgtaggtgggtgtgggcatatgtggaggtatgtgtgcttgggtgtgcaagtgtgtgtgtgcgcgcatgggtggggggtcagcatgtgtgtaggtgtgtggaggggtgggggtgtgtatttgtgtgcgtgtggggaggtatgtgcgtgggggggtgtggggggtgtggctgcatttgggtgtgtggatgtggctatgtggctttgtgtgggtgtgtgtggctgtgtgggtgtattgtagctttgtgtgtgtggctgtgtgggggggtgtgagtgggagtgtgtgtggggggctgtgtttgggggtatgggtgtctgtgtgtgtgggtgtgtgggtgccgctgtgtgtttgtgggtatgggtgtgtgtgtggctgtgtgtggggatgggagtgtgtgtgtggctctgtgtttgtgggtgtgggtg

SEQ ID NO: 463 - DNA, 4001 bp, Homo sapiens
gggtgaggggttgagtcgcctcctaccccacaaggaggggaaaggagaggagggggatgaggcctcgctgtgagctgcggccggcggactgaacagcagctccttgtctgtcggcggctataacgggctccgcatgtcagggctggtttgaggtttttgcagaacaaacggcgtccttgtggtgcgggccggcgccgcctattggcgacgaggggcactacatctccgggcaccccgaagtccccacccccaccacagcgctcacaaagttctcctttgtctgccgcctccctcccgccctggtctcaggttagagacttacgtcgatgccgtcggatccaggcactcccggcggtcccgggggacccggggggccccgctctcccggtggacctctctgaaaaacacacacggggtggggcagtcctcagacagtgcaggaagctgggcgtccccggggctgcaagcgaccctgggagcggggtcctaggggcgcagctcttccgcgaactcccacgtattgagaatcttctgtatagcaggcactgtgtgccattacatgcattcattatcttacagaatactcagaaccgggaggcgggcgctattacgggccccagtttgcagtcgaagaaactggctcagaacgtgaagggtccatggtcactgagagtgggcggcggcgccaggagtccgccctggatctgcccgactccttccactgtgccagtttgcccttgcgcggtcgcggtggggaatagatggagacgtggacagctcaaataaatcacagatggaatgtaaggttgtgcctagcaggctgccggccctcagtgagcggtggctcgggttgttgttcttacgtgaacgacaggcagagacagcgcctcctcctctccccatggtgcgggaaaacccgacgggaaagtgggggaggcgcagagaaaggaggtgtagggaggtgaagcgggtactatcttcccactcggagcgccccttcggcagcacagctgcccggtcctccctctgctaagccctgactgctgcaggggagcaggaggagccggcacctcccagaaagcagaccctctctctggatcccgtttgcctgcaattcaatgcccctgggtgggtgtgaggtttcagggaggtcacaagtcatatcaagatgaggcgagctcacagctggagagtctccatcctgctgcccatctctgaacagatcagagatcttaaaaggcggcccttttaagaggccagctcggacccaggcaggggtcccggtgcccacgacctccccaggccgcgaagtgccaggctggcgccccgcaggcgagctcgaaaccacacccagcacccgaccgggcccagtctctgccctacccgcgcgcccgcagcccccggcggccctcggaagggagacgtgggtaggcgggcagggccgagaggccgcctcggggcgacagcggcgtctggttggagccggcgccccctgggaggcggcgggggcggaggctgcgcagcgggtgaatgagcaccattgtatgccccgccacctgggctccccgggctgccaggaccgggcgccagctcctgccccacgctgcctgtcccgggccgggccgcgcgtctggggacgggtcccgtttgactctccggctcagccacctccattcacggtgccgcgatgggcaccatgtatgcacccaccgaggggacctgcccgcggcgctgtcctcaggtggcctctcgggctaggggtgtcagtaggcgcgggacacaggcagagctcctccatcccggactccagaccccgcaccctggaccctggcagcggaggggctgcgaaacttacaatctgcgccagagcgagcactaccacctggaggagaacaaggaggctgcggggggaggccgtagcggcggccatggctggcggcgagaccaagggggacgggtgcgtgtccgcgcacgcaccgacggcagagtctcccggcgctcctccagcgctggctgttcgcgggcagggtgggctggggctcctgaatatgcggggggcggggcgggggccggcgtgagctgtcacctgagaggaccggcggggttgccgggagggaggccggcgccaggcatccagctccgccccgctcggtccagcctcctgcgcccaccctctgtcctcgaggggcgaccggggtgcgggtcggagatgatggtccagtttctttgtgagaaggcataaggccgtctgaggttcccctcgggaccttcaggccccagcaccttccccctgacgcacagcctgtgccccatcacttaccctacgtcctctccagggcccaggccgagagcacctcgggctctgcagatcttgctgcaggctctccccagctcccgcccaccttgctcccctctcctctggctccttcctctccaagcacaaacaaacaggccttttccatattaatatgccacagtccttcctggatcagccgtctcatgaatactccatcggcctcttccagctctttagtggagctgtgtgcacctcccccacccccgaacttcctcacctcgctttcacctccctactctgtcccaacaagcaaatctgtctcctggaggtctgcagtgaagcccaacccttcttcggtcctccaggcaggaagctgttggcatcttcacctgcccttgaagtcttccccatccaagctcctgccatccagctcccctttttctattgcctttaattctctgcagctgccttaagcactggtgtgtttaggattgggccttctcactccatgttcatagaaacaactaccactttattcaccagagtttccgaaccccgctgtccagcatagcccgactccagagagccttcccttccctcccactcacttaggcaatattggtaaaatgctttggaatctgactttttcacaattatagatatgaccacaggcaccccaaactctatgaagtctcattttcctcatctgtaaaatggggatactaatagtccatatatatatatatatatattttttttttaagacagagtcttaaaaggctctggagtgcagtggcacgatgtcagctaactgcaacctcgcctcgcgggttcaaatgattcccctgcctcagcctctcgagtagctggaattacaggcatgagccacaatgcctggctaatttttatatttttagtagagatggggtttcgccatgttggccagactgctcttgaactcctgacttcaggtgatctgcctgcctcagcctcccaaagtgttgggattacaggcatgagccaccgtgcccagcaaattgtccttatcttaaagggtttttgtggaaattgaatgagatgactcatgcgaggcatttaacctcgaaccagcacatagtaggtgcttgatacattttagctttccttatgatttatggatgactgttttactaggttggcatccaatgtggggaagctggccacaggcagatcagctaaaatgatgaacctagttgaagctagaaaagtccaactccattgggcaggttagcaaagggctctggattttgaaaggttgtcctggagctgagtttgggagaaagagcttgagagaatgtaattgctctgcctaacagagtgaagaagaatttgaagtttgttggaagatgagagcaagaggaggaggatgtaagagagggatggtgggcattgcttggggtgggtggggtaaacctataaaggatttttagaactgggatgtccaaattcaattttaagttgtttgtttcacatcacttatctctccatcttttgtgggctaaccacaagaaaggccttgtgtgagtaagttttctttttgtgtgtggaaattatggaaagaggatgagtttcacagtctggacagcacacattgatgtattaattacctgttgcaccataacaaatcaccctaacattcagcagcttaaaatgacaatttctttgg

SEQ ID NO: 464 - DNA, 4001 bp, Homo sapiens
actaaggtaactgatatgtgtgaatttcttttggtaccgaagtggttaaaaaaaaatccttccttctggtttaaagcctggctgtcccagtgctctctttccacataatatgcccttctccgccaggcggtcacgtatggcagggtatatagtaaagcagtgtacagcacagagctgtactatatcacatgtttgctttcgcacctttgcacctctcccaccaggtactctgaggctgccaattctagctgctgcttttactcctcttcctctctttgcccaaccgctgctttaaggatgtgtctcgcctgagaacagctccctttatcaacacaagacagaaattgctccagagtgacctgggctctgtcttcctcagggggccagagtcttcttgtccgagtacctacctgacagcacatctcccctggccagcatccacctccttgtcctccacaacccactcagcggctaacctggccaccaactaacttctcgccctcggatcctcgcgtttataaaaggtgcgagacgaccaagttctacaaggtggggcgggcaggcacccgcacttatcccctggccctccccgcagcagacacagggaccaggtccaagcttctttcctccggggacaaaacttggctgtttatctttcccagggcatcttcgtctctccccgggacgtggaaccccgatgcaccggcagggacagcccggagcgctcgcaggagaccaggcccacggtggtgccatggttgggcacactccgcgggctccgcccaatctccacccctaggtccaggtccccctaggagagctaggagcacatttccagcctggagcaggagcccggcaccggaaagtcagagcagcgcactgcggcgccccagccactgcggagcccctggccaaccgcagttacgttccatctgtcgtatctacatgggaatacggcgacaggcaccctatcccctcacgtcagggctagcagtatgaggtggggaaagaggaaacctcgagagttaaaagcgagggaactgaaagtccccttgaggggtgtcccccatgccccttgtgggacaaagccccaattcgcaggctaccctccagagctccagcggtccggttctccccatcagcaccctctgcgcacactgacccgcgcgtccctccgcagcctgaccgcccgatccgccagccaccggcgcgggcagcgagggggtgtgtgcgccagattttccgcgtgcccccccgcccctccagcggctccctcgccctgcagctgctgctccgggcgctgtccgcgctgggcaggccgcccccgcgtcccgccgcggcggcccggggcccgtgcgcgctcaccagatggccatcctgctcttggggtagtccagccgctccaggcagccgaggaagtgcggcagcgtgtgcgccgcgttgcgggcgaggaccgccacgagcaccgtggggctctgcaggggcgactccgggaaaaccaccggctcctctccgtcgtcctccgagtcccgctcggcgacgaagcgcgctcggcagccttcgcggagcagggctgaggagaggagcagtagcgaccaggcgagggtggcagcagggcgcgcagccatgttccgggccgaggcgggcggcggggaagtcctggcgcgagcgcccggctgggctgcctgagggcggcggcggctgccggggagcaaggggctgcgaggggcggccgggggatgcggcttgccgcggccggccggctcacacactggcctcggcggctgcggttcccaggaccctcccgccgccgctgcaccgcccaggccccagtgcgggtgcgcagcgtacctgcagccgctggcgctcccctgcgcctcgggctcgcagacagtagtggccgaggggctgtgtgccctgagtcctgaggaaagttcctctagtccaggttccgctcgtacagctgaggtctgtggccttccctagagccgcgagttgtggccctgtctgccaatgagcctgtgagtgtgtgtgtgtgtgtgtgtgtgtgtgtgtgtgtgtgtacataacggtacaaccccaagaaaatttattctgcttttgcaaaccgcagactgaagcccttcacagtgatgcaatgtatccagttttcataatgcacctattgactgagtagagttctaaaatgaaaagtctccccaactattcacgattatgacaaacacttgtttaaccaccgcaaaggcagcatgtcgcattttcttatatactcaacttctgaaattcattcttgactgagtagacacctaataacacaaagtttgaagacttggagaattttggagccagatcagaccccgcaaaataaaagaaagcccttgggagacactgtcctgaagcctcactctactgtgaacccagtaagcctcctcacaggagggctgtgaaagaataaattcacttagctggttttctttttccgtaataagccaatatgatagagtaacaaagagggaaaattcgcgcatgttggagagcagagaagagataaggaagaaaagaaggggtgaaggaagaacacaattagcacataaaatgaaactgctggcatacactgctaaaggagatttactttttttttttttttttttttgagacagggcctcactctgttgccggggctggagtgcagaggcacgatcacaattcactgcagcctcgacctcctgggctcaagcaatcctcccacctcagcctcccgagtagctgggaccacaggtgtccatcaccacgcctagctaatttttttttttttttttttttttgtagagacgggttttcaccattttgcccaggctggtctggaactcctgggctcaagtgatctgcccaactcggcctcccaaagtgttacgattacaggcatcagccaccatgctcggctggatatttagttttgaagatatattgtgtagcctttgatagataagtatggagggtgttttggtgccagtgcacattcatgatctccaatcccaactcaccctcaggtctgtcccatagtctttttattagttgttatcaatccttctcagcaactattagaagtcttccctactgtcttttgaagtatatcacctccttcatccagctcccccaacaccactgtctccaactagcatccctaccaagacctttcttacttgcaggtgcctcctcacgacagggtctttgatcacagactagaaagggagaggtctccctttctagcccatgatttttctctatcattccactctctactgaatcttcaactgatctctatcaactcctttctctcaagctaaatacttggtcagtcttctcttatccgttaaaaaaaaaagaaagaaaagctttaaaaaaaagtcctgtgtcttcttctagtcatccctttgcttgaccaagctccttggaagagagatctatacttgtattctccacttcttcatctcccatctttcccaccacagtgcagtaaggcgtcagccctccccactgttctgcaaaaccaacagatggcctcagcattggcagattcagtaaactcttccgttctcaccttcctggacttcgattacataatctcccatcctagatctcctctgatactacttgtctctgagccaagccccttcactgtgtgcctccctatagtgtgctagtcttcccactccatatggtctcctgtggttatatcctcaaaatctatgtcttctgctctaatctcttctctaatcttcatatttttttatcgaatggcctacagacatttccttcccctccatccattttcaggaattgttcccactttcaaggggctcacagtcttgtagggaagactgagagttaaacatctgttagaagtactgtaacagatgtaccagctacagtgaagggatagaggaagatgtggtcatttccacaagggaggtagtgatgggactgttagaaaggtccag

SEQ ID NO: 465 - DNA, 4001 bp, Homo sapiens
atatagtttaaatgtaaaaacactgtatcaatatacagtctcatgaagtttatggaggtgcccattttgcacacaggctgctatcagctatttgttgttttgttttataaatctaagaccctccccccaaaaaagtaacttaactttttttttcttgcatttctttcattactagtgaggtggaactattttaattatttattgaacatttacaatttttcttctaaattgtctatttttccattaggttcttttttttaattatgatatataagtacactcaacaatggatgtttgccctcaaatattatgacatctttgtttttccttctgtactgcccagcaagaaattaggagcagaaaagaaaactgaaagattatgaagacccatttcacatttcacctatacaggtctcagaaattcttaatggtacccatctttcaaggtcaagtttcccaagagacttagaaactgctcagaatatattcacacattgataacaacctccagtttttgagctactgagtctacaccaggcgctgtaataaatacactccatatactttctcattttaatactctctataaaagacgattttacagatgaggaaatacagacttagagacattaagtaagtcatccaagtcacagcttgttagtggatgtctcaggattccaaggcaagcccatctgacttcaaagaccaagttcctaaccactttgttacgctgcatctcactaaatattctagatactattttttccaggtcttcggagaccttacttctctgactttcacattctaacgttctgaggctaatactgcgatctcagtatttgccctccacccccaacgacccacactcgagctctagagctgccgtacttagcaaataaaaatacgagatttccagataaatttgaacttctggtaagcaacgacagactaaaaaactattcattgtttacctgaaattcaaatttaactgggtatcctgcattttatctggcaactctatcaagttgagactttattggggttataagcctcaagtactatttccgggtagtaaataaagccgaatggaggcactgatgttgagatgctgcagccaaggcctccttaagtgaggttgccactactcgtctccaaaaaggctactgactcgggtgcgagtaacagagatcgagactcagttcccagggccactccatataacacagtcatcaaaaagccaacagatcacagggcctttggagcagaacaacacaaatcgggagcacagccaagagagaaagggggaagaaagaatagggagggggtctaaggaatcccctgcagtgtgggagccactttataggtaaatcgaagcccaaggacacaccaaagaagaggggactggagaaccgctagccaggcccaacctctctcccaccctccgtcttcctccgggtccgtctggtgggcccatttcgaccaacacctctacccattttctcttccccggtgtcagcgccgctcctgacatccaacctccatgttcccccttttattctccactacctttgacccgcgcgctcttggtctcgaatttggttaacatctctcaggtctccgactccgatgtcttaatccgagccccgacacaccctgctgcccttcggacgcctccacgtcagcgaccctctcccgcggtttccggaagcgcctggaaacacgaacttccggtctcttaggctccgggccacagagacggtgtcagtggtagcctagagaggccgctaacagacaggagccgaacgggggcttccgctcagcagagaggcaagatggctacggcagggggtggctctggggctgacccgggaagtcggggtctccttcgccttctgtctttctgcgtcctactagcaggtgaggcctccccgcccgtgagctccgttctctaaggggaactctcggatcggccccgccgcgaccgccactgtctcccttctggttcctgctgcccctctgtccccccaccctgtaaatcctctttctttttcgttcccacgacagaagttccccctttgcctggacctgaaggtcccttctcccccgcagcacgtcgtgtcgcttcactcccttctctaggcctcttcctggacttcgagcctgaccctctcccactttgtccagatgtctcgtttttcccacaaccccagccacccaccccacagtcgaaaggaacaggtgtgaaagttagctttcttcctcgcgtttagactttttgagacgaaagcaatcttgttctgtgggtgctgtgcggcgcttaaaaggtggatttcttatttcttcctctgttgattacatcctaagtctgtgtccccctgccttgcctcaggttttttttttttttttttttttaatcagtaaagcaagaataaggtaggatatgggtactcttaactgtgaagaccctgaagtaacaattcaaggaacttttggcatttataatgtacttaagtgtttgctgatacgcgttcatttactgatacatggctttttagttggtcaagccctaaaatgcaaatgcctgtatataactatgactgtgccttcccccaattcacattgtttttaaggatcctcaaaggagaaactacagctgccccacactgtgggcacacaaatgacctgctgatgttaaattaactgacccgtgtatgtcataaggtttctctcaattctgttcacactcttggaaaaatgcctcagaaagttttcttagcccagcacctgtgtattaaccaattagtaatatacatacaggatatacaagcagaagtgtgatcacctgtgcaaccagaatctggcaaatctaaggtcaaacacctttcctttgaccaagttttctctcttttagtgtcactgtcaatggcgctacatggactttgtaataaccctttgaggcacatagctgggtgccatgtagaacatgtatctgttacgataagtgtgtgcccaagaaatcagaagaatggactttaatctcattttagaaagtatgatattaaatgatttacccaagccatacttcaggttaatgacacgatagaagctagtacctgtgtctctcaaatttttctaacactttttatcttccgatcaggtttgtgcaggggaaactcagtggagaggaagatatatatccccttaaataaaacagctccctgtgttcgcctgctcaacgccactcatcagattggctgccagtgtgagttgagatggattcatgtttgtggacattgatatttgtctgtgccctagatactaagtaacatccatgtcctgcttaggagatttgacacttatattggactgtatgtaggcagttacagataaccgtctgtcaagctaggcaagataattaataagaactaacatttagtaaatgctgcataccaagctttttacatgtgcatctcatacaaccccaaccacaaccccacaaaataggtcttactgttattgtcactttataaatgatgaaactaaaacttaaagaagttgagtaactttcccaagatcatactggtaataagtgatgatgccaggatctggtggcccgagcactaagctgagagaccttttttttttgacacggagtttcactcttgtcccccaggctggagtgcaatggcacgatctcggctcacggtgacctctgccttctaggttcaagtgattctcctgcctcagcctcttgagtagctgggattacatgcacctgccaccatgcccagctaatttttgtatttttagtagagatggtgtttcaccatgttggccaggctggtctcgaactcttgacctcaagtgatccacccaccttggcctcccaaaatgctgggattacaggcgtgagccaccgcacccagccgagccagcactcttaaccaccctattatactgttttttaaggagaaaaaagtctcatattctatggtgtccag

SEQ ID NO: 466 - DNA, 4001 bp, Homo sapiens
ttggaatttaaataacaaacacttttcaaatgacttgggaaggaggagaggaaagatcactgctgcttaatacattttattcaggtctgtcattacacttgcgtgagcattcatgggtgaggttttatttgcaggaggagaaggtcttccagaagaagttcctgcagggcattctgtcccggcgcgcagattgctgggggggtgcgccttcctgccgcctggccacctcccgggcttcctctcctatgaggggcccggcactggcctgggaggtccactcaaaccaccaagcgaggaaagtcaggaggctgcttttccttattcctgccgcttcctgcatatgcttttaaagagaagcagatggcaaaggaaagaaaactcagcaatctggctcaggcagcaagcattcaaagatatgcaatctcctccttacttaaaaaaaaaaatgatctaaaagactaccctggagaaaagagaaagaaaatattaaaatgaaaagatgctccatagcgataagcctcatttccatttaacggatgaggatgagaaagtgaagagaataccttaaagaaattgctttaattagagaaaagttggtcattttaagtcaagggaagaaacctggttttgctccatactctgctaaggtccttaattaggagaggtcgggaaatctgccattttcccctcagtgactggcagctgagaagcccggagttggatcaggctaatttactcattctcccacctttggccacactcctggatgttcacaagttgctttctgagacgatgggactgaaacaaacgttatattctggtttttcaaattccttagaaagcttctgggagtaatctgctgataaatggcctgcctgaaactcatctggtaattttagagaaaaatccatttttaatgctcaactttatataccctttcttggaactttctcaaaatggaaaaaagaacaatcaatcacctcacgaagttacaaattctcacaacggaaaatgtaatgatgccaattactctgagccagtgggagcctgtgctatgtataactgaaggctctggaagggctgtcgcagctccatgcctgccctgcagtggacgggtacactcgcttcccctttcccagacacccgacggagggccctccttgagctgcacaggtttccagcaggcttcatgggttgggacatgtaactgaggatcagtggtctgaatgcggcatcccagtacctcgggccagccaagaacactacaaagttgagccgtgtgtcctgtccaagctgtgaagtgcaacacacgtgcacacacacacaccatgcaggccaaaaagccaacaagagacagagagtgggctagcgtgtggccacgtcgggactgtactcacctcgctgtctcggccggtggggccaccctccaggggcagggcagcggtggccgtggccccggagagcagcagcagcaggaggccgggggacaatggcatcttgtgggctgactggagcttctctcccaccctgctgctgctcttccttcctggcagccctgaaatcaatgttttggggacttgggtctcttctttggagcttggtgggtattttaagcccaatctccagctgtttttgtgtctatacatgtctaacgcctggatcctcttccctcttccctcgcgcagtgacgcagaagctggagcaatcagtgcccacaaaagcgctctggggttggatgtaaccccttaattaaagcttcaggtcttttcctgtgtttagagcgaatttgctcttattttggaacgcatgtgcgcttgcttctggagaagttctgcttcctcgtaattatgcctatagcaggcaggaagccgtgagaacaaaaacaagtgatttaacataatataaaattagcctaggataaggagcttgaatgtgaaattgtgcccatgtgaaagtatgactgaaactcatccagtaatttcagagacattcttctactatgggcagagaaacaaggaggcaatgggggctcagagacgctacgatcgtatccgctggtttcacccaattgtcggcaaggaggccccaagaatcgctcccagtactgcctctcagcccagcatgccagacccactgtcctctaggccaggccttctcaaactgaagtgcagacggatcactttgcaggcaggtcctgatgcactggggcagggaggagttgagagctgcatttccaacaagcacccaggcactgctggccctggggcagccgggctctggcccacccaggctggggtgcaatggcgcgctcaactcactgcaacctccgcctcctgggttcaagtgattctcctgcctcagcctcccgagtagctgggattacaggcacccgccaccatgcctggctaatttttgtattttttgtagggacagggtttcaccacgttggccaggctggtctcgaactcttgatggtccagtgttttctttttttgagatggagtctcgctcttgttgcccaggctggagtgcaatggtgtgatctcggctcaccgcaacctctggctcccgggttcaagtgattctcctgcctcagcctctcgagtagctgggattacgggcatgtgccaccacgcctggctaattttgtatttttagtagagacggagattctccatgttggtcatgctggtctcgaactcccgacctcaggtgatccacccacctcggcctcccaaagtgctggaattacaggtgtgagccactgcccccagcctggaccagtgttttctttttgtttttggatggagtctcgctctgtcacccacgctggagtacagtggcatgatcttggctcactgcaatctccatctcccgggttcaagcaattctcctgcctcagcctccaagtacctgggactacaggcgctggccaccatgcccagctaattttctgtatttttagtagagacagagtttcaccatgttagccaggctggtctcaatttcctgacctcatgatctgcccgccttggcctcccaaagtgctgggattacaagcgtgagccaccgcgcccggcctggtccagtgttttctaaactgctcctgaccacccacttgtgggtcataggccagtactttcctttcgaatgaaattaaaattagtgtgcatcacccgtagtaaggataaataatgattcgcattgtgtgtgtcaggtgtgagatgtgctgttactgcagggcacagtcagtttgggaagcagtgcccggccctgcccttggccagctcccagggctctctctcctcctgaggctggcaccactgctgagagtgcagaccatggagtccctctctgtgccacctgctggttcttcctcacaggccctcattgctgaatcacacagacaaatgcacagacccctttgcccaacgagacaccgagtaaaatctgaaacatccacccaaacctgctacagatgaccagcatccaaggcaaggctataaattgaggtaacgcaacccaaaactgccggcactttctagaagtgaacatgtttgttttcagttttccaaagtcctggtttacaccttcagcagggaaatctcaatcttgaatttgtcacagtctttttgcttatgttaaaatcctaggtaagatcagcatggcctgctggccagaggcttatacatcgtatgttgcttcatcttttatttattttgttttttgtttttttttgtttgagatggagtcactctgttgcccagactggagtgcagtggctcgatctcagctcactgcaaactccgcctcccaggttcacaccattctcctgcctcagcctcctgagtagctgggactacaggtgcccaccaccacgcccggctgatttttttgtatttttagtagagatggggtttcactgtgttagccaggatggtctcgatctcctgacctcgtgatccgcccgcctcggcctcccaaagtgctgggattatagg

SEQ ID NO: 467 - DNA, 4001 bp, Homo sapiens
tgggctgttaattcatcatagcttctattaatttaattagctttttgatgggctctgataggtactactgtttcatgagcaatttttgtttttttggcctcccacctctgactgtgctcggtttgaggcttataactatcttcatttcaacaactacagtattgttttgctacttactgatgggccagttaaataggtcaatgttgatcctcttttaagttttttttttttaatttccaatggattaaaccacctttatgacctttaaaaacagcagttatctcctaccaaaagtcccattcaggattccagtgtttatcacaaaactgaatctaggatttactgtgtgtatgcaaagatctttttttttttttaaacactaagcttattccagatgggcagtgtatgggacagtaaaaacagataaggcaccagtagtacgtaaactgacaacctgttggatattaagtatgaaaacaatttatacaatatttgttaatattaaccatatgatctgatgtcatggccaaatttggatggaagcccaccagagaagcaagcaagagcaagaagtgagcagaatttccaagctgggagaatatcttaagtatatattaggagccatttagcacacagtgggtcttctataaatatttgctcgtgattagccaatgttacgatctccctagtttatattaaacttttttcctcttgcattattcttttctgaatacctgttctgccctgaggatataaattaggttccctgctcttaataaggagcccaggaaaagaggaaaacaagatcatttattaccttccaatatgataaatgtaacgacgtacaagatgcctgggaagatggggaaagtacgtaagtcagctttggtgaaacacaggagcccttccagggagagcgcttggtttagctttactataccaagaatttgggttttatccttaaagagataggatgggctgctacgactggatgttaggcagaggaatgaaaactgtccagtttacaggctggaaagggccagcggacaatagtggaaggtggattcaggagagtatggagacagggacaccagctagggaggctactggtgatggggaagaaatcttaacccttcatctcatcgtagtacaatcaagtcatccctcagcaattactcctatgttaaatgtgatgaatacaacgtgttaaagacaaggcacctgtcctcaacggagctttaatctctactattagcctttactaacaaattacagtgcagtgcccttagcagcaaaattttctcgccaaagattcagtattgttagcttatttcataatgacctgtagtaagtcattagtactactggtcccctcctccccctagttttggtcaattttgtcccggccacttagattaaaatgttggaggcttgggataaggactaggaacagttaaaatagtttcaagcccatgggtggcagagaagccagtgacacgtgctccgggcctaggagctccgcggagaacgtccttacccaccgcccacccgcggcgcgcgccccgccgacccccaggttaccttcctctcctcgggctcaccgggctccggcggggcggccatgaggactactccgcgactccacccgccctgcaccgccggggtcgcggaagcagaagcccggctggccgcgcccctccccgtcccgcccccacgcgccgccgcctcccgccctgttccgacgcgccggccgccattttagggaatgttcctaacgctccgcagtggccgcacggggccgggctgtcatgtcctttgttccgtcgaacgggtcacactttcttccaagctcggcacacagcctgcaggggcgggagagcggaaggagatgggttcggaaaacaaaccgactcctagattcctggcgaggtgggggcgtaaccgagccagacagccccgcttcccgcgccagccccctgctccgccccaaccgccatttctaaccgtctccggcgcgcgtgctcacacgcacgagcctcgggcgcgcgccgaggggcggggccgctgctttgtcctgcggggtgggccccaccgcgggggtcggcccggccccagcccccagcccgccccagcccaccgacccggaaggcgctccgcgctggctcggcggccctcgtcccctaagtgtcctttgtccttccggccacgggacgagcccttggtgccggggcagccccactctgcaccagcagccatttagtcccccgcgcctgccttgcgcaaacggggctcccacgcccaccccacttcctcccttttatagtttcattactaagtggctttaacatagaaccgcgcagttcgcctaaaggagactggggacaaaatggagggagcagctcgctaatgaacatgcgtcagcacgttggtgtccgcggagagggcgcgcgtgtggcgaagtcttccggcgtccccgaaggaaaaatgcctctgcaacgtgcatttttgatgtgaagtcgtgttccacgtttcactcctccctaagactgcgacataacgtgaaacaaaatactgcatattgtcgagctcaatggagaacgcgtgcatgcagggtcgagcccatttttcagccatcaaaataatacaatgcaattttttctagtatttataatttttcccctttaactttatgcctcctttatgtacttctacatttcacgtttaggttatatgtaacctaagggcactccttaggaaactggacttgtagaatatgtcattgtgcaaagtcatgctgcttcgaattatgctgcgcgctggcacacagcaagcgctcagtgttaacgatgtcgaattcatattaagtactgttcattgggcgttttcttactccgtaaggaccttacttgcatgcccatttgatacctttctacaatcccagtaaaatacacagttaaggttgtgtatttatgtgtcacatttttttttttgaggtttttttttgcgggggcggggggggtttttttgtttttgtttttgaaattgtagttagaaactacatactgtgccgggcgcggaggctcacgcctgtaatcccaacactttgggggctgaggcgggcggatcacgaggtcaggagttcgggaccagcctggtcaacttggtgaaacctcgcctctactaaaaatacaaaaattagcctggcgtggtggggggcgcctgtaatcccagctactcggcagcctgaggaaggagaatagcttgaaaacggaaggcggaggttgcagggagccgagatcgtgccactgtactccagcctgggagaaagagcgaaactccgtctgggcggggggagaaactacatactgctctactgtttgctagggaaaagaaaaaaagtcaccctactggtgatatcctgccaattctggattctctgctgaaattataatgctaactatgctttgaactccggatctgaaaggccgtgttgaaggtagtaatattccatgaaggagggggaaatccttttgaagtcattgttgattatgttgtaaaaggaaaactggaaaagtaccagctaaaacaccaccgagtcatcctattttatttttattatgactttgaaaatttgctagagtagacattgttggggtctatttcatttgtctttgaaaagtattttcataaggatgatttattttttattttttattttttttgagacagagtctcactttgtcgctcaggctggagtgcagtggcgcaatctcagctcactgcaacctctgcctcccgggttcaagtgattctcctgcctcagcttcctgagtagcagctgggattacaggcgcctgccaccacacccggctaatttttgtatttttagtagagaaagggtttcactatgttggccaggctggcctcaaactcctgacctcaggtgatacgcctgcctctggtttccagagtgctgggattacaggcgtgagccactgcgc

SEQ ID NO: 468 - DNA, 4001 bp, Homo sapiens
ggcagggtgggtggggggaccggcggtggggagggatgggcagggtgggtagggggaccggcggcggggggggtagccacacacaggccaaggcgtgggagtgaccccaaggacacagcagtggtccagtgagcgcggacacggagcccgaggcagtccctggtgcagggaagcggtgaaacaggacttcggctttgatgataccttggctgaggtgaccttgagaatatacccaggtacagattgcgggtaattgaagccacatgaaagatcagaaagatcagatgtccagagagtgggcagaacaggcagccaagaggccaaatgggaaaggggcaggctgggaggaccccacggaggacccagagagcaggggagggcagtggggcccatgcaaacagctgcaaaatgccatggggtgtgcacaggccaggggtgttcacagcacagtgtccacaccggggcggggggcaccctccgaggaagcgctcacgccatgggggaggacatggaatcccgtcctggtgtctgtgctggaaggtgccctcgaccccctgcccggtggaaggaccaggttccaggacagcacagggcaggcacctgtggaaaacgctaaggacatcaggatgactggccaccaacaccatgtccctccagctgtttctgagaccctggattttgactaattttttccttcttcacatcgttctatactgttacgactttgactttcttttgagacatggttttgctgtcacccaggctggagtgcagtggcacaatcatggctcactgcagcctcaacctcctgggctcaagcaatcctcacaactcagcctcccaagtagcttgaaccacaggcacacaccaccacgccctgccaattttagcattttttttttttggagtgatggggtcttgccatgttggctaggttggtcttgaactcctgggctcaagcgatcctcccacctctgccttccaaagtgctgtgattgcaggcgtgagccacagtgcccagactgtcaggacttttaggagtacatatttgcgttttttgctatttttttcagtgttgcagaaatcaggtagaacaagagctaaagtgagagttgattgtaactcgggcgtgagcacacagagtggtggacagaaagcaagacgtgaggaggcagaagcggggctggggggctgaggggcttgcggggttaaggggcttgggggctgggggactggggggctgaggggctggggggctgagggtctgggggtctgctgggctgaggggctgggggactgaggggctgggggactgagggtctgctgggctgagggtctgggggactggagcgctggggggctggggggctgagggactgaggggctgaggggctgggaggctgagaggctggggagctggggggctgagggtctgcggggctgaggggctggggggctggggggctgaggggctggggggctgaggggctgggaggctgagaggctggggagctggggggctgagggtctgcggggctgaggggctaagggactgaagggctggtagggctggaggcggcagcgcgcggcacggggaggtcaaggcaccgacgaaagcgcacagcgagcgcgaaggccccgcggccccatctgcgacgtcccctcacggccgcctgaacctcggggctcgcgttctcgcgtcactgccggaggcccggggtgcagggactaggccgcctctcggctcccaccagggcccgcgcggggaggagaccggaggacgcccgcggcgcgcacctggctccacgagaaacgggagggagcggggcgcccagcccgcccggagccgcatacggagcccaccccacagccctcccggcggctcccactcacccaagggcgtgactctgatctcaggcatcgtctccgccgcgctcccggacccgcgaggcccgcctgcggtgatgcactgcgcaggcgcaaccacctcgctgcaacttccggtgcgctagccggaaacgcgggtcggggcgccgggcctcctgattgggcagcatccaaccaatcagggcggcgggcgagggcggggcgagggcggggcggtgggcggggacggggcccgcacggcggctacggcctaggtgagcggctcggactcggcggccgcacctgcccaacccaacccgcacggtccggaagtcgccgaggggccgggagcgggaggggacgtcgtcctagagggccggagcgggcgggcggccgaggacccggctcccgcgcaggacggagccgtggctcaggtcggcccctccccaacaccaccccgggcctccgccccttcctgggcctctcggtggagcagggacccgaaccggtgcccatccagtccggtgccatctgaagcccccttcccaggtgagactcgtagcgctcgctcgacagggtctggtcccacccacaaggcctggggcgccgtggggccccgtctcctgctggccccccagcctgctgtcagcccccgtgctctgtgctcaggccgccctcgcgcccggccctgaccttgggccgttgggctgccctgggaaaggcctggaggtgtcctgggtcaccttcctgggctggcaagctgcctgcctcctgcacagccactgcccttcctgttgttaccgagccaccagccacagctctgagaagctcctggcagcttctgtttgccactggctcgaatctgggcaggaaggcaaggcccgcagaatatctggtgaccaagaaggaaaccccagagcctcagagaccatcttctcagtggacaaaattaaggcccgaggaggggaggggcgtgctggaagtctatgggactgcatctttctgaggcccaggagcagccatcccccacacctgaagcccggtgagctcacatctggggcctccgcctggtgccaagcatgcaacccaacctgtggggcctgcaacgccaggcttcagcaccctgcaggcaccagtgctccagcagcctgggccacgggctgggcagggcttgcagcccatgatccctagtgatgaagggcccagtcctagggtgctgagcaacctgcccacctgctcctggccaggagctctcaccacggctgggtgcccttccccctcccccaccgatggagtccctgcagccagggaggccaggacagggctcccagcaccaaccggcctaggaacccccaggccctcttcctggtcgaggtggaatgcagctgactctcaggttccccagagcaggtgcgggcccgtggggcacccggggagacagggcaagggtgcttggcaacactcacacaaagcatgggtgcctggatgtctgtggatctgtggagtgactatgtgaatgccagcagaatccaaagcagggcctgggccactcgtggaaggctccctagggctagtacaagagcctcgtggcaatcttctgagtggtaaaacccatctgtgtgggacatggagtttcagcaacaggagtgaaaacacgtgtccatccatccagcaagtgccagccctacagcctcttttctgcttttggggatgtagcagtgaggaagatggggcagcctgcccggcagcatccccccacccccggccccacctgtctctgctttctgctgtgtctgttttcttgtctaggacttcagaacttcctgtctttgttgtcatctgaccccaccccagatggctgctcgcactccccatgcacccagatagatggctaggatggtgcttggctctcggcaggggcttagtatttctccagctggtaaaagcagatacagcatctagagagagaaacaaaaacaagaaagcaccagcagagacacctgctgcagacagcggggcctagtggtctgataaagccagagggggccactctcggggtcagggactgacacggagtcagtggcctgatccacaggaggggctgtgccaaggtccctgaatgcgcaatcctgatg

SEQ ID NO: 469 - DNA, 4001 bp, Homo sapiens
gatgtttgcacaaaatgtaatttcacaagaatcactcgatcctcctgagagggtgagggtatgtagtgatgacgttgggttaagtggtcccagatgcagagaaaaacaacccagcagctcgggtgaggcctgtgacacaatgttccacacatggggaagaagcctggcctctagctcttggagtgtggggaatccctgagggcagtttggtgagaaataaggtgagaagggtctttgagacaaattttgaacttggctccaggaactgagttactcactcagtaagttagaagttagtttaggtttggtttagagggtgaagaaaatttctaatattgaagaaggagatctggcaactcagacgaaagcggagttcgaaggctggaagaactggaagctggatttaagaaagtactgggggagggaaggggaagaggatttactagggctcttttcagaggggaagtcgattctgggtgaagtgtttcgaaggcagggtagccagtggtgaggaggagaagagaaatttgggtggaccctggatctgagtatgatggagtgtggatggggtactgagggtggtgtctagaattctgtgagggtgagctgcacttacaaggggtactgtgggtgaggaaggatattttgaggggaggaacctgttgaggagggcttggagagagtgaaaggtttccgggtgaacactggatttaggagattaaagatttaaaaacatgggggagggtcagttgaggacaagggtgaacacttcagggctgtgcttgtgggggctcatggggggtgaaagaacagagtactggagaaatgggaggtggggctgagggtcctgagtgacaggggtgaaggcggtgctgggagaagttaaggaatggtaaccatgatgtattaggaatcagcctacccatattccgggtaggaatgtgaggcagtcattaaagtacttcaggagacaccatagtcgagggattacagcggcgctggaaatatgcaggtctggcatttttcagggagaagaggactcaggatagctggctggaagttaggttaaaggagagggaatctgagaagcgttcaagatggagaatctgagatagcatcgaggggttctggaagagaatttgagggttctgaggttcctgtgctaggagattgtgaaaagtcccaagacttccagattaggggctgtggcagcctccatggtaggggcttgggggcggaaacgggttcactagaggagtcatgagtgactgcagtcaggttggggccgatcctgggacggcggcgggcggcggggacccggaggccaggctcacctgggcaggctgtcctggtagtgcatggtgggcacgatgctgcgctgcaggtactggccgggcccggagccggcgctgaggggccgactgggggctcccggaccaaccgcggggccccggggccaggcgcgcagcagcaggcggggcaccatcgtcccgggagcctgcggcggcgagaacgcggcaagtggggagttctggagtctaaacacaaggccgccgccgccgttagcgcccaagacactgcgtcaggactcctgaggcacttctccgcccgcaggccacttccggcccctgtaaggccatcggctccgccccggactggctccttccgggcaggggccgctcactgacaggccccgcccactagtaggccccgcccggaagggggccccagcctccgcgctgctcgtctcccttcccttccctaggaggcgggaaaccgagcgccgcagccgctccttccccttttttggagcaagacagaaactggagttggaaaaaaaaaagaaaagctaagaaacgtgattggaatctgataacccaaaatttgatccaggctccatccttgcgagactgtggactaaattttaaacctctatttcctcacctaagaagtagatagatcgtaatgattcaaagtacctcccaaaattctagatatgagataaagataacatgttatgcacagtgcatggtgcttaataggaaagcagtaaacggtaacggatgttactgttgttagtaatccgtgctgaaggtcattgacatataatgaccctgaaccctgcacagctactgccctgccagctcacctgagtggatggatattagaaaggatttgtgcaggagttggaaacctggagtttcccgctggccaccacttcagtgcagaaagccccttccgagcggaatcccctctgcctgaacatccattcttggcttgagcatttccaaaaacaagaagctcactgctaagaggaaagaaacccttgtcctccggctctaggaagtcttccgtgttcagtctattggaagaggcttcctgtcaccacagaccacctccaagattccttccaactcctgactctaagattccgctacttgaacatagatctatcatccctcatccatcacaaaacagctgcagaacagcccaccacgccccaatccctgatcttagaagtagctgcaggattaagtaggctctactcccattttacagaagaagacagggagttaccaaaagacacacaattatgctgcctagcttgaggcacaacagaattccattttgggaacagaactgccctttagccgtttggggcagccaagtacattctgtctgttccataattggctaagcagagccagaagctggagcacaccagaaagagtactggattgggagtcaggagaccggacttttagtttcagctctttgttatctagttaggtgacctcggattgaacaggaagatcactaaccagctctggcactcattcagtggtgatcacaaatgcttaacccatttcccgtttagaaaaaaacagcgcagcttgctgccagctcttatttcttagggcaaatgggaaatggcttaagaactaagcatgaaattcagaaacactgaatatcgaatcctcctctcttgaggggagaaaaggcccaactggcccaactccaaaacatcggtgccatttgcctgtagtgtataaggccagagggagaatataaaactctttctgaaaatgagccatctcctctaaatcctgatcattttcagagccttgatacccgaggcaaatatcgagatctgtgtagtgctaaggggatcagaggaccaggaagaaatagtgggcccagtagaaaagcagcggctctattctagagacagagggccaaaagattgagcccatccaatctaacagccaaaagagggacgtgaacacctttggtgagtgcatggccaatgggagcaactctaagcctttaggctggtgtccaaggccttctgaattctgacccctacctacttctccagctcccatcatgtcaccccaaaatactctatgccaggggtgtccaatcttttgacttccctgagccacactggaagaagaattgtcttgggccacacataaaatacactaatactaatgatagctaataagcaaaaacaaaacaaaattgtaaaaatatctcatattttaataaagtttactaatttgtgttggcctcattcaaagccatcctgagctgtgggttggacaagcttgctctatgctgtagtaacactgaaccacttctcattcccatccttttccttactctgcgacttatttatttatttattttagctgtctctgctgcctggaatgttctttccatgcatctctgcctagtaaactcttacttgtccttcaaaccctatttcaaaactcacctctttgaagtcttcctcaatcctcatccttcttcctcactgcaagaatgaatccctcccactgtgattttacagcactttttacattcatttacagttatgtacatgaaacacaactgtattagggcttttaaaataatcagctatttaattaccaattcatctctcacaataaattttgaggtctttgggcagggaccttgtttccactgtgtgtcca

SEQ ID NO: 470 - DNA, 4001 bp, Homo sapiens
ttcctcccaggagctgcctggctctgctcccagccaagccgcaggctctcaggcacaccaccctgacccacccttcatcaggattgcgcattcagggaccttggcacagcccctcctgtggatcaggccactgactccgtgtcagtccctgaccccgagagtggccccctctggctttatcagaccactaggccccgctgtctgcagcaggtgtctctgctggtgctttcttgtttttgtttctctctctagatgctgtatctgcttttaccagctggagaaatactaagcccctgccgagagccaagcaccatcctagccatctatctgggtgcatggggagtgcgagcagccatctggggtggggtcagatgacaacaaagacaggaagttctgaagtcctagacaagaaaacagacacagcagaaagcagagacaggtggggccgggggtggggggatgctgccgggcaggctgccccatcttcctcactgctacatccccaaaagcagaaaagaggctgtagggctggcacttgctggatggatggacacgtgttttcactcctgttgctgaaactccatgtcccacacagatgggttttaccactcagaagattgccacgaggctcttgtactagccctagggagccttccacgagtggcccaggccctgctttggattctgctggcattcacatagtcactccacagatccacagacatccaggcacccatgctttgtgtgagtgttgccaagcacccttgccctgtctccccgggtgccccacgggcccgcacctgctctggggaacctgagagtcagctgcattccacctcgaccaggaagagggcctgggggttcctaggccggttggtgctgggagccctgtcctggcctccctggctgcagggactccatcggtgggggagggggaagggcacccagccgtggtgagagctcctggccaggagcaggtgggcaggttgctcagcaccctaggactgggcccttcatcactagggatcatgggctgcaagccctgcccagcccgtggcccaggctgctggagcactggtgcctgcagggtgctgaagcctggcgttgcaggccccacaggttgggttgcatgcttggcaccaggcggaggccccagatgtgagctcaccgggcttcaggtgtgggggatggctgctcctgggcctcagaaagatgcagtcccatagacttccagcacgcccctcccctcctcgggccttaattttgtccactgagaagatggtctctgaggctctggggtttccttcttggtcaccagatattctgcgggccttgccttcctgcccagattcgagccagtggcaaacagaagctgccaggagcttctcagagctgtggctggtggctcggtaacaacaggaagggcagtggctgtgcaggaggcaggcagcttgccagcccaggaaggtgacccaggacacctccaggcctttcccagggcagcccaacggcccaaggtcagggccgggcgcgagggcggcctgagcacagagcacgggggctgacagcaggctggggggccagcaggagacggggccccacggcgccccaggccttgtgggtgggaccagaccctgtcgagcgagcgctacgagtctcacctgggaagggggcttcagatggcaccggactggatgggcaccggttcgggtccctgctccaccgagaggcccaggaaggggcggaggcccggggtggtgttggggaggggccgacctgagccacggctccgtcctgcgcgggagccgggtcctcggccgcccgcccgctccggccctctaggacgacgtcccctcccgctcccggcccctcggcgacttccggaccgtgcgggttgggttgggcaggtgcggccgccgagtccgagccgctcacctaggccgtagccgccgtgcgggccccgtccccgcccaccgccccgccctcgccccgccctcgcccgccgccctgattggttggatgctgcccaatcaggaggcccggcgccccgacccgcgtttccggctagcgcaccggaagttgcagcgaggtggttgcgcctgcgcagtgcatcaccgcaggcgggcctcgcgggtccgggagcgcggcggagacgatgcctgagatcagagtcacgcccttgggtgagtgggagccgccgggagggctgtggggtgggctccgtatgcggctccgggcgggctgggcgccccgctccctcccgtttctcgtggagccaggtgcgcgccgcgggcgtcctccggtctcctccccgcgcgggccctggtgggagccgagaggcggcctagtccctgcaccccgggcctccggcagtgacgcgagaacgcgagccccgaggttcaggcggccgtgaggggacgtcgcagatggggccgcggggccttcgcgctcgctgtgcgctttcgtcggtgccttgacctccccgtgccgcgcgctgccgcctccagccctaccagcccttcagtcccttagcccctcagccccgcagaccctcagccccccagctccccagcctctcagcctcccagcccctcagccccccagcccctcagccccccagccccccagcccctcagccccgcagaccctcagccccccagctccccagcctctcagcctcccagcccctcagcccctcagtccctcagccccccagccccccagcgctccagtcccccagaccctcagcccagcagaccctcagtcccccagcccctcagtcccccagcccctcagcccagcagacccccagaccctcagccccccagcccctcagccccccagtcccccagcccccaagccccttaaccccgcaagcccctcagccccccagccccgcttctgcctcctcacgtcttgctttctgtccaccactctgtgtgctcacgcccgagttacaatcaactctcactttagctcttgttctacctgatttctgcaacactgaaaaaaatagcaaaaaacgcaaatatgtactcctaaaagtcctgacagtctgggcactgtggctcacgcctgcaatcacagcactttggaaggcagaggtgggaggatcgcttgagcccaggagttcaagaccaacctagccaacatggcaagaccccatcactccaaaaaaaaaaaatgctaaaattggcagggcgtggtggtgtgtgcctgtggttcaagctacttgggaggctgagttgtgaggattgcttgagcccaggaggttgaggctgcagtgagccatgattgtgccactgcactccagcctgggtgacagcaaaaccatgtctcaaaagaaagtcaaagtcgtaacagtatagaacgatgtgaagaaggaaaaaattagtcaaaatccagggtctcagaaacagctggagggacatggtgttggtggccagtcatcctgatgtccttagcgttttccacaggtgcctgccctgtgctgtcctggaacctggtccttccaccgggcagggggtcgagggcaccttccagcacagacaccaggacgggattccatgtcctcccccatggcgtgagcgcttcctcggagggtgccccccgccccggtgtggacactgtgctgtgaacacccctggcctgtgcacaccccatggcattttgcagctgtttgcatgggccccactgccctcccctgctctctgggtcctccgtggggtcctcccagcctgcccctttcccatttggcctcttggctgcctgttctgcccactctctggacatctgatctttctgatctttcatgtggcttcaattacccgcaatctgtacctgggtatattctcaaggtcacctcagccaaggtatcatcaaagccgaagtcctgtttcaccgcttccctgcaccagggactgcctcgggctccgtgtccgcgctcactggaccactgctgtgtccttggggtcactcccacgccttggcctgtgtgtggc

SEQ ID NO: 471 - DNA, 4001 bp, Homo sapiens
ctcattttatacatgtggacactgaaggtcagtgatgtgacttaacttactgggtccaagacaccagctggtaagtagcagaggctggaaaaagcagaacgctggcttcctaataagtagatttcataaaactccaccacctacttctatatgcatacactttgggtgcagagctcttatacttctttaaaattccaaaggaccgtgcacactggaagcatccatcagcattttaaaatttaaattatgtcagcaacaaaatttctaggtagtttagtttaggctgtttcacatttggaagttattgtgataacctcagtaaattttttttttgcaattaatagtgtctgggattgtttataacagtaacttaatcaacataggctaagtaaaacaacattctagtaagaagagggccagtactcccaaagatgacacaaattcctaagcgttgacaacagattgcttaacttactgggcatgcttctctcctaaaaataagattgtacgttttatcacatctctgcacctgacaggttactttctggtgcctaaggagatcaaatattaataacaactcttgcgggacttggttctactttattttattttatttactcttttagagaagaaggaacactcaaataatgaatgtaaaatgtctagtggcagagaagggcgaacccggagttgtcaggaataggctggacaaaaacaaccaagactgtcacttcaaatgagatgttgccagtgagtctaggcaaccaagaagacttctggggagccgaaaaataataatagaagggttctaactgaagatgtttacctatttgaagttaagaaaaaggaagagatgtggcctcaaaatttccataataattataataggcgttattttgtactaaacacatcactaaaatgcgaactgtaaacatatctactgtcccttctacctgcaacggttacattgcatgttctggggcttcccttgctcttctaatccgcaagtgcctggcatgcatctgtcttaaagtatgctgtcaattaagtgcatggtgatgatggccgtggtggcttggtgtggggggcgaggacagttccatgcggggcagttgtcaggtaacacctgcatccctaggactgcttgtctaaacaccattgggagcaaagtacagaggtaacggttgggggatagaaatggactcggggacacatagccctgtgttagatactcgacaggcttaatgccactgaggcagcaactccacgatgcagagataccagtgtccccattttacagaagagcaaacagactcaggtgtgctaagttgcctcacagttaagtttctaggaccagaactcaggtttgtcggatccccaagttccctttcactaggatcaacgccacgtcttggctatagccagccgaggctgtgaatacacaaaggcaaggaatttcgtgcggcacccgctcagcatctgcgccttccactgcgctcgtcacgacttaagcccctgcacctgggaactccacgcttacccagaagcagcgagggtctccagtgcgcagaaggatcctacacccgccgccctgccgggtcgcgcgctcagcccacccatcgcgctgccttcggacccgggcgcgcagagcagcgcagctcagcgctgcacgcgagttctctgcggggccccgggttcctcgtccgcccgggcgcctccccacgcccgcccgcctctcaccccaggccaccggcagcgcaagcagcaccacaaccgccagcagggatcctccgcagcagaaggggagaccgggcgccggcggcccgacaggctccgggcttcttggagaagaggcccccattctccccaagcacatctacaaaccagatttgatctcgaagaaaactgaaataagaggaaaagctcagcgaaaataggagtgaccaatcattgtgctccgcgcccagagtgtggggagggctgcggggttccgggacaaaatgcttttgaccacagcttccccttcatgggcgaggtcatgtttactccccatttgcattgtttctaacgagtttcgctggcagagcccaccttgctgacccaggtgcagcagcagagcttgacaatgctcgggcttccgatggatcccgcgtgtgaggccctgcgcttccagacaaaggcggtggatgatggcagctcgcctccaaacaccctgcttaacttttcctctttgcaagaatgtgtgtgggaaggtcagctaatgaaatgcctgctctccgtgttgaagggcaattgcaggcgatgtgtacggtgtacagggaatgtgaagaaacaatttccttaccctgaattgagacgtcatgccattgtaagattttttaaaagggagggacaattagatacacatttaaaaaatgtaaatctgtgtatagtatggaaggtagattagaatagggcaataatggactgcgaagaccagtcaggggagcttttgccgacatccaagtgaggtttgatggcggccctgactgggtggataaagtggacaattaacaaagatattggagatggaatgaacagttgctcatgtattggattttggttacttcctttcttaaggttggtggtgagaagaaagcaatcaagagttagcccccttgcggtagtttgctgagaatgatggtttccagcttccacaatgagaacacatggacacaggaagaggaacatcacacaccggggcctgttgtggggtggggggaggggggagggatagcattaggagatatacctaatgtaaaggacgagttaatgggtgcagcacaccaacgtcgcacatgtatgcatatgtaacaaacctgcacgttgtgcacatgtaccctaaaacttaaagtataataaaaaaaagaaacaaaaaaaagaaaaaagaaagaaataattaaataattaagtttaaaaaaggtagaaaaaataatattttatcttttttattgggggtggcctgtccttctgacatgtactgcctgcctgtaggtaggctattttgcctgggtttttctcttaaaataattttgactttaaaccttgattttgttgttgttgttgttgttgttgctaattttatgttaaacttgttttccttaaccattaaaaggagacatgattcagaaaagaaaaaaaaaaaagagttagccccaggattagaaatgaatggtggtgctacttactgaaataagaagtatggatgtaggactgacagatttagggcagagggttaagtattcaaggatgaatgtattcctcctatctatctgtgatcctgtgccctttaaccaatctctctccatctcccattgtctctcccttccccagcctctggtaaccagtattctaccctctacttctatgagatgagttttttagagtccacatatgactaataacatacagcatttgtctttctgtgcgcattggtttccattaggcttcctcccaaaattctagtggaagaaatgtctactttgatcatatcacttatcacagtttttagtacatccagtgacattcttttaaggatttgctatcatcatttcaagttattctcaacagagtaatgggagtagcagccagattgtagtaggcttaggaaaagagaagaggagaaggctcatttccccagttttacatcacatgctatcagaaggtgccactccttaccacttctgctggtatccatctcctagtatctactttctccctcattccttgaaagtttgagctcctggctcatggccaccttctccactgttacttctgccacagttcctggtgatttcaacattcacagcaatagtattttcaaatccctggccttccagtgccttgacctcttctctgcctgtggtcttgtcctccactctcctctgactctaatgctcatgtgcatgctcggagacttgtcactttcaacctctcagtgatttcaatgatcccactctcta

SEQ ID NO: 472 - DNA, 4001 bp, Homo sapiens
atctgttgattgcctactgtgttcccggcattaagcacttaacaatgagcaaaaaaagtccctgcttatcttcctgcatgtacgtgtgtgtaaacaaatagtaaaaaaaggataaagaaaataggaattgtctgttattacctactagtgtaacagcaccagacatacaagacccatatttgttgaatgaatgttcctaagagaagaaatgcaacgtacaatctgtacatggaataagatcctaaatataatttggacatagatacacatgaaacacaataaagtcagaaggaaatataacaaaatattaaaaacagttgtccttttattttgttcattttgcacaataagcctgtatttaagcatgtattttttggctttttttttttttttttttttttttgagacagggtctcacactgtcatccaggctggagtgcagtggcatgatcacagctcactgcagtcttctcctcctgggctcaagcgatcctcccacctcagcctctggagtagttgggaccacgggcatacaccaccatgcccatctaatttttttattttttgtagacatggggttttgacatgttgtccaggctgatcttgaactcctgggcttaagcaatcacccaacttgggcctcccaaagtgctgggatcacaggtgtgagcaactgggcctggcctagcatgcatttttaaaaatattgattccattcaatgaaatacaaaacagtgggataggccttaagcttcagtttatgagctgtaggggaaaacaagattaacattatctgccttcctttgttaggatactaatttctcactaggtttggctaccagtgttttttaggttgcttcacatctctcaaatatgactcaaactaatgaaaagaaggaaaacaatgtcaaaaagccactaggcaatggaatcagatactgtctatattggttgggaacaggaagatgactcgatggcccacccaccccccaaaaaagcagccacttaaaattcaagaccaatacgatctcaggcaacacggacactgttcacagaaggcactaaaagcatggtgcgcccttaccacctctctaaccccaggcactgagagcctgctctcactcaacatgccctccctagccgcagagtccgcgctcgctccactcaaagcaaacagtgagctgtcttgcccacagtgaactccgcacacaggccacttgcgcacagcacgctcccagcaacacctggccaggcccctgctcgcccagcccagcccaggccagcccagcccatggggcacagcagacgcactgcaacccttaccgcgggtactgtccaagccctaatgaacaccctactcaccaaggcaccaagggaacacagggcaaactctcaccacgggcacagcacgggctctagcaacaatcccacgcacctgtgcactccagagcaagccctcacctggggcgcccagtaagccctccccttgctgactgggctcaatcccgaaaacacgattcacgcttcttttgggaacgcagccagatcctgcgtaaatgtcggccgcgcacacgatgccaccaaacaagcttctgcgtggttcccgcatcccccgccacatacccccgggatctgagcacggcacccctcggagaaccctggcctcgctctctatcccaagcaggcacgacgtgcagtgagcttcgccccgcgcctcctgcccgactgactgagcagagctctagcctcgccgcggacgcgcgaatccaccccggggtcctaccggagaaggaggacagcagcaacaccagggccgccagaagcaacccaggaaagcgccgggaaggaaagggacgctcgagacggacgggaggcgccatgagcggcgcgggagaccccgtgatttatccggaggtgagcagagaaaccgaaagccagccgagcagggaagtcccttctgagtccggttagtggacacaacaatccccaaactcacagtttccagggccgcatgacaggtgggcgtggcctgggcgcgtagtgtgaaattgagtcttagcgccggggcggctggggccaatcggcgggccgcggggcggggcctcggcgcgcaggggcagcccgttggccttcgaggagacagggcgtgtccagagccctggcagggggttatcgtgggctagcacccctcagggttagttttatcctggggcactgcaggctgtcaggactgcctgggcccttacttggtatttggcattagtcaggcattattgggaacaatatttgagtttttcttgcttgaatgcctgctactgaatcgtctcggcgccgtcttcttttcacagtctcaaaggtttggcttctgcactcccagcccctaagataatttgccctttgctcccctccctggagaggacccgtcagaatctaaattattaagcaacaccaggccgttagcatattgagactctatgggacccttgcccttgagcaactaaatgttttattgaagacgaaatatacatgcatgaacaatgtaaggacaagggtgtcctaagtgccaaattcctggaagcaataaatgcaggaggattgggatgggtagaaattgttaggcgaagtggataagggggagaacttttctggtgaaacaatctcaggaacaatgttggaaaattaagaatgagcaggattgatttgtagggttctgagtaagccagtatgactggtaaaagggggaaaaaaaaagggaacatgactggcattaaaagagcaaacaaaaaaagttgacatctcttcccctcagattggcaaagaattaaaacgtcagccaatgtgagtgaacatgttgcagggggaccagcactctgtttgtaacataacttttcagaatgttaaaagtcttaaagtggaaatgacttgtgttaggctctcagttcccagagaaatcatcagagctgtgatcaaagatttataatttttgtaaaaaatgtaaaccctaagtgtctagcaaaagtaataaggaggcagttacctttgtgtgatggaattctatgcagcaagtattgcaaaagaataccaaatgtgagaaactatgatatcattgtaagtggaaaaagcagagtccaaattggcatgtgcattttggcagtccttttattaaaacaaaaatgctatatatatatatatatatatacatacactaatttggaacacaacaaaattaacaatggttaagattatagatatttcactttccttgtgcttttcagttttctttttctatgttgaccctatgttacatttagaataaggtaaagaaaatgtattttaaaaatcaaatctatgtatcaattgttgttttgttcatagaattatgggagtagaacttgtattacacagggtttgtatgagaggatagtgaggaattagatgcttagtgtataaacctaaaatgggtcttatggaattatagagtttaaatgtatttaatacagttctataactgagatgtactgaagactttctgggttcaccaaaccacggaatttcctcttcccaaacattttcaaatttttggcatagaatacaagacattgagtctggtggtatatcaaataaacatcttagtatcttggattataaaattcagacactctatgacagtaattaaaggaggtataattaaggggatagtaaataggaaactcaatgaggagaaattattattcctgttaatgtatggtgtgaaagagcaatatgacagacatgttctgtggctcaatgccagcacttatttgtgaaagcagatagtctatttatttttctccacatcaatagatattaaaaattctccatttattttcaggcttggaagaaagatacctttttctcatgagaaaaattattataaagaatagaagaaaaaatatggctagtgtttgatttcctagtttcaggtgtcagattagattcaaagatcggtattttattgaaac

SEQ ID NO: 473 - DNA, 4001 bp, Homo sapiens
gcagtagcagtaaaagttagcagtggagagtgggcaaagcatgagccatgggagacaggtggggaagaccatgagcagcgcatacaagacaggcagctggagaaatcagggggtgtgagcttcggtgagatcccattccaaagggctagaaaggctgaagacaccagattttcttccactggaggccttttagatttttgaacaatggagtgaaataatgaaaatatatatatttcttaattttttgttttcataattggaaagtgacctataggtcactctttaacctttccaatcataagaaccaaaatctcttaaaagagatgaggttgttacacaggtaattataatgcttaggatgggaatactggtacaaaaatgagaaatggacaaacaacagaagcacagtagcttgaatggctgataggtagacctggtatttcatggggctccagttaagtgacctacatgatgctgctgctgtggccctgaattggcaggactggtgaagaatttgattttcagttgataatatcctctttgaaatttagaaataggtgagaagtcagggacgtactctgctcttagaaaaagtgtgaatatacatttgttcaaagggagttaatatgcagaaaaagaaaagagatgaagataatggtctggagaaaggtttaagggtcaggagacagtaaaatgtcaggaaagcaaaaagttgtaataaactaatatgtgctgtattccagacacctcaataagctggatgtccatagaaacaattggacacccagcttgttagcttaaatgctggctccataaaatcaagtctgtacaggaggcttattactgatatttagtagtaacgactaacatccaactttctttgcttagtttcatctgtgctcagggcagctcagtgaggtggaaggccagttaatcactagtttcattttacagatgaagaaactgaagatcagggagctaaatgacttgccaaaagtcacccagttattgaggtctgcacacagtaaacgtcttataaactaggaatgcacggtaccgtggagataattagaaacttagacccatcctgtagccaagagacgctaatcttaattataatctttctttaaaatcaagccaatctggaggaaaaaaagatataataaacggtgaatgagacctttgcggacgtccacaccattacagtaggttaataacaagaagaaaacaatagttttaatccatgtctcaaaaataactacggatggttaatgtttaggatctctaccaatatcacattagagttcagaaaatctgagacccatgcttgggaaccaggtcttactcttatttagggaagggagccgaggttctgccgcttttgctgggcaagagcgcggttcgggtgtacagaaacagcctcacgtggctagctggtgcctcatgcagtgggtaggtttcccgtggcgagcggtagcgctgaccgccggccagagagcgatgagcacctgcagaatcctgggggcggggagcccggcaggagaccgcgagcacccgcacgccgccagccacaccgggccgaccagacagcgcccctctgtggcgcagcctccaattctggaggtcccagctcccggaggggccagtggggacaatcaggaccaggcggtttattgcagtggtccctcaaagctagcgggaggcggacacgcgtcgagcactgcccccaccgtctcgcttttggccccctgctttgcatcgcggcacagaaactttccctgcccgggacgcgtccccacctccgtgctccccctcccagctcaccgaggacccccggtgcgacgagagccaagaaaaccccgagcaggcccgcggcgcccatgccacggccgaagcccccgcggcgggatgcgttccgagacccgcgagcgtccggcagctctgggagggcaaggctggagcagcaagcagctgtgagccaggagaggcgggcccttaaatagtgtccggcacacgtgctagttctgagcgcacacctgcaggcggcctgggggctgacgcggcgccggtgagggtgggacaagcgggagggacggcccggcacgaggtgggcggggagctctgagccactctttggctcagactcacccctcgttgcggtggcttccccacttttttgaccacgcaacccactacactcacttgtttctcttactagaacttaaacaaaactttcacaagttagtactcacccttagtaatctacaatgttcgtcctctgtgccatgctgtgttatgctagactaggctaggctatcctattcttattagaaatccaccaaactcatttcaaaacctattagtggattcatctcccagtttgaaaaagcagtgtaagtttacttagggaatttaggaacagcagccacttctgctctgttctttattttgaagtaatctctacagaaaagtttcaagagtactgcagagaattcccatatacttgtcacccagattctctgcatgttaacattttgctgtattttctttaccattctctattctttctctatagacatatatgtacatatatgtgattatataattataattatataattattactttggaaccatctagcatttattcctattctaaatggttcactaaggactttctgttccataactagagtgcaatgatcaaaaataagaacttaacattgacacaagactataagctaccatctgtatttaaattttgacaatcatctcaataacctgtgttatggtaaaaacaataacaacaatagaaaccaacctttgtttttcctggtccagaatcatttcaggatcatgtattgtgtttgatcattatgccttccccccacccccagttctttattctggaaaaatgtcctcagcatttttggtattgcatgacctttacatttttgacgaatacaccacaattatttttggagaatgacttttaagtccgttatctattataataacaaattaccctgaaggtagtggtgtaaagcaagaataaacatttatgatctcacagtttctgtgggtcggtcaggtggttctggcttgggatcgctcaggagattgcagttaagacaccagctggaggtgcagtcatctgaagggttaactgggataggcgaatccacatctaagatggctcacttaccagcctttggctggaagcttcattcttcaccacgtggattttgccatagggctcgctgcttgtgtgttgagtgtcctcgtgacatgccagctagcgtctctgagaacaagaaagaagaagccataatgtcctttgtgacctgtcctcagaaatcacaatatgttaactccagaatatccaattgattgtacagatcagcccttttcagtgtaggagggcagtatacgtggatggtaatgtcaggagacaggatcacaccccacaatttggatttgtctatcatttcttcatgatagattcaggttattgaatctaattatttgacaggaataccagaaaggatgtcttatccttacggggaggcatatgttgtctatttgtcctattactggtggtggtaactttgatcacttagttaagatggtgcctgccatgtttcttagtgtagactcagtatttttccctttgtaattaataagtattttatagggagatactttaaaactatgtaaattcctcattttttcatcaaatttttacccacaaattttagcgtctattgatgatcctttcttgaatcaatttttactatgatggttgtcaaagggtgttttttcctaatttaataattacttctatattcatctgttggcattttactgtaaataaaagttttcccttctctatttatttattcatttatctatatcagcataaactatatcaatatgaattttatttatttactcaatgggtcataattcatggctaccattatttattttgatgcttaaat

SEQ ID NO: 474 - DNA, 4001 bp, Homo sapiens
aagccttgcccctggggagcccaggacccccattgttggctgctgaactcttgtgtctaggaagaaatgacaggtccccaagtcttattgagatggacccttgactagagctaagaggggtgtgccaggaccgaagttcctgcagaggcaaggctgggttcagaggagacatcctttcagcgagcccctggtgcctgtggagctgagggcccagcttagccggccttagctggctcaggactgtgtttgtctaatggatctgtttttaatctgccccctgcagggcctgaggagggcacgtggctcagagagaccctgcagggaggacaaacagactgaagacagacagcaggattggggccttgaatcttactcttcagctggggcctgggggtgtaccagaccaccacctcatccactgaggacaggggccagaatccagagaagatgaggagggagtggcatctaggctttccaaagagaaaatttctttttgtctttaagtttagcaaggacagagcaagaaagactgatatgactccaagaagtattgtggttagatcgcaggaagaactaacggcaaggactgatggagatccctgctctctctgcagcattccagacctgtcttagatccagactcactcctatagtccagggagaggggtgccttccctccctcccctctcgcccaacccagccgaactaccgtctctctgttgagtgcaggaattgaaggcagcaggcctgcccttacgctcccagtggctggggtccttaactaacgtccatctctcccccagagtcctctcccagtcaccaggtcctggcactctcccctgccccagatgtctagcccagttggcccagagggcacacagaaggtgggctggaaaagtgggaaaggcagtctggattgacttagttttccccacctttgaccaacacacccaattgggctgcagccgatctatggtcgggggaggtaggtgggaacctagatttttggaaatgtgggattggggtttcacacgaaaccatttgttgaaatccaagaaagtgataattatccctagcgattttagaactctggagctgctcgctgtatgaaaatacttgtctcacagatggggggtggggagagcagagtggaaagtgcagagggggaggaaagtggggctcagggggcgctggggcagcagatcacctcgcaggcagagctgggcgccgaggggtaatgagcctgccctggggattgggttaccgaggggggcaccgggaaggagattggaatgtctccgagcggctgggcagggtagggaaccgggctcccagtctggatgcagggttcgtggctccaccagcccgcagcttctgaactgcagagagccaggtgcctcggcccgccgagtccggccgctgaggccagcctccccttcccccagaggccaacctcgcgcttctggtttctacgtgattcacaggccgtgagtcaccgcagtgttggcaccggtgggcccccgcaggagaaagcgggatttaggcgtcgtgcccagagccccgggacccggacgcctggcacgtttttcggggatgcaggcacccagtgtctcacgccctgattgtggtcccgctgtctttctcatccccaacttcgaggactccagagcccccccttgccccacctgggccctcgaacatttccttacccagcactttgagcaattcctcgaagttttccgatcggatgattttccagttgccagagaagttgggcatggtggcggcgcgggaggcggtccccgtagactcctaggctggagcactggacactgtcttttagtcaaaagagacgtcgccgtcgccgggtcgtcaggttctggaaccaagacaagtccagggacaaccccaaagctggcctgggctcccgcgcggacagcttttataccctgtacggaaccgcccctgcccaggattgaagtggccccgcctcccgctccgcccccccccacctggggggccctgcgcccccgccaccaacctctggatctagcccgcgtgtgggtccaggcttctctggggaccgagatagccttctcctgcgctagtaagtggatggggaagcggacgcaaagccagcacttgaatcgcgctctccgcagaggcggggggagctagctgcgggcgcagatgctcagggctcgtgtatggctgtcccccacccgagttcctcacgtctcgcctgttccccacccatccccaacctgactcggtgcattcaactccttggtgccggacacctggcgaccccacccgcaggcggaccccagatcttgagccgtagctggccctagctccattgaaccctgaactggatccagtgggaccactccgtactcagagaggggcttgggagctgcggggttccgggggttagggatctaagtgaggcaacggcgccccctgctggaacaactcggagaggctgggcgggggcggcacggtccccccacccctccaccctgcttcgggctcacgtaatgcctggggactctggaagtagtcgccaggcgactcgctccccttaatgcgctgggcggacattgaagggttaagcaggagcccagggcgcgaggctgggagggcagaggtcacagccaatcacttgacgcaaggtctttattaaaacgctttctctgtcgcttcactcccgagaccccgagggggtctcagtagggggaagggagggaggcggggacagaggcgcggagccctggcgagctgcgccaccacctagataggcgggaggatgggtgccgggggagaaggcggagcagggtctcaggtgtcaccatcctgagctgtaaaacgggcggaaggagcgacctcccctcccttggagagcggctttgaaacgggagatcaaagagggtgggaggagggcacggcttcctgcagagacccgagtgggagtgggcgagaccccagtggagatggcagggagacggagaaacagaaacggaggtcaggcggggagcctcggggacaggcctgggacccgaggccggaaaccgcagaggagcgaagcctggcgggatgcagtgattggagccaaaggaaccgtcccggcctgtccaacgcgggggggccttcggcccggtggccctgagcgaaccgatgcacgtggccccgccgcatcccatcccccaccctccccagactctccctcccagctccttctgaggcggaaagaaaaaccctacatctggtcccagccctgggtccctgccctggcccctcctcgccagcgtggccaagggtggagcaggcagtcgctctcagatctctgagcccttatgtttagaacctaggggcgatctagggagttgggagctttggtgggagctggggaagagtctggaggaagatgaccaaaggagaggggccagagtgacctcagcattaagaactgaaggctggagaatgtactggggggtcgggcctccgggttgcagagagggaaatctgcagaaatgggtgggtgagaaaataaagcagctgggctgactgggcagcaggagggatggagattccactgcataggacttctctatggggccccgcccgcaatagccaacaaactgagatttgaatacttcagcctgggtttaggggtccaggttttgtgtgggagagcttacttgggggtgtttgggaggcctgggcttctgcaaggaagagggcagcaggtcaaggagctctctgaggaaggacagacaaaagcagagatggtggaaggaagcggggtggggcggggtggggggttccctgggaagtgcttagggcctggggttgcaggcacagccccagctcctcccccatcctccctgctcagcaatgctgtaggtaaaggagggggattaggctctgacagtgaaatcaggctcctggccaaagggatgaggagaggctagaggagggaacatggtggaaaccagatt

SEQ ID NO: 475 - DNA, 4001 bp, Homo sapiens
aaggctgggttcagaggagacatcctttcagcgagcccctggtgcctgtggagctgagggcccagcttagccggccttagctggctcaggactgtgtttgtctaatggatctgtttttaatctgccccctgcagggcctgaggagggcacgtggctcagagagaccctgcagggaggacaaacagactgaagacagacagcaggattggggccttgaatcttactcttcagctggggcctgggggtgtaccagaccaccacctcatccactgaggacaggggccagaatccagagaagatgaggagggagtggcatctaggctttccaaagagaaaatttctttttgtctttaagtttagcaaggacagagcaagaaagactgatatgactccaagaagtattgtggttagatcgcaggaagaactaacggcaaggactgatggagatccctgctctctctgcagcattccagacctgtcttagatccagactcactcctatagtccagggagaggggtgccttccctccctcccctctcgcccaacccagccgaactaccgtctctctgttgagtgcaggaattgaaggcagcaggcctgcccttacgctcccagtggctggggtccttaactaacgtccatctctcccccagagtcctctcccagtcaccaggtcctggcactctcccctgccccagatgtctagcccagttggcccagagggcacacagaaggtgggctggaaaagtgggaaaggcagtctggattgacttagttttccccacctttgaccaacacacccaattgggctgcagccgatctatggtcgggggaggtaggtgggaacctagatttttggaaatgtgggattggggtttcacacgaaaccatttgttgaaatccaagaaagtgataattatccctagcgattttagaactctggagctgctcgctgtatgaaaatacttgtctcacagatggggggtggggagagcagagtggaaagtgcagagggggaggaaagtggggctcagggggcgctggggcagcagatcacctcgcaggcagagctgggcgccgaggggtaatgagcctgccctggggattgggttaccgaggggggcaccgggaaggagattggaatgtctccgagcggctgggcagggtagggaaccgggctcccagtctggatgcagggttcgtggctccaccagcccgcagcttctgaactgcagagagccaggtgcctcggcccgccgagtccggccgctgaggccagcctccccttcccccagaggccaacctcgcgcttctggtttctacgtgattcacaggccgtgagtcaccgcagtgttggcaccggtgggcccccgcaggagaaagcgggatttaggcgtcgtgcccagagccccgggacccggacgcctggcacgtttttcggggatgcaggcacccagtgtctcacgccctgattgtggtcccgctgtctttctcatccccaacttcgaggactccagagcccccccttgccccacctgggccctcgaacatttccttacccagcactttgagcaattcctcgaagttttccgatcggatgattttccagttgccagagaagttgggcatggtggcggcgcgggaggcggtccccgtagactcctaggctggagcactggacactgtcttttagtcaaaagagacgtcgccgtcgccgggtcgtcaggttctggaaccaagacaagtccagggacaaccccaaagctggcctgggctcccgcgcggacagcttttataccctgtacggaaccgcccctgcccaggattgaagtggccccgcctcccgctccgcccccccccacctggggggccctgcgcccccgccaccaacctctggatctagcccgcgtgtgggtccaggcttctctggggaccgagatagccttctcctgcgctagtaagtggatggggaagcggacgcaaagccagcacttgaatcgcgctctccgcagaggcggggggagctagctgcgggcgcagatgctcagggctcgtgtatggctgtcccccacccgagttcctcacgtctcgcctgttccccacccatccccaacctgactcggtgcattcaactccttggtgccggacacctggcgaccccacccgcaggcggaccccagatcttgagccgtagctggccctagctccattgaaccctgaactggatccagtgggaccactccgtactcagagaggggcttgggagctgcggggttccgggggttagggatctaagtgaggcaacggcgccccctgctggaacaactcggagaggctgggcgggggcggcacggtccccccacccctccaccctgcttcgggctcacgtaatgcctggggactctggaagtagtcgccaggcgactcgctccccttaatgcgctgggcggacattgaagggttaagcaggagcccagggcgcgaggctgggagggcagaggtcacagccaatcacttgacgcaaggtctttattaaaacgctttctctgtcgcttcactcccgagaccccgagggggtctcagtagggggaagggagggaggcggggacagaggcgcggagccctggcgagctgcgccaccacctagataggcgggaggatgggtgccgggggagaaggcggagcagggtctcaggtgtcaccatcctgagctgtaaaacgggcggaaggagcgacctcccctcccttggagagcggctttgaaacgggagatcaaagagggtgggaggagggcacggcttcctgcagagacccgagtgggagtgggcgagaccccagtggagatggcagggagacggagaaacagaaacggaggtcaggcggggagcctcggggacaggcctgggacccgaggccggaaaccgcagaggagcgaagcctggcgggatgcagtgattggagccaaaggaaccgtcccggcctgtccaacgcgggggggccttcggcccggtggccctgagcgaaccgatgcacgtggccccgccgcatcccatcccccaccctccccagactctccctcccagctccttctgaggcggaaagaaaaaccctacatctggtcccagccctgggtccctgccctggcccctcctcgccagcgtggccaagggtggagcaggcagtcgctctcagatctctgagcccttatgtttagaacctaggggcgatctagggagttgggagctttggtgggagctggggaagagtctggaggaagatgaccaaaggagaggggccagagtgacctcagcattaagaactgaaggctggagaatgtactggggggtcgggcctccgggttgcagagagggaaatctgcagaaatgggtgggtgagaaaataaagcagctgggctgactgggcagcaggagggatggagattccactgcataggacttctctatggggccccgcccgcaatagccaacaaactgagatttgaatacttcagcctgggtttaggggtccaggttttgtgtgggagagcttacttgggggtgtttgggaggcctgggcttctgcaaggaagagggcagcaggtcaaggagctctctgaggaaggacagacaaaagcagagatggtggaaggaagcggggtggggcggggtggggggttccctgggaagtgcttagggcctggggttgcaggcacagccccagctcctcccccatcctccctgctcagcaatgctgtaggtaaaggagggggattaggctctgacagtgaaatcaggctcctggccaaagggatgaggagaggctagaggagggaacatggtggaaaccagattcctgctgcccctccttcccttcactgccccctgcctcccccacccaggtcatttcgtccatctccatgccaccagccctcttgagcccccagctggaagcgcccagcctcctgctcaataagcatccctcctcctgcacgacaaaagga

SEQ ID NO: 476 - DNA, 4001 bp, Homo sapiens
gtcacactactcgggaggctgaggctgaggcaggagaattgcttaaacccgggaagcggaggttgcagtgagccaagatagcaccactgcactccagcctgggtgacagagcgagactgtctcaaaaaaagaaaaaaaaagtcaagtaatgatagaaagcatacttggtttattctcaaattccgtggaagttttcaatctttcattaagtgtgatatttgctccatttaaaaatttttcagtagcttctatttatattaagccattttctaatccttgcttgagatttttaaaaaatcatgtgttaaatttatcaaatatttttctgcatctattgagatgatcaatggttttcatctttcattctgttaatacgaagaattacacgtttatttttaaatgctaactaaatctttcattcctttattaaatccaattcagttgtatctctctctctctccgtcacacacacacacacagacacacacacacacacacaccacaaagacatcacttgtaggtctacgatttttgcacctaattttatgagtttgacctataatgttcatttcctgcaacgtattttcaagtttgggtataatcattatgcttgtctcatgagatgtgacctgcccctgccacccattttaaattttttgaagagttgggtaaaactggcaatatcaaatctttccaaaagtttctaaaccttttacatatcccaacacccaaatttttggtctattggttctctttattgtatatttcactatttcattatttgctcttatcagaattttttctatttctttggatttatatttttctatcttggatcagcccttctgttttaataaaaacacatttccatcaacgttctaagtactaagataatgatagctttcacttctaaattattcttttaatctgcttagttatttttgataattttttcatttcccttcatttctttaaatatacttgtttctgataattgcaatatctgcagactaccatcctttttctatcttggttttacatttttctctcttttcagtgtggctagtttttgtgggatgagtctcacaggtgatatgaatctttgtgcaaatccatgtgaatgtgagtttttgctaggaattttcatgaaaggcttaaaaattttattttttcaattcccaagaaaatcggagacaggcaagtttcttcatagcctcctcctgtttgccggtggggagtccaactctgcaggagttcttccatggagtgcggcccttttagttgtcaggttgtatgtgtatgggagggacgagagggtgggggaagaaaattaggccacccatcctattttgtctcagccttcatcttatattccttatgcctgtaaaatcacacgctctaggaccttgcgcttcataatacgagtccgcagataaatgatatcagcacctcctgggactcagaaatccaaaatctcaggcactagctccaaaagttgtccttgtggatttttctttactttttgtttcggcttcctttcctgtcctaccagctttacgcttatataaacatttttctattttttttctgtgtacaatgataggtataaaattttttttcttagtaatcgcgtttagatttaaccgtttaagtcagaaaaataacgaaacgagatcagcatcgctgggttctttcgtgcacgccagtaggttagctgggactggcttctggcagttgctgtttggtagattacaaactattaaatacaccagtgaggatgaaatccattcgtgcgactgcacctcggcaaactacttctaaactctgcgtccatcctcccctctcccattgccctccctcagcaaaagcctcacggtttcgatcggggtaggccaccgagccactgcgaaaacccggagtaacggattcggcgtgtagctagggtctccgagggagtacggggaacttaaggagcatgcgtaaagcggcgtgcgcgcacatgcgcactcgttcgcgcagggtcgcgcgccggtctctctcaggagggcttggaggctgcgcgagcggttgacgtgttcgttggctgcggaggcggcggagctctgggaggggaaggagcggagggaggggagggggtggtgaggtggggggctgaacccggaagtgggtaggcgcaggagcgagcgcgcccagagtggagctcagctgctgggagccagcgggggagccttgggttcccggtaatggatctgtggggcgttttcccagggaaactgggtgggaagggtagcgggatcgccgactacaagcgcattctccgccttgcccgggcctgggaaagctcttctgcttcctttagtcgtccctctggttgaccccacttctgctctgcgcccctcctggggccgtctctcaccgggtggctttggctgagggacgctctctattcctgaagagctgtgccttgcccgcccgaggaaagcatgttaatggagagactcggatctcgcggccgccacggccttattgtcaccatcccagcacccctaaaccacgacttcagcctcctcaacccgcaccgtcaacgatcttggaagatctctcccctttctgcccgggtattttcaccctgttcgtgaatcaggcctggaaggtgtgcctgggttcctttaaaattattcttttgttggctgccttttctaaacccggccctccttgttctccgccccaaaatctttgccacgaatgagtgtaagctgtgattttatcatcattcagttataattagaaagaattcgttgatgattgccgttggctgatttagcattgctttgccatggagttattttacgtggttctcactcttttgcagaccatgaaacccttgggcacgccccttcagaagctgttatccaagacaatctagttttcctttataaatcacttaagacacttatgaagtttcttgttctgaaattgctgtactgcaatgaagaagaggagaaaggttacttcaaatcttgagaagatccatctaggctatcataaagattcttcagaaggaaatgttgcagtggagtgtgaccaagtgacctatactcattctgcaggaagaccaactcctgaagctcttcactgttaccaggaacttcctccctctccagatcagagaaagcttttaagttctttgcagtataataagaatttgctaaaatatttaaatgatgataggcagaagcaaccatctttttgtgatttacttatcatagtggaaggaaaagaatttagtgcacataaagtagtcgttgctgtcggcagtagttattttcatgcgtgtttgagcaaaaatccaagcactgatgttgtcaccctggatcacgtaacacattcagtttttcagcatttgcttgaatttctttacacatcagaattttttgtgtacaaatatgaaatacctcttgttttagaggctgcaaaatttttggacattatagatgcagtgaagttgttaaataacgaaaatgttgccccttttcattcagagctaactgaaaagtcatcaccagaagaaacactaaatgaattaactggaagactatcaaataatcatcagtgcaaattctgtagtagacatttttgttataaaaagtctttagagaatcatttggctaaaacccataggtcccttttattagggaaaaaacatgggttaaaaatgctggagagaagtttctccgcaagaagatcaaaaaggaatcggaagtgccctgttaagtttgatgacaccagcgatgatgaacaggaaagtggtgatgggtcagacaatttgaatcaagaaaattttgataaggaaaagtcagatagaaatgattctgaggaccctggaagtgaatataatgctgaagaagatgagctagaggaggagatgtcagatgagtactctgacattgaagaacaaagtgaaaaggatcataatgatgcagaagaagaacctgaggctg

SEQ ID NO: 477 - DNA, 4001 bp, Homo sapiens
ttttactgctagatattatgttattcacttgtctggaacacagaatttgtgtcaagaatactaggtaataagggtagaaaggaaggctgatgctagattgttttaaagtcaggtgggaaaaaaactcagctaacaaggtctaaactacgtgttttgattgggaaagcaatatgattatatcttgccaataaatatatcaacacagacaaaagtctacctgcttaaaaatcgaagaaaatgagacttcaaatgtacttttttaaacgaataaaaatactatgctggagaacaaataaaataattacaaagtatttagaatctatcaataaaatcacttactcaaagagagcaaaaacaaatgatatatatttatcaattcatagttactatacttttaattaaagatatcatacattcatttcctttaaaacaaactgcagcaaactccaggaatttccatatatattacattgaatgacaaagctgtttgccataaaatgcaccataaactcacttcacattcattttatgacttatttctttttctccctttcttctcctacctgcacaactaaacacagcacttctcttcctcattcctcattgcctggggcccacattaagtttcaaggagggtaaataactatttaaataacaactctttagtaaatatatatgaaaaaaaatcttttgtgagtgtgcgttgcagtcaagtattatactgatcatttgtttaaagtttgacttggtttttctatatgtgccatcagctacctacccacagcatttacttatttcttcactcagtctctaatatatgttcaactgtaaaccgtacaagtaacaatctcactggtgcagccacagaaggtgacccagattatccaacactgtgtgctaatgccaagttgtcttgttcaacggcagctgctctacgctttgccttattgatattcagattcaacagacacaaatcacatggcccctttgacaagcacacactctccctgtcttcgttttaaacgtgttgaatagctactgtgcttcataaacacacagctggggcaatttggtctcctctgattttccatcctgctatagaaccgacaagattatctcagaaacattgctcttgcttctatttggggaagtttgtggaaaataatatcttcatttataaaacagaaacacataacagtaaaagcccatttctctggtgaaagaaacactttgaaccattatcctctgggaaacattgagactatccccttaattatgagagcaaatgttgcaacacagagttatttaaaagtgaagataaatatatagtatgtgggaataaaatgaaatacaggttatgaataacttccttttaaaggatatcaattagtaagggccaaatctattttgtaaaagcgtaaacacaacaaaatatcttctagtctatgtgaccatttcattctccagctcactactacaaaggttaaaaacaaaatttctgtacctgaatacctattggaaatcatagaatcttaaaactgactgttcacattgactggtatcactgatttctttaacacaggacacttaaaaaaaaaacaaataaaaacttccttttttagcattgtattttatagaacatgcaacattatccattatttgtaagaaatataataagccagaaataaaccaggaaaaatgcccaaagtgggaaaggcttactttttatgtagataagcagtgagaaactgaggtagaagatgagaaggtagttaatgttcttaagtgccatggtcttatttagagaacatcctctggtgtgttgctggtggtctggtcccagtccggctcctgatccctgtctgtctcagagaggagcgggtgcctcagaacccccaggtgccatctctgtcccaccctacttacagctccttcacagaaaatacagggacttagattcaaaatgcagtttgtgcttcttagcatcacttacacgggaggatggggtgatttttcaaacctggtgcagattttttcaggctggattggattcattcccccctcaagcctttgctgcgagttttcttctgttcatgctgcctcctcaaaagggcctacattagaatagtgtcttcaattgctctcaatagagggattaatttctgataactgccttgccacacaattatgatctggcaacttttaaaggaataccgtatgttcctgtatatttactttcatcttcagaaaataattcacagacaagtaatcttttctgttcataaattatattcccacaactcagatttctgctgtttgtaagttgggccaagacagaagaaaacttaaactactgcataaaatgaacagagttctgaagatcattcaggggcagattttgtcgtaagtccagagctcattttattctcggttcatgaaattatatgctctgggatttcttgagcttttgttttactataattgatgaatgtaaacatgtttgcttatttaaaaaatacacttgctttaaatacacaatattttctcagattaaattgttcaagtccttaaaattgtatttttattagacaccatgaaaacatccattaattaaaaccagaatgctttattttctaattggtgttagtgctagtacagagcctttttccattgttaaaactgttcactgttacactttaaaatgcaatttctatagctgatttttacaaagctttataaatctgccagatatttaactatataacatatattttgaagtctttatattttctgcccatgtctctaatattttgacagtcagcttaatgttttttatcaatattattctctcacatactcacagatttacttgctgaagtaggatttatccatttaaaattatttaatttttatagaattcatgacaattattatttttaaagattttttcctcccctcatgcaaataatttaacttgggcaatttaacaattagagtaaaagaatttcagattacagaagcattattaactccctattctaatccctgtgttttgtcaattggagaattgagaagcagagcaattattctgtgtgcccagagtcatctggtgggtcagtgtcaacattaggaccagagtcttcccatgatttctagaacattagttcttcactaaatcttgtgaagtctcttttcatctttattcttatgttttctgtcatgccttttgcaacgataccattctgggacatctacatactgaaccaacttgatctccattcgttctaaaaaggcctccaccatgaaccccaagactaaggaatttacaacatggaaggccgattgatagactggaaaaaaaaatgaatagactcaggtaaagaatcttatggtattagaaagccttctgttagggtgtctttaattatgagtgtcacaatcaaagaaacaaagaaaattagtttttcaaaagacaaaagtgtcgaagaaaataagtggttgagagaacatgttatacaaaggatggttataggaattatatacatggggtttgaatataaaaaagtaagtggatatagccattatacaaatgagtcaatggctaccatgtgtcagatttgggctagtcaggaattcctttagaaaaacatataatatttacgttgaattttcaagcataagtatgggtatgctgcggtctgaatgttttccccccttcccaaattcacatgttgaaacctaatccccaatgtgatagtattaagaggtggggagttttgaaaggtggttagacctaaccctcatgaatgggattactgcccttataaaagaggcctgagggagtttatttgccccttgcaccacatgaggacacatagaaggaaccttctatgaggaacaggcccttggcagctaccaaatttgctggtaccttgatgttcctcttcccagtctccaaaattataagaagtcaatttctcttgttataaattacccagtct

SEQ ID NO: 478 - DNA, 4001 bp, Homo sapiens
aaagaagacagctggcttgattccaaagccccaaagagttgccaaaacaaacttttaccacacagctgcctggacctggtggtcgggaggagcacctcagtggtaaggcttgggaagcccaggtgagaactcagcagagcaatgaagcccttgaatcagatgtcctgtcttctttatcatgcgccagctgggtgactttgaacaaattacttaacctcagtttctcttctgtaaaatgggtataattgcactctcctacgcaagtcattatgagaatcagattgtgccacataaagtcctgagaatattcaaggactttgtcgcataaaatccttaaaatactcgaaacagtcgatatgtgatcgctgctatcataattaactatcagaaagccaccttcttgttcaggcatgaattatagtattctgcctttcacaaacatttcaagcctttctacctgggtggagaaacgaatgaagaacaaataaaaggtgttctcaggaggtagaagctttattatgacatcttcaaaagacaatcaaatcaatagacatttgctgagcacctgctgtgtgcaagcccgtgtagacagtagggtccagtgtcccacgcatggctctcgaatccccggggagaaaaatcacatcggggtcagggagttttgcgtggctgagaacaaagtgggtttctgaacatcaaagtgcaattcgctttacggggcaaactccgaggcccagccccgcgtgggagccgcagcggggcgggcccgctctgggctgggcgggtttctctagcgcagcgctgggggttgcgggcctctcagcagccggagcagcatcctgagctccggttgttggagcgctgggacctctggctgccgcccccgcagcagcagcaaccactactccgctgtcggcggcgtctccttgggaagcagcagcaactggtggagctggagccgcagcagcctgagtcgccgcagcagcccctgccggagccgcagcaggaggaggaggaggcgggcgccggggtgggcgccggggcgggacacggagcggggccctgggacgaccccttggaaaagcctttggcggaaacggcgctctgttgagaggacatcgcggagctcctcacgacaaacctggaagaaaggcagcctttcaaaggcgagccggctttttctttccaccaatggaactctgtctgggcttttgagattcggcttagtgtacaagtcagcctggcctgggacaaggagggaaaagcacccagaaagagcggacgcaaagaagcaaatccaagcaggtgtttccagtgagttaaacatgctcagagcaggacacaatccatgcaatgaatcaatgcatttccattttctctgactagaagaagactgctcaagttctccacagtggaaaataaacagcacactgcggcaacttatctgtatgatccagtccaaaatctccacttggcttttttcttgtccctcattttactttcctaccgaccttcgactgtatcttcctagttactacacccccatcagttagaaaacacccaagtccaacaggcggtcccacctgctgggtctaaataatccacaggccagaagcatgtcctgatcattctttcttgcctacgcctctcatgccccacaaccatgtgggaaaggagagttgtgccaatataaataaccccatccagggagctgaaagacctgggttctagtcacagctcttctgcggacttgctgtgtacccttgcaaaaaccacctcctatgttgcctttatgtcctcattagtaccttaagaggttggctcactagaagcgtaggtgccttgcgggacaccccttccacatctatctgctgcctgtgttctgtttgctcctcccctgtgccctcaactcatcccaccctctcccccagaccctgctaggagacttaccagaccctggctccactgaaagactcactacgttctccaactggaatgggccacctgctaggcagtggattgagcagcgtccagccagagaacctttttataagaagtattcaggttcaggctcttgggaggggcccatttcccaacagacgtgctcagctgacactcacatcccagagacattcatcactcaggtagcattgtaggtggtgcatgtgggcatctaagtcacttcacagaggtgccaggattgctatggcatgtttactttccaaacagggcactgtttgtacctgggaggctgtgtgtatgctaagagagggcatggggctcaaatgcagggaggtctggaacccctgcccttgtcttcaatacacacacacacacacacacacacacacacacacacacacacagacggctccacttgcccacacatccattcctatgtagtcatctacttggtaggtggtagttcacctatttttatcttgattctcatctctctggctcttggtccttggctccccagggcagaccacaagctatgcgataagcctgctgggtttcatccatatgcttcaagatgcagtgagtgaagatgatgacggggatgcacctttgggaaccccaggggtgatttctctctgtcactggagacaggaagaaaaacctaggcaaagttaaggaaccataagaccagaaaagttgtgaatgtagtcaggttgccatatccccataatacagcatggtatgacaaagagaaaaatgtgtgcaggacagtggcccaattgcaaaaaggctagtcagcctgtgggactcctgcttcttatcccacccccaaccaccaatctgcctttgaagataagttctccctagggccactgcccagtgcaaaagaaaatgggaaaggaagaagggagggagggaaagaagaaaaaaaagagaaagaaagaaagaaagttctttccaaaggtccaaagtgttcatgatagatagtgttttcagaataactaatttttaagaattggaggatactttggcagtcaacttcagaactgcttcttaatcaaattgcccacaactgtgaatgtgaactataacagaagtccaagactaagaattcaggaattaaggatgagagacaggtttgggggcgagtgagctgggagtggctcaagggactaggcgaggaaagataagtcacaaaagataccagtttcatttaacatggatttagagcctgattaacaggttgccagttcctagagcacctgttggtgagtataggtgagacattccaaaaagtaaagtcaatattagaacagagaaggaagtaatgaaataacaagacagaggcaggatctcctctgggaaaatgggcaaagttcttttaaaaaaaaaaaaaaagaatgaagaacgtttggtaggaatcagtataaggagataatctgggcaagtgcctactcattctgtgggcatcctatgatctcataaaccagcttactttatttatcgctattaactcttatcaaaggaggcatcaattgtttatcttttatattaaaggctgatttggaattaacttttctagttatcttttctaggtacattatgagtgtctcctgaaggaaccagcccattcctaaagaaatgttgcttggaaaacccaacacagggaccaaaacccctgtactcttatacctctcactgcacacacacacacacacacacacacacacacacacacgtacgtcccaaccacatagagacagtctttgcaaagaagggtgtctttctcagttctttacccagattcaaatccaggatttcagcatgcagggaaaatgtgctcagacgtttcatatctgcctccaaaactcactcactgcccacccagctctccctctagccaactgatggaaacacctgagcttataataatcagaaaagtaaagagtgtccatttattagagcccaggatgagcacttcaggcaatcttattccccatgaatggggacaagcaatttttcaaactgtgacccatgct

SEQ ID NO: 479 - DNA, 4001 bp, Homo sapiens
atcccagcactttgggaggcagaggcaggcggatcacaaggtcaggagttcaagaccagcctggccaatatggtggaaacccgtctctactaaaaatacaaaaattagccaggcatggtggcaggcacctgtagtcccagctacttgggaggctgaggcaggagaatcgcttgaacccgggaggcagaggttgcagtgagctgagatggtgccaccacactccagcctgggtgacagagtgagactccgtctcaaaaaaaaaaaaaaaaaaaattgttcatgttagtcgggcacagtggctcatgcctgtaatcccaccaccctgggaggctgaggtaggcagatcacttgaactcaggagattaagaccagcctgagcctgggcaacatggcaaaaccccaaaaccccatctctacaaaaattagccagacgtggtggcacacacctgtagtcccagctactcaggaggctgaggcaggaggattgcttgagcccaagatgttgaggatgcagtgagccgtgattgcaccactgcactccagcctggatgacagagtaagaccctggctcaaaaaataaaaaatagttcaactgttcatgtctccttggtcttcaggcccaatgccacaaaaaccggggcaaaggcagttcatcatcagtttccattccctcatccctttgctctgtctgtgtgattatatatgtatcaaggagtagtggttctggctgacaccaagactcaccagggttgtacagggcactggggctacggtgcctgctctgggcaggatgtgggcatgagcatcaaagggcagctcactgaccatgcaggaatcaggcaccataaatgctgggctccactgatctggagtagaaaacaggtagctgggagaaaggagacttaggaacaccctgacagccgcagggcctgggtagtggcacaggttgggtaaacccccttaaccccatggttagggccagtcccgaagggccatttcccccttcccacaaagaacactgacctagctggatggagataaggcctacatttggcccagtttccccctgcatcctctccagggcccctgcctcatagacaacctcatagagcataggagaactggttgccctgggggcagggggactgtctggatggcaggggtcctcagagatgccactgtcactgccaggagatgcttctgagcagtacacctcattgggatcaatgaaaagcttcaagaaatcttcaggctcactctcttgaaggccctacagtaggaaaaggttatatatatgtgcagggaagaattttggaagtcctccctgacttatgcttcattttcagtcctttcacttcttgggcatggagacagttattatacaacttacgtctattttgggggtggtctgttttcagacctgtctccaagtgggagctgaagcctcttatcacagagttgtgtctcaaccccacccccactcccactcgtcacactcacacagccacggtccccaccggacttccagccttgcagtccctgttcctgtagcctagttaccggaacctctggaggggggcagtggagtcccagctccaggacggatcctgtcgagaagatatcctctgggggctccagccacgcgtccagcaggtcagggattccgagatccatgcttctgcaggaaggcgtgtgggacggagggttgcagaaacggaatgatggctgcttactaccccctacagtttctgggctcctctgctcccttttccattatccccgcccccccactccttcctcactagcaagccccctcacctgtcccctcgatatttcaccttcagccctatccctcaggtttagacaaagaggccccccccaagcattacctgttctgaagagcccagccctgtcaagccagcatagcccgttgacctccccaaacactacaccttttctttcttccaggatctcgtatcctggacctgccagccaaaccccgcccccagccttacactacaaaagtggatgccaccttgccaggagccacggtagggccgctgtatctgggagtaggggactaagagtctgagggtccacaaacggaatttaagaagtaggtagccgcgccctttctgctgcagttttctcttagctatagtaaatcttcctgagggtttggtgtctcctagctgaagaacagaaaaggctgtgactggagcacaggactcctgaatgcctgttctgtagccctcgcttttgcaagagggagatcatggcagggttgtaaacaaaggcggaaagagtcaagagacctgcgaatttactagggcatcccctcgcccaccgcgtggcgctcttcccaaagctgagtcctgattggaagctgaagacttaggtttcggaggggcaggacatcgagccaatggcacactaccctctcaaggccgcctcttccgtaactggtcggagacagtttggctgttcaggagagtcaggccaatggggccgcagttctttcttttttttttctttattcttatttttggagacagggtctcgctctgttgcccaggctggagtgcggtggtgcgatcacggttccatgcagcccccgacctcccgggctcaggtgattctcccgcctcagcaccgcgagcagctaggaccacaggcgcgagccactgcgtccggccggcgggacttatttgtcaggcggggattgggttccgccagcctaaagggaggggtaagcgccagaatatgaatcgccgggaagctgggagaaagctccgggaaaccctgagcagccaggtttgtcttcgcgcgccacgtgactcggaagctccggtttcacccaggcggggagtcaacagcccgctgaccccagtggagcggtgatcctcgctcggcaggcggcaggagcgcgatggcgggtttccccgtccgcaagccgagcagtgtggcgttaatggagaacagcagctgtgcgcacacgctcgctgcacgctgctcattcacggagggacacggggcaggaaaactgcaacaagttaaaaagccttttgcgtttgttgtcttattgtttgcatacagttaccgggaacattatgtcccacacttgtataatttacaaaacgttttcataaaaattgttctcttccttaatccataacagttctgaggcacacacggcgggtaatattttgcaaattttacctatgaggaggcagatccatgactagaaagtagtaataccaaaactcagggttgattgattatttttatttttttgccttggtctaatgtctgatggtccaggaattcacttcaagtaaaacaatggaggtaaactgatacaggtatggttttcagtagtatttcagaaaagggtagctgggtgagtaaaacagtagtttggagtgtgaatcccagaactcaaactgctactaattatccttatgaagatttgaacgggctaagggtaaaaacgggaacagggtctagtcaggcatttccatgttactcatataattcttacagcagatggagctgacaagtttgtttgtttgtttttcttttgctctgtggcccaggctggagtgcagaggctcgatctcggctcactgcaagctccgcctcccgggttcacgccattctcctgcctcagcctccctagtagctgggactacaggcgcccagctaatttttttgtatttttagtagagacagggtttcaccgtgttagccagggtggtctcgatctgacctcgtgatccgtccacctcggcctcccaatgtgctgggattacaggcgtgagccaccacgcccgtccgagctgacaagtttaagtaactttctcaaggttaccctgtaagtagctgaaccaagatttggatgcttcagcccatgttcttcacactatcaacccaccttgtggggctttctcagatttcttatctgtctttcccgctcatatctctccatcctgctcaagtag

SEQ ID NO: 480 - DNA, 4001 bp, Homo sapiens
gattaagaccagcctgagcctgggcaacatggcaaaaccccaaaaccccatctctacaaaaattagccagacgtggtggcacacacctgtagtcccagctactcaggaggctgaggcaggaggattgcttgagcccaagatgttgaggatgcagtgagccgtgattgcaccactgcactccagcctggatgacagagtaagaccctggctcaaaaaataaaaaatagttcaactgttcatgtctccttggtcttcaggcccaatgccacaaaaaccggggcaaaggcagttcatcatcagtttccattccctcatccctttgctctgtctgtgtgattatatatgtatcaaggagtagtggttctggctgacaccaagactcaccagggttgtacagggcactggggctacggtgcctgctctgggcaggatgtgggcatgagcatcaaagggcagctcactgaccatgcaggaatcaggcaccataaatgctgggctccactgatctggagtagaaaacaggtagctgggagaaaggagacttaggaacaccctgacagccgcagggcctgggtagtggcacaggttgggtaaacccccttaaccccatggttagggccagtcccgaagggccatttcccccttcccacaaagaacactgacctagctggatggagataaggcctacatttggcccagtttccccctgcatcctctccagggcccctgcctcatagacaacctcatagagcataggagaactggttgccctgggggcagggggactgtctggatggcaggggtcctcagagatgccactgtcactgccaggagatgcttctgagcagtacacctcattgggatcaatgaaaagcttcaagaaatcttcaggctcactctcttgaaggccctacagtaggaaaaggttatatatatgtgcagggaagaattttggaagtcctccctgacttatgcttcattttcagtcctttcacttcttgggcatggagacagttattatacaacttacgtctattttgggggtggtctgttttcagacctgtctccaagtgggagctgaagcctcttatcacagagttgtgtctcaaccccacccccactcccactcgtcacactcacacagccacggtccccaccggacttccagccttgcagtccctgttcctgtagcctagttaccggaacctctggaggggggcagtggagtcccagctccaggacggatcctgtcgagaagatatcctctgggggctccagccacgcgtccagcaggtcagggattccgagatccatgcttctgcaggaaggcgtgtgggacggagggttgcagaaacggaatgatggctgcttactaccccctacagtttctgggctcctctgctcccttttccattatccccgcccccccactccttcctcactagcaagccccctcacctgtcccctcgatatttcaccttcagccctatccctcaggtttagacaaagaggccccccccaagcattacctgttctgaagagcccagccctgtcaagccagcatagcccgttgacctccccaaacactacaccttttctttcttccaggatctcgtatcctggacctgccagccaaaccccgcccccagccttacactacaaaagtggatgccaccttgccaggagccacggtagggccgctgtatctgggagtaggggactaagagtctgagggtccacaaacggaatttaagaagtaggtagccgcgccctttctgctgcagttttctcttagctatagtaaatcttcctgagggtttggtgtctcctagctgaagaacagaaaaggctgtgactggagcacaggactcctgaatgcctgttctgtagccctcgcttttgcaagagggagatcatggcagggttgtaaacaaaggcggaaagagtcaagagacctgcgaatttactagggcatcccctcgcccaccgcgtggcgctcttcccaaagctgagtcctgattggaagctgaagacttaggtttcggaggggcaggacatcgagccaatggcacactaccctctcaaggccgcctcttccgtaactggtcggagacagtttggctgttcaggagagtcaggccaatggggccgcagttctttcttttttttttctttattcttatttttggagacagggtctcgctctgttgcccaggctggagtgcggtggtgcgatcacggttccatgcagcccccgacctcccgggctcaggtgattctcccgcctcagcaccgcgagcagctaggaccacaggcgcgagccactgcgtccggccggcgggacttatttgtcaggcggggattgggttccgccagcctaaagggaggggtaagcgccagaatatgaatcgccgggaagctgggagaaagctccgggaaaccctgagcagccaggtttgtcttcgcgcgccacgtgactcggaagctccggtttcacccaggcggggagtcaacagcccgctgaccccagtggagcggtgatcctcgctcggcaggcggcaggagcgcgatggcgggtttccccgtccgcaagccgagcagtgtggcgttaatggagaacagcagctgtgcgcacacgctcgctgcacgctgctcattcacggagggacacggggcaggaaaactgcaacaagttaaaaagccttttgcgtttgttgtcttattgtttgcatacagttaccgggaacattatgtcccacacttgtataatttacaaaacgttttcataaaaattgttctcttccttaatccataacagttctgaggcacacacggcgggtaatattttgcaaattttacctatgaggaggcagatccatgactagaaagtagtaataccaaaactcagggttgattgattatttttatttttttgccttggtctaatgtctgatggtccaggaattcacttcaagtaaaacaatggaggtaaactgatacaggtatggttttcagtagtatttcagaaaagggtagctgggtgagtaaaacagtagtttggagtgtgaatcccagaactcaaactgctactaattatccttatgaagatttgaacgggctaagggtaaaaacgggaacagggtctagtcaggcatttccatgttactcatataattcttacagcagatggagctgacaagtttgtttgtttgtttttcttttgctctgtggcccaggctggagtgcagaggctcgatctcggctcactgcaagctccgcctcccgggttcacgccattctcctgcctcagcctccctagtagctgggactacaggcgcccagctaatttttttgtatttttagtagagacagggtttcaccgtgttagccagggtggtctcgatctgacctcgtgatccgtccacctcggcctcccaatgtgctgggattacaggcgtgagccaccacgcccgtccgagctgacaagtttaagtaactttctcaaggttaccctgtaagtagctgaaccaagatttggatgcttcagcccatgttcttcacactatcaacccaccttgtggggctttctcagatttcttatctgtctttcccgctcatatctctccatcctgctcaagtagtgaagagacaaagcagccttcctagattgatgcagagctccaaggaaagcaaagctgttcttgttgagatcattctgagagcgagaaaggtggttaaatacatttcaaagggcttcctgcgggctgtatgtgcagagatgatttgagtggggaatgtagttagcttccgttgatgttagaactggaaggaccctctgcagtcatctgcttgtttaacttcctccttgcccctgatttatcaaactctggtgaggaaaactgacttgcctaaaatcatacatcaaggtaaggtaaaattgaggagatctattgggccgggtgtggtggctcacacctgcagtcccagcactttgggaggct

SEQ ID NO: 481 - DNA, 4001 bp, Homo sapiens
ttgagcaaacgcctaaaggtgtggaatgggctgggaataagaaaatggtgaactggggtgtatctgccttagctaaaagagggcactgcttctgtttttgctcaaagagtgcaggcccacagtgtcactggatcttcccatttttcaagaaaagttagagatttacattttaaagtaaaatctaaattttaaaatgttggtaacaaattcaaatttattaaaaacaaaacagaactttgtgtaggccaaaccggtctgtgggacatattcagctgatgggccaccagcctgtgataggtggtttgaagaaagatgaacctgagatgaaactaggggtttgcccgctggctttaaacaagttacttaacctaggtaggcctcaagttcttcatctgcagaatggggtatataatacctacttcaaagaattaatagaagagacaacgaatggaaggcaaatggaaaagtgattaatcaagcatcagtttcttgcatcctgtctttatcaacaatgttgtactttcagagttgaactcaaatgtgagagctttgtcaaaaagaccctccatcaaatcaggctccattcctggactctgtgtgtctccggcctcccaagctgggtgtctgtgaccccatccctgagacagcagagatccatcagagttgtaagtgtggccctgcaccagaaggtgggcaaagggcgaggaagagatacaccttcaatcagctctgcatcttactgaggagccactatgcctgtggaggcctaaagactgcagtaatcattgtaatcgtccatgatattgtacgttagcgtcttgctgcaggagggaaaagcttaattcaggaagggtaagagagtgagaaaccctgaagtcacatattaaagtgcttaagtacctaacaatctctatgccctgtaaaacctttaagaataggagcccaggcagggcgcggtggttcacgcctgtaatcccagcactttgggaggctgagatgggtggatcacgtgaggtcaggagtttgagaccagcctggccaacatggtgaaaccccgcctctactaaaaatacaaaaattagccgggtgtggtggcacgcacctgtaatcccagctactcggtaggctgaggcacgagaatcgcttgaacctgggaggcagaggttgcagtaagctgagatagcgccactgcactccagcctgggccacaaagtgagattctgtctcaaagggaaaaaaaaaaaaaaagagaataggagcacagttaatagagacactgggccccaagacgactgagaaccactcacggatgagaagtcctcgggctgctggcagagaatttaccccaggtgcgtggcccagtggcggaggcttgtgggaaattcctggtacccagctgcccaacatctgggacgctgcaacgcccacctacctgcctgcgcggcagagaagcaacagccgttcgagccacgctccacttcccgggaagaattctggggagagtgaaggctcgctctgtggccgccccgcccacagcccgcctggggaagccgcgggccccagctcacctgcaggttgctcacggagagctgcagcgggctcaggtagaaatagggcacgccgctgcccgcgcccgggggcccgtcgctgagcgagaggacgtcggcgaagggccggccgcgcaccgcctccagcgtggagatggtggccagagcgccccagtcggagacgtgcgtcacgaagcgggccacgcgcgccgcgtcctcgcggggtggtagcggcggcagccgggaggcctcgtcccagtccccgtggtcccggccgccgcgaccccgcgcgggcgacacgagcagcgccaacagcgtcgacgccagcagggcggcgagcagtgcgcgcgcggacccgcgggatagcccggccatggcggtgtctccaggaagagtcccgggccccaagacctgcagggacccagccggagctcggcgcgcccaggccccgccccctccgcgaggcgccaatcagagctaagcacaatgcagggggcggggtccctctgcagctccgcaacctgcaggagaagggattggttcatctgcattccaatcgctctgcctgccctctttaaggattgtgaatttgtcctaaacgggatatttgttttgttttgtttgacaggcggaaaaagaaaggcttgaagaaatcaagcaacttgcccaaatcgtactgctaggaaaagaccagcctctttacacaggcacacaccccctccttttaatacctttggagatgaatatctggcatctgagaggaaatgctgcattttctacccatgcgcctcttttctgttgaatttaccatcagctccaaagaacagcgagggtcccagcgttgtagaagcccagactcaggctcgtgtaccccatgtgtagctgatgccaaacactgacatataggtgcttggagataaaagtttattcgatttggccaaagcgagaaggcgggagggcaagatctctcaaatccgccctaacaaaaagaagaagcagagagtgtttatgcggccagcgagtcagggagggggagtttcagggaatcgagggaaaaagtctgtgtttcttcagtctcagataattccttgaacaatcagacttctgggcgacagaagctggcctcaaagtacttcaaaggacttattcctcctgcaaactttttcgtaaccctgaagttattatctcctcctgcttgataaagaaacagtacatcagcagtttatgattatgttgtaggaacaagggatattgggcaaaaagagagttgtcaacatgtgcaagcaagggcctgatcagaattttcattatttcagtcactaacaaatgctggggtgctgaaatctcaaggggcccacttacactagtagtaaagttaggcagaagcccgaaagttcaagacctttaaaaaactttttatttacttattttaaaatttttaatttttgtgggtacatagtaggtgtatacatttatggggtacatgagatattttgctacaggcatacaatgcataatagtcatatcagggtaaatggggtatccattgcctcaagcatttatcctttgtgttacaaacaatccaattatacttttagttattttaaatgtacacttaaattattattggctatagtcaccctgttgtgctatgaaatactaggtcttattctaactattttttgtacccattaaccatccccactcctcccctgcaagtccccccactacccttcctggcctctggtaaccatccctctactctctgtctccatgagttcaattgtttccatttaggctcccacaaataagtgaggatgtgtgaagtttgtctttctgtgcctggcttatttcacttcacgtaataacctccagttccaactatgttgttgcaaagacagacaggatcccattcattttttatggctgaatagtactccattgtgtatatataccacattttctttatccattcatctgatgatggacacttaggttgcttccaaatcttagctgttgtgaatagtgctgcagtaaacacaggagtgcagacatctctcaatatactgattttctttcttttagggatatacctagctgtgggattgctggatcatatggtacctctatttttaattttttgaggaactccaaatttttttccaaagcggttattctaatttacattcccaccaacagtgtacaagggtttccttttccccacatcctcaccaacatttgttattgcccgtcaagaccttttaaactactggcccaggagtccctcatatagacgcacaaagggattgttagtctactatcaatatcccatgtacaaatttgaacttaccagttcaggacctgttaagacattaagcttggggtcggcggtttcatgaatttattgcccccgctgcccttccctgctccatgtaagggacattccttttgctt

SEQ ID NO: 482 - DNA, 4001 bp, Homo sapiens
gctccataatcaacctcagctatttcctttatagcacgtctgctgctaggtctttccttgcacgttcagctctgtttttagttttcctttgtcctttcctacataatgcatcttatgtatgggaaggaggagcacacaggatggaggcaggttcctgagtcaggattaaatgctggccccaccacttaagtatggtgtgagctgggacaagttgctttgcctctccatgcctcagtttactactcattgtaattgaaggtgatattagtactctgtgggattattgtgaagatttaaagacataattcataaaaagcacttggcagatgcctggcttatattaagtgctccttattaaatataattattatgctattatatacatatacacacatataatttttgtacacctatataatcactttcctgtacatcatctcttctaatccttattatttccacttttttttataggtgaggaaacaggctcagagaagttaggccacacaatttttaaggagccaagaaatcctaggatccatttttccttaacccaaatgcaatgggctttctagaatgtaccctgtggacaggatttatttatttatcacaagggtgttagggtcccatcgggaacaccaaaaggaagtaaatacatctgtgagtcaacccctgtcttggatgggagccaagcagaaattccagggacacagccctcccttcttgttttttttgggaaagtgggaagaaactgggctaccacctgctgggaatgctcaggaggggggaaccttctttgggtgggaggccttccagttctgagggtccaagtttctctgcatgtcgcctctgtccacagccctgagacttatcagagaagtcagcttgcccaacaggcacgtggctccatcaggcccagatttctggtgacctatgagttggttcctaatcaaagggaaagcttttctttttcattagccagaaatctagaggtaggttgaggtgaggcctgggtttggttgcatgagcaaaaggaaaagagacttgaagattcattaagcagaagccttggagagacccaaaggaggagatggtatcaaagatgacaagtctcaaatgcaaggggagatggagcctgtagcagctggaaagccagagagaggatgggacgaggcagatataggtaggagaagaaagagaaaaaaggaaggaaggagacttgagttctagaaaaagcagattagtgtggccatgaggactcagtaagtcatagcaaaaggtgggctgttcaggagaaaccctttctaggacctggtaaccaacaatttcaggcaaacttttcatcaaggtaaaaaactggggatgttttcctcaacatagatgaaaaatatctttctttttttttaaaaccatgtagcagactttaaccactgacctttagataataaaataataagatgaccttttagttacattttagattccttagaaaaatctacacatattttgcctaaatatcaccctggtgtaggagaggggaatcatgtaaaccccttcatccatgacacagtttgatcttattgtctaggttggcataagtaaactgattctgatcccatagactctcagcactgcaaagaagcttccagagccttagaaaaaagaaacctttgctgatccaggaaggcacatgggtggccccatagccgctgcccacacagtttcccagtgagaggagctgctcccaggccagcctcagggaggaggagaaagcctgattgcttcaggagagcatgtttcccaacggtagcgttggtttgcccagtgctcacagctagctctgaaggatgcatagtccatacctgactgccccagttttatgagctcagatcaccaagacactgagaatgagaaagaggtttcttatgaggggacttacctaatgcccaggtgggatgaaacaagtggctgttaagtggtgtgaggagtaccaggtcagtgtgatgagaaccttttataggggttttaaccaaggctcttgttttagacaggatatcctgccctatgggaaggcttgattcatccaagatccagcccagcccagccacacctcctcttgtctctgttttacctgctgatgtgtgactgccttggtctaattaacaggcccctcctaccacatttggtaccttctgtagctgagtcctcttgacagggaagcttctttccattgtgatgggctcagcagtgcttggtacaggctggggtcctggtgaacattctttgtctctatgagcctacaaagttatgggactctttccttttttttttttttttttttttgagatggagtcctgctctgtcgcccaggctggagtgcagtggtgcgatcttggctcactgcaacctccgcctcctgggttcaagcaattccctgcctcagactcctgagtagctgggattacaggtgcctgccaccatgcccagttaatttttgtatttttagtagagacagggtttcaccatgttgaacaggctgatcttgaactcctgacctcatgattcacctgcctctgcctcccaaagtgctgggattataggtgtgagccaccgtgcctggccactgtttccttttttaatataaatgttcaagaatatatctattgaggttaacttttacaaagtagccactctgagagggcacacatgtttttgtggtgatgttacttagaactgttattacttagaacattttttgaattcttgttttgtaagtgcctttcacacctagtgtatgagacacaagaaagccagtttcatctctttaaagttggtctcatttttaattaaaacaaaaaaagttaataccttccccaccccatgctatgggtaggtagcattttgtagctgatgagaaaaaaggcttaccatgatcatgtggtaactcctcattgcaaggacaggaaactcaactggtggctaatcagcaaatatttatggaaagcttgctccatttcaggcagagggctaaggccctaggaatacagtgttgaatacgatggcagcagtttcaactctcatgaagtctatagcctggccatcccaggggtaagtccccaagaggttaatgataatggtattgccatttcatttcatttgattttattccattttcattaccatctcatcttatttgatctccctagcaatcctctgaggtggtatggctaagcccaattcataaatgagaacactgagaaatcctcagagaagtagccactctgtgaagcggagacggtgctggactagagcccctcagactccaggcctgtgttctctctgttgcaccatgctgccatttattcttctctcattgagttttggcaccttatgaacatcacacttatcctcaatgcatgaagaaccattcctgaggaggaagttttctgagctcagaagccaagtcccaaagagtgctcttgagtggcactttgcagataatatatactgtgtagcttcctgagtgactctggaagggaaagccatctttaccatcctcacttatagatcagcatgcaacagacaggaaagggaacaacaggataggaaggcatggtaagggccttggttgaagagactggtgtattgagggcagccctgtagcaacagcacagcctccagcacttcccctcagggcacagagcactggggagttccagactgcaggagggcaggatgcaggctttgtgtttggagagatctgtctacatggggacaggttggctccagtcctggggtgaaggtggggtaggcataccagccagggaaaagcagagtaggggcttcaacctttgggagcaagagggggctgaggttgcttctgcctgatcagagttagaagaaggccagtatgagagggtgaagttggagaacaagagggagagccgattagaccttcttctgtggtggtgtttgaagctttttctgatggggcttagaac

SEQ ID NO: 483 - DNA, 4001 bp, Homo sapiens
cccagcactttgggagtcgagataggaggatcacctgaggtcaggagtttgagactagcctggccaacacggcgaagccctgtctctactaaaaatacaaaaattagctgggcatggtggtgtatgcctgtagtcccagctacttgggaggctgagacagcagaatcacttgaaccggggaggtggaggttgcagtgagctgagattgcgccactgcactccagcctgggcaacacagcgagactctgtctcaaaaaaaaaaaaaaaaaaaaaaaaggtagaatagtagtaaccagatcctcccagaaaagcatcaaagcctcgctcaagagaagggcttcatggaactttaaaggctagggctcaggagagcatagcataggtcaggttgtgaggagaaggagaaagagagaagagggaaagaaaggccagcgggagaagcggggttgtccacctcctgtgggttccccttctaccctgggagaactggacatacaccccaggtgtcagggtgagggccctctgagtctctccctgtctggggctccagggcgccaacatccctggcgctcccaaggagggggcccgtctgtagcttgggagttgaacacagacaatggttagagcaccaaaacgccacacgccagcacaccagctgcaactgagtgtgcctttcccagatcctcaagccacataactacaccgtgtgcgccacccactgagaggagcagggaccatccgccttcctgcccacgtgggaaacggatggacggcgccatccactcagacttccgcaaaaccctggtctgagctgagctgccctcttcctgtatcttgggttcagccagctcacaccttccccgggtgggaatacgggatttggggttcacatctctgcagcaggctacaggcaagcacgcaggagatgctcggcccttccttctagttgcaccacatgcggaataagtctggacaaattacatccctgagcctctgtttcctcatctgtaaaatgggttcttctgtcataaagctgtgcctgccccacagtgagttacagtcatgatcatcatggtgactgctcaggaaagggacatgagaagaggtaaaatgtgggtggtgtttgtggaggggagcggatgggggtggcacctgggctctcaggctgggagaggttgcgggtgacaatctccctgataagggcaggcaggctggtgatctgagcgtcctgggccaggtcccgcgcgcccaagcctttctcctggcacaggacgctgctctccagtgtctgtgggaaaagcgagagggtcttcaggggacatgggacccggggctccctggcctcgtggggagagccacagaatcctactgcccaagatacaggtccccaggagccccctcaagatggagtgaagcctgggagttagaatccaaaaaatccccatgcaaagagcctcttgtgtgctcactgccccaggaagaaggcccagggccagagatgagaaccaaaccctacgggtaactcccaaaccccactggaggcagtccagtgttgggggccccaatccggttccgaccctagatggatgaggatctggctatgccagaggtcccccaagccctaaaatctggcagtagagacccccttctcccaacccagggcactgggatgagggagccacagcaggtgcaccctgtgtgtacctctgccccccatcttgccaggaactgcaagcggggggcccctgtataccccaccaccaccacacctctcccaccccttgatccccaagacgcacacacctctcaccactcctgttaagtccacgctgccccgccccagacagggtgggcacagcccccaggacccacctggataaccgtctctagtgtcagctccacctcctgtgcccccgccagccccaagctcatgggggggaggctgtgggcatgcctccagcccccttctccaggaccccaagactagctcagtcagcacgcgccacagccaggatgctgtgctgagcaccaggcagattaagcttaaatccggcggcgcccccatgtgaccaccgcggtgggaggagcaggatgtgggctgaggagggaggggatgggaaaggacaggagaggagggaagcagaggcagggagccaaaggaagaggaaggatgaagagaggggaggagaagggagagaaaaggagggaggagagagaagagggaatgggaggaggaaacaggggagacacctggaggtcaggacctcacacactcttcaccctgcgcaggttgctgggtcctagagccctccaagcccagggggtggggtcagtagccatgcggcgggaaaggccagagtcctaagtatttgtgaccatctttctggcccagaacgggagtcacatggttagctaagaatgagaggatttacagcatgctgggagtatgttttcccacaacaggtgtagggcaaagaatgcaggctgtgagatcacccaggccaggcttggcacttagttgggcatgagcggtccagcctggactgatgagcatttatgcaacacctgcggcattcctaggtctgacctagacacagtggtagagcctcgaactacaaatgccctagccttgcccttcaggcacttattgggaagcttctggccccttcacacccaccccagcccccactagctgggtgcaccagggacactgactttgcctctctgagactcagtgtcctcttacgtaagatgtgataatattggtactcatctctcggagccgtccggggatgaaacagtatcgtgtgtgcatacccagcacatgacatggtgctggggggtcacgtggccaacactcaagaaatactcatttcattcatttgaaaatccagaaggtacagtcccagccaggcgcaggcactcatgcctgtaatctcggcattttgggaggacaaagcgggtggatcacctgaggtcaggagttcaagatcagcctgaccaatatggtgaaaccccgtctctaccaaaaatacaaaaattagccgggtgtggtggtgcacacctgtaatcccagctacttgggaggctgaggcaggagaatcgattgaactcaggaggcagaggttgcagtgagccaagatcgcgccattgcactccagcctgggcaacaagagtggaactttgtctcaaaaaaaaaaaaaaaaaaggcacagtccctatatcccagggccctgagacccagaggtcacccaccacctcccattgttctttccctggggcaaggaggctatgtgctctagtgcttaggcgcacagctctggagtcagtatcaggtctgaggttgcatgtgagactcagctctgtcacttgcaactatggtgttcaagacagtaagaccttgaacaggttacctccctgagcctcagttttctcatctctaaaaggagactaaaccaggccaggtgcagtggctcaagcctctaattccagcactttgggaggctgaggcgggcagatcacttgaggtcaggagtttgagaccagcctggccaacatagtgaaaccccatctctactaaaaatacaagaattggcctgtaatcccagcactttgggatgctgaggcaggcggatcaggaggtcaagagattaagaccatcctggcctacatggtgaaaccccgtctctattaaaaatacaaaaattagctaggcatggtggtgcacacctgtagtcccagctacctgggaggctgagtcaggagaatcgcttgaacctgggaggcagaggttgcagtgaggcgagatcatgccactgcactccagcctggcgacacagtaagactccgtctcaaaaatataaataaataaataaataaatataaaaaaaattagctggggcgtggtggcatgtgcatataatcctagctactcaggaggctgaggcaggggaatcacttgaacccaggaggaggaggttgcagtgagccgagattgtgcc

SEQ ID NO: 484 - DNA, 4001 bp, Homo sapiens
acacgtaactatccaactatcctccagatagggagctggggagatgggagatgggctcctctgacaggacaccctgtggttcacgtccactcttgtggcctgggtatattgggaatgcggggatgaagaaagaattcacagccccacaaggttcgtgtggaaaaggggaggagtttcccagaagagccataaaattaagaaagcactgcaagcaaacaaaaaccagtcatttaagttcttggcagtaacaacatatttatacctagtgcttcattttgctctggaaaaaaagcagatctgctctgctggggcaattctaatggcctttccagtgtgctttgagaaagtggagggactgcgtggtattgctgggcttcccatttcaggagacctgggcccagcagttctatgacatgatgatgagcactctggacccaaaccagacacctggccagtgtcctgattctgagactgaagagccctgtgaatgtgggcaatgccctcctgctttctgggggtcatgggtggggaattaaatagaagatcagcgcttccttctcagctcttgccttatgagttttttataacatcatttctcctttctgggtgttagttttctcatctatgtgaggtaagaaattatctccaagatctgtccaacttgaaataaaaatgaaaacaaaacacctcaaattctgattcttttggaccgtttcccagcatagttaacgagctcccagaccagacactttacctccattctcaggcgctgaggagggtggagcaggcctgcaatgcatataggggaacaaaggcccagagacagagacgtgggaaccatgcagtgtaaaaaagcgggaggtaccagagacagagacgtggggcccatgcggtgtaaaaaaccgggaggtaccttcaggacccacagctgggcctcagggccacagctggggtttggtgaacacttcgccttgcacttcatacttcagtgcccgccagttcaggacattaggactgaagggcccgccaagatagatggtgttaatctcatctggtgacagcacaaagtcccacatgttcacatttccaatgtctcccaccagggactggcttccttcaaagttcccaccgaaggaatcctgctcctgccccaagatgatgcttgcttctgcccccacagtgtatcccttcttcagactcttcctcaccctgggcttcccatctacccagaactccacgatccctgaggcggactcccagcttgtacaaatgtgtactggagctactgtgacttcaggaacctcgaataatatttcagacccacccactgtaaaactgtatcctatatccttagaccaaaatatgagaatctcattgtcttgtctcttggtggcatacgagaaaatactgtacccacgggtcgaggacagttccgtgtagaagtggaggcacacagtgaaggctttgagaggcttcgttaacggtgctttgagggatacataggaagtatccgactctttgggaaacacaaaagccttcctcgacatgtctgtgagccagaaaaacaagcaaatgtgagaggtttctcagatcacacagatctatcccctcacttacgtatagaatttaagattgagaaacagactgaccccttctccagttacacaccacacacacacacacacacacacacacacacacacacaccatgaaggatgctccactgttctgttcatacagtcttttttttttttttttgagactgttcatgcagtcttagaccccacccccatacctcagatcaaatctctcccatagcctggggtggcccttacctgtctggccaaaagcatgagagaggctggtcaagaccaagaaacacaacagcttctccatggtcacgtcctgctgccagtgatacaagggcctgaattcactcctttggaaaagatgtattcggctgaaagttcaggggctagaagtcctagatctcttgccttagagctacctcctcctgcctggatttatatccaaagcagtaagggagtttgcgccactatgtaaataattttccaacattgcttgttggggcaggtgtcagagcttcgggaagaggggaagcaaaattatttcagaacagagaaatcaatgtgagttatttattacaaactcctatgactactgaattaccaattctttatgacaggaaaaatgaagaaatctctcagggctccactttggctatctatcctgcgaaaataatgggaaatggtaacatattaaacgagtggccatctgggtgcacgtggtagctgcctctccaacacctacttcagcccaaatcatagagtttgacaaaggaaatctgacagcttctggagatggacattatcactaacccctttcaatttgcttatttacagactgggaaatgaggaaaacaaacatgctcctcccagagccatggacacatttttttattattattatactttaagttttagggtacatgtgcacaatgtgcaggttagttacatatgtatacatgtgccatgctggtgtgctgcacccattaactcatcatttagcattaggtatatcttctaatgctatccctcccccctccccccaccccacaacagtccccagagtgtgatgttccccttcctgtgtccaagtattctcattgttcaattcccatctatgagtgagaacacgcggtgtttggttttttgcatggacacattttctcagccaattgagtacacttattaagaactctctagacatcttggcactaaatgacggccctgacagtaaaagtccagtaaaatgtgtgcctgatcacagacatagcattatatcaaagtttcttccaacatttttctctgaatatgtaaagcttcaggcaggagtcaggataatctgattctactctttcctctattcacaagattcaagtaatccctccacactgtctgtcaatcttactacagttccctacttaactcactcttcaaaatgactattatactccttctccttgctcctcaagtccccaaaatctcatttattctttcattcagctgatgaactcacctttcattgagaagttagaagcaatcagaaaagaaccaccgtatcctttgtagtagagtcttctagccattccctaacatccattctctacttctcataagagaagaataacattttcagttgggcgcttggtcatcccctcaaacaccaaatttcccagcccccactgtagcttgcagtgatgatgtgattaaattaaggccaacgagatatgaacagaatagggaccatctctaggttgtgctctttaagaaaggtatgtgctttcccctcccacttccccctttttccctttgactagtattcagtcatgatagcaggagatggaatagttcactttcaggccagcaagtgtaagctgcatgttgaggttggcatggcaacaagatagatggagcctggataattgggtatggagccactgcatcagctctaggctgcctacctgaaaatttacttaaaggagaaatactctcctcttttgttaaatcactgttaactcagtctttctgttcttaacacctaactgatatccttatatatcctcctacaacccaatgtaccagcctttctgtcttcctctattaaaagggatgagctctccctgtgttacatctaaggccaacccttgcaattcttcagtggatcccagaccctgtcgactatgcaaggaattttgctcctataggtatcctctctatcttctgtattattaatttattcatctttacttgatcatttccacaaaaccatactataatatatttaatcttttagagaaagaagaaagaaaagagaaaaaaggaaggatgggagggagagagggaggaaggaaggaaaagtttacgtgggttgacaacctctattttccatctcctgttccctcctcaatccatggaaat

SEQ ID NO: 485 - DNA, 4001 bp, Homo sapiens
gtatagcctcccatggccatctctgtctcaaatgagccctcccacctggccagataacaggctgagtcccagatctcttgtccctagctctagacttttgggtcccctggccatgtatgcccactagacttttctgtgtagctgagaaattaaccaataggagcaaggtgggtagaaggggccttttaagagatcgaggcaccgtaaagagaagccccagcttttgagtttcgcacagcctttctttgcacatacgagccctaagatcccaccatgcctctgctagaatcacagtcctgagggcagggcctcacgctatcaagatcagcctcccatcttcctgtctctgtccccaacatgatgaaaaagctcctaaaggggagcagtctacagttagataataatcctcacaatggttacagtgggttatgcacacacatgcatttaagtgtgcacatgcgtgcacagacaccctcccagatttgcctccccacctaacttctgactcccacaaactagggcacatagtccctagagactcaaaggggaaaggacgagaaaaaaaaaaaagtaacagagtcaagggggatacacacaaaaatacaaccagagtcacagtcataaatgcaaccacagtcagaccagcagaaaaaggctagagatgttgtagtaatgttccaccatcaatccttaaattccttctagctctctgccatgaggaatcattgcaatatccttacctactgttgttttagaagaatgtgtccctaaattaagactgcataccacctaggcggactcctaccccttggtccctctgacctccagccttggaaagcaagaaaccaagccaggggggcttcagaggcagcctggcagaggcctgaaagttctttcaagaactcctaggaatgaatattctcaacacatagaagaccctccaaggcaccctacacactaacccacaaagcagccaactccctagaaagctcagcaaaccatagagttccacacaacttatggtcggacggttacccagttgtcggattcaaaaccctacctctcctccaaggaggccaggacaaaacaccaagcaatggacctcaccttcattcacgtcaggaaaccacaagaagtatttgaaaaaggaagcaaaaggacgggacgcaggaggggacttcctgccccactatacacagcaccgctcgttcaaaccactcaaggggccctttcccgggggcaccaaagcgcagaaggcagagggaccagtttggaggagatcacaaactcagaggagccaggttacagacaagcagccctcctcccaggccataccccaataccaggcatgcttcagtagcgtcctcgaggggactccgtcagggatgcacaaggaccactcacctcctacctccgccggacttcatctcccctctccgcccactcccacctcacgtactcggcccccagtcgcctctacaccccgaacctctccggtgtttcggtctcccccggcaaaatccttcttcctgcccctcggccctcaacctgcgcctcccaaacggcggcgcccgcgtcccctgctctgttccgcctccttcgctgcggcgcccgcccccgccccgcctctccggtctccgctccgtaactgctcagctctgctccggctccccggcgcggcccctcacccgggtggagccgatgtccatcatcacctcctcgaaggccgccgtctcctcggcctgacgctgcttctgcagcgcaatcttctcactaaatttgcgcggattggaagccgaggccgtggccgaaccaggcccgttcgcccccgacgtcgccatcttccttccccgtccctccctgccaccctcccagtaccagccgcggcctccgccgcggcctcggcccggctcctccagccgtagccaccgccgcctcagcgagcaccgcgaacccggccccagcctagccctgacctgttgcgcgcgggggccgccgggaattgtagtttgtttacgagactccttcacatccccagtcacgcagcactaggaggaaacggactccacttcccagcagccctgctgactccggaaactggggacttggctccaccctctcggctactccctgagaggtgcaagctgggaagagtagttctaaattagccctgagactacgaacggaaaggagagagggattgaagagagaagaaaggaagagggaggggagggaagagaagggaagccgaggggtggagaccgggaaagaagtaccaagacacaaaggaggaaaaattaggtcatcttcagggaaggggactatcgggtcctgagtgaaaacagtgagaccaagaatcttaaaacagctgtaaacatctgggactcaggccctctcaggctggccacatgcccacccctttcccaaaacaaacgaatcagatactgtacagatgtctagaaacatcttttatttgggtaacaggtcccaaaacaggtcagttaataaaatagattctaaagaatatgtccctatgcacagccctccctccccaaaaataacgctgggggtaggcattgcccttcccccttgggctcctcgggtgtatttaaaaaaatgttttggcagctcagtgtttatcatctgggcatgggacaccatgtccatgtccccatattcctagggtacagcagcagtagatggctgcaacaaccttcctcctaccccagcccagaaaatatttctgccccaccccaggatccgggaccaaaataaagagcaagcaggcccccttcactgaggtgctgggtagggctcagtgccacattactgtgctttgagaaagaggaaggggatttgtttggcactttaaaaatagaggagtaagcaggactggagaggccagagaagataccaaaattggcagggagagaccatttggcgccagtcccctaggagatgggaggagggagataggtatgagggtaggcgctaagaagagtaggaggggtccactccaagtggcagggtgctgaaatgggctaggaccaacaggacactgactctaggtttatgacctgtccatacccgttccacagcagctgggtacccacctccagcctcccatgtgagcctgtccttatgtatagtgtccaacctctgattctagcagtcaagtgtcttccccaatcctaatgtcccctgatatgtctctagcgacttgaccatctcttgttccttgggactggggccagcctcttgtctgcccacttccctctcattagtcagatagccccaaaggctctatctttagctcccagagaactttttggtcctcagtatttcccttcccctttccttcctattccccacaactgggggagggaagggagaacaggggcacctgatcatcaatctcccctgcccctctcttgaagccccctagatttggatgaagagcaggccagtgagcagggcaaagcctgctaggagcagaatgaccttgaggatcctttgctcagaactggccagctcctggggcaggatttccagaaaggtgatatagagaaaggtgccagctgccatgccctctagcacagactgggccagctggtgcagaggtcctgccgactctgccagagctgcacccagcccgatgcctagaggtgtcatgcatgagaagaggatcccacagccagccaccacctgtgccctaaggtggctctgcaacagccgcagggacaggctgacagccaggatgcccttgtggagcagcaaagccaggcacagctccatggcccgagcccggtctcgctgcagccctaccgccagcccctcgaacacggagtggagggccagggagaacaccagtacacaggcacgcaaggctgagggggttgctggggctccactcgcctgtgggacccctggcccatcatgccaatgctgcggcccaccattcactgttcccagcagagcccttgtttcctccagaggtgacg

SEQ ID NO: 486 - DNA, 4001 bp, Homo sapiens
aaaaaaaatcaatcattacaaattgttctgctgctaatacacaatgactcatgtaagcatatggtttattattaacccagaaatgtaaaaaaggcaagaattacaagtggtcagagaaagtctcttcctggctgtgtgatcttatcaggtcacttctgttcacttgagataggacggggtaagaagaggggaggagtttaataatttcggactcctccaggttccatgatcgtatggaacagggcagtctgttccctaatgctggaggagtagagcttggagagatttgctgctgaactcgctgcgctaaccagacacgtaatcacagtggcttcagagggactcgcacaacaatttccattagctacggacaagcattccaaactttagcctttaggtttaatcattgacacaccttccctggtcactgagtctcctctagaaactcagtataaacatccaacgatgtgttaacagggtgttttgtaattttcttttgaagattattctaggtggtgggcgtcacagggtcaataaaactatacatttctctcaaagactgcaatcctgatggcaaagctggaggaagctccgggaaacctgtaattgtgggaatccaagacaaaaaatcccccacagctgggctgtgggaaggggccctacctaggagaagaaatcaaatcccctacagctgggctgtgcgaaggggcactacctaggagaagaaatcccctacagctgggctgtgggaaggagccctacctaggagaaatcccctacagctgacaggtgggctgtgggaaggggccctacctaggagaagaaatcaaatcccctacagctgggctgtgcgaaggggcactacctaggagaagaaatcccccacagctgggctgtgggaaggagccctacctaggagaaatcccctacagctgacaggtgggctgtgggaaggggccctacctaggagaagaaatcaaatccctacagctgggctgtgcgaaggggccctacctaggagaagaaatcccctacagctgggctgtgggaaggggccctacctaggacaaatcctctacagctgagagctgggctgtgggaaggggccctggacagaccgctgggcgctgctgcaggaatccccaaacccaggcactggctgcagggaaaaatcaagcgggtgactggcggggggggggggggggggtgcagcgtggggctgggggacagggagtgcggggggcggaggctgggcaggggtagtgccaacggacacctcatggtgtggtagcctaaactcagagcctaaacgcaggaccagggctaggagcccaggaccagaaggcaaaacttcctacctgatttatggatgggaacttgcagcccctggaggggaatggcttcggtctggagctctacgcactagttctctgggaggacagagggcaggaaaggggtgcagccaaaatcaaactcggttccacttggacgagcagtggggagattcgctgtctaaacaactaaggagagtttttaaaaccacttaccagaatctagagtgggaattaaaatctgcgtgggcttcttcagattccacagaaatgaggactgccacaccttctccaacttttgcaggctccacccaggatgtgcgcctcgctccacccaggatgtgcgcctctctccacccctaggcgaaggcactagaatttcccaaattaagaacgaagaggaagtttggaccttttcggccaccgctcgcttcaatatggctgcccccagggagagacgaggctaccatgaaggagccgagcgcagaccctgagtccgtcacccatggatcgcagcgcggagttcaggaaatggaaggcgcaatgtttgagcaaagcggacctcagccggaagggcagtgttgacgaggatgtggtagagcttgtgcagtttctgaacatgcgagatcagtttttcaccaccagctcctgcgctggccgcatcctactccttgaccgggtgaggcccctttgcgcctgtccatcgcctgccttctagtgcgaaacttcaggagccctgttcccatccagtgacgaccggatccagcatgtctgtgtttgctcctctgaggggtggtctctgtttctttatatgtgaaatttaggggattagatcagtgcttctaaaagtttaacgtggctattaatcagctgagcatcttttaaaatacagatcccgattctttaagtgtagggtagggcctgatactgtgcatttctaacaagtgcccaaatgatgttgaaactgctgacctgggaactatcttgtgtggcaaagtttagaaaatttgattttattatatgaatactaagggaatctaaagactttgtagcttgctaaggtattgaatgccggaatccgctcatcaacagctctggcaaatcattgttactgcatgcttgaacatcaccagtgttaaggagtttactgcctcctagtgagcccctccattattacaactctagtagttttacgcagagaaaagtacgatcgtatataatttaggatggttagacttttttttttaactttatgatgggtttacaggggtagtaaatgcattttgacttacattttccacttatgacggatttattgggatgtaaccccatcataaatcaagaagcagctgtacaagccatacctccttatttgcaggttcagttaccccagtcaacagcagtctgaaaatattaaatgaaaattccagaaataaacaattagtaagttttaaattgcatgctgttctgagtagcgtgataaaatcttgagccaaccagctccttccagaatggaaggtgaatcatccctttgtccagaatattccactatatattcttgctgccctttagctgcttggtagccttctgggttatcagatcgactgtggtggtatcacagtgcttgtgttcaagtaactcttattttacttaataatggccccaaagtacgggagtaatgatgctggcgatttggatctgccaacagtaagttttaaagtgcttttttgaagtgaaaaggtgaaagttcttaaggaaagacttaaggaaagaaaaaacagcatatgctgaggttgctaagatctacggaaagaatgaatcttgtcagtgaaattgtgaagtgaagaaggaaaaagaaattgatctgaggtttcaggcatccactagggggtcttgggacatatcccctgaggataaggctgcttgggagtgatactgcttagattaaaaaccacgggctatgtgaccttaggaaagctatctcaactctgccccttcctgttctatgaactgaggataataaaaagtatctgctttatagggattttgtgtggagaaaataggataattttttttgaaatatttggctttgtgcctggcccatgcactgtaaaagttggctgtgtactgattttattcgtagtattggcttaagagcatggaagacagcacattgttaggctcattctttaggtccattattgactgatcatttatttgctgatctctcaagttagcagggcctgttcatttttaaatcacttccatcaccttcagagcaatggcattcttgcccacaaactctctcttgccccatttccataactctgtctcgccttgatttttgcaatggttctctaacaagccacttaactattcttctccaaaccatgtttgacaaattgcaactctgcttatctctcacctatgctatgttttattacacatttttctacatcagaaaatccaaatgcttactctagtatacctttcaacctttttttcattgcttttcttcatctttagctagttactgaaactaaactgttcttttcatcttgtatttacttgcttttgctcatgttttttggcggtttttttcctgaaatgttttcctatctctgcatatctgagacatgattcccaaaactcccctctcccacctgaacc

SEQ ID NO: 487 - DNA, 4001 bp, Homo sapiens
agaagggaaaataagggtagagggtaaagccagactgcacgtcagctttcacgctttcaattttgatttgctaggactttaccagattttcacccacactcgctaaaggtcacacttaagtcagtacttacaaaaaaagaaaacctatcttctgtgcctcaaatactttagttttcaactcagctgctataaataatcatctcgatggtaaacatccagaacagctgcaaaaccaaactattaccttctcttttattttagtcccagggctaaaacgaaacaaaaagaaggccaaatatttatctaagttttatgactcaggtatatccctactgaagtatataaagcccctccttacccacaccaaggatatccattattggttagtaccaaaagaaaaccaaggtatgtattatagtgctcctcaatgcaatatcaagaatgtttgcctttagttactcaaaatgaaaattactcagcattttagtatagagtagcttatatctgtgggctataatttgaaacctacattctaaaaaagtaggttagtagcagtggctgagaactgccagttcataccagcctgatgaaaatttaagcctctcaaaaagatttaactaccacagtgcctttgagcattctccctctccgccctgtctcccaactgtttaaagagcgccatattcttttactcatttaaggtgcaaaacacgaaaattaacttgcccaacaacgttcagatattctttgcagattcaagcctgtttcagggagcgttctctgcttcacctgtgagttaagcaagacggccgccatctgggtgtttctaagggaaaaccttaaagcaaaagaaccttggcactaagatttcgtattgataaaatagcatggcaaaaatttgaagctgtctccgacgggggaactctaaaacattctacatagaatgacgaagccaggccgttcattgcacaatgtgggtgggccaggcgctggcaccatgagaactacaggaggtggaagggaggacactactgagctttcagggcgcacgcccattccccaagatagaggggtgggagccacgtgcctaaaagattagggactggttccctttctcaagacgccgaaggggagacaatgaggggaaggttgggtgctgagaccctgctctaggtgactggagtaacgatgtcaattccgccacactactgtgccagatgtggctggggaaaggtgtctttaaacacttcccctaagatatctagatggagcagggtctcagtctatacacaaagaaggcgccactgccgcactgcgctctggtactggtagtcagattcccaagcaggtaacggccaggaaactacagggtccagagtcaaagtaggcccctcttctcggtctcaggctcttccaacctcacacaaaggaccgcgccaccaccccctcgccccgcccgccgggacatgtagttcccgtttccccagacaagccgcagatggggaagcagccagactacagatcccagcagcctccgcgcccgagccccgcaccctctgcctccatcttggctgctgtcggagcctccattttcgctccctccccccactttagtcaccaccaccactaccaccacgcgcagccggctggcctcaactcctcgtttcagctctgcgacctgacatgaggcccaggcagttgaacgggagacgtatgaaaaagcccagggcagggaatcggggtgcattcttccccacctagagctctacgagtgcccaccttgactcagaaggcttctcgttagccttggtcttattctcagcccttcccctgggtttctgctacccccagttggaccctgaggtcgtactcaccccaacagctcagcgccccctctccagcgccgccataagcagcacggcccggtacgtaggaataaatctcgcttctctcgcgagagttgcgggctccgggcgcgtgcacgagaaggggcggagtgaagcgtactctcaacacgcttgcgcagcagggctaagtgacgccaagcagtttgctgcacttaaccacaaccaacatggtggctgcattacattacattccttcttgggtgtgctgcgggaagcaatctcggtgtttactgactcctcctggacactaggggtggcgggtggctttaggcgtctctagtcttcgagcgtttgaatacgttttagcccacaataatggggtaaaccttgaaggccaacaattctgatggcatattcaggagtcataaaaaatgatttatcttttcccagcaaaaatccggaaggacctcacactcgtttcttcttatagtgcaagcattctttcttacgtctactgttttagaggaatttcattagtatagagtcagctttgtagcaaggtaatttagaaatctaaatgagacctttgttttccacgaaaaacattgcaacagatgcacaagagtgagcaaggctgcataatcactaaacaaaatgaaacaaattcagtcaactgacctttcaagttacgaaagatattcctgttgtgtcaggtaatcaaagagggtggatcagtaattaaaaggttgaaataagagcaaagagatgattcatccaatgggggaagaaggaaggagaaaaatgggtaattatgaccacaggaagttcaatggattatcccctgccagacagtagagcatgctcctctggtgagaggaatgcttttcccagattcaatgcttctgttttcacagattcactggctctctcacttgacagtattggataaataatgagcagccagtcttctgagaactctcctacccactttttgcttacaacacatttatttgacatgttgtatgtgtaaccactgggaagtatacagttgtaaagaaaatcggatatagacttgtcctcaaggaacttttagtctagcatcattgatgatcacaaaaacaaatctaaacatacacattggaataagtgcaatgaaggaaagacaaccttcaattcaacctcttgaattctaagaggaggccgtgtcccatttctgttcaaaaatttcctcaccacctttgttgctggtgtccagtcccatgtataacacctcaaaactgcctttttgctctctttgatgccttcccacgctttcctaagcacaaatatttgcttcattttcaatgctttcatagctcactctattgtaattattagtttttactaggtagtaatactctagcacagagcttatgaaattcatctttgcatccctggttgttgacagtgcccgctctcaacaactctcaaaagcttgttgaataaatagcactggacaacagtatgataagttgttagaaattggaatatatttctgggaaactacagaatgtaaatttttttttttttcagatggagttcactcgtgttgcctaggctggagtgcaatggcatgatctcagctcactgcaacctccgcctcccgggttcaagcaattctcctgcctcagcctcctgagtaggtgggattacaggcgtgcaccaccacacccggctaatttttgtatttttggtagagacagggtttcaccatgttggccaggctggtctcgaactccagatgtcgtgatccacccgcctcagcctcccaaagtgctgggattacaggcatgagccaccgcacccgacctaattttgtatttttagtagagacagagtttctccatgttggtcaggctggtctccaactccttacctcaggtgatccgcccacctcggcctaccaaagtgctgggattgcaggcatgagccaccacgcctggcccagaatgtaaatatttcaaaccagctgttttgtttaattcacccagttcttaaatcgagatctccccttcctgcaatacagctggtctgtgtattctaatctaatgttatagagaaactgtaccaggctcttgcgctagatatgaggtcatgtgaaactaattaggtaat

SEQ ID NO: 488 - DNA, 4001 bp, Homo sapiens
tgatgacatttgaggcatcagtgtggggaaagtgcagccactacatgagaggctgacttcgaagctggccaaaggggatacccctggacctggggcctccattctgcctcaggaggatctggacagacagtggggggttaacactctggcttgcatctggctgggcaggctctcctctgactgcctcttcctcccacccctagccctggcttctgcctggggagcagccctcagaaggaatctctgctgcaggctcagagatgctaggacacctcagtccagctgtccagcctcctctgccacctatcctattccatttcatcttccccctcaacaaggcctctggagagacctggcagaaccgggcccttggacttcccctgtctaaacacagcccccttgtctttctcttctttcctcatggtctccccttcagccccgaagctttgctttctgcctatggctaacccttctcccttcccctctcaactctatctcctctctctcagtgaggcactttctttctgtggacccactcttccctttctctctcacctcacctgcagcccgctctcctctacccccaaataattttctgctcttttccccccaggtttcccctctcattttcttccaggactcctcagaagcaaatctattatgagcccactgactggtcatgaacagtgccaccctcactttctatggctgcatctgctaccgccacagttggggcagggcgtcccttacgcagtcaggagcagaccctgcccctggacacagctctgcaacaccaaaccctctttccattttcctcaagcactgcaaaccaccataaaccaccacaaagcccagaatctccccaaccgatgaaaccagaatttgcaagaaaaagagattctgagctagccccaagcagccccgggggtggggggctgtttgccggctgttgccgtcccccaccccaccccccaaacagccacccaagtcctccgtagctcctgcctgtgggctggaacaagcagtggcttgcccctctccgtccctctgccagcaagtccctggcgttctataagctggttgaccccctgaactttccctgcccagaagcgcccactcctcagcagggccttggaagcacgtgtgtggccgatgaggaaggtgcccaccggggagggcacacactcagcgcacagccactccgcccgtgccttggtggtggcgggtagggagagaggcagggcaccctggctgagcgggggctcctgcctgcaggtggctcagtgttcccctccgtgcaatggggtgagcagccctccgtttcccagggaagcctggcagtcccggtgcagctgcagggccgccaccggcctccgccctggcgccagggcccagtccgtgcgcaaaggcggttcgtccgcggcgggaacgccgggccagtgcagccggcgcgcccaggctgtcggctccgaggggccgctcccggccgcctggccgccgagcccccgccccagcccgtcccgggcccagcgccgcggccgtcgcttaccgtgggagggcagcgcccggcggcgcccggcgcggtcatacgggcagctgggtcccggccgggcgcgtcggccgccctcgctcgctcgctcgctcgctggctgctgcggagtgggcgccccggccgagggccgcaccgctgtcctgggatgcggagagcggctctggcgccgagaggacccaggcaaactttcactttccccgggccgagcctcactggccagccctcggcacagccttttaagagaggactggggggcatgtggtttatgggaaatcaccctggccaggcgccagacacacacatacacacacacacacacacactgacacagacacacacactccagaggcccactcagccgccttcccccgcctcccctcccccacccgccggccggccagccccgctcgcgcgtcttcctagtcaccctctgtcttctgcgctgcacttccaagccttcagcaaacgagcgcgggctccaccgcgtccccaccctgccttccccgcgccctctgcggaccgaccctttccttccgcgctctccaggctgattcagtgctagcgctctatgatcgtcccaagggactttccctccaggcctgaaaatccccaaatcttagcagaaaacggaccgagagcagggacaagcactgggaagggagggaaatcctttgaagacgcccccaccccattctcggagtgccgaaaggagtccagtgttacttgctccctcgtggagcctgagtcagcaggtttgccggcagcccccttcttcctctgcagcccccaagcagcccggccagcttcaagtcccattctgggagggaggccagctacctggccaggaagggagcagctgtgtcctgtgacagcaagctggggggctcttccctgggtgccagcagacacttcaaggcacctgacccttagatgatgaaaatgctggctggtacccatgctctctcctggaggcaaaatccaactcagattggaaaggtcctgcacctggaccctagatttccctggatgtttttggaaattgcacttactgaggtgattaatcacgttttgtttctacatgagaatgagtctaagtgaggactagtaggatgagcctaagcctattaattataatgccaacttcaggagatttttctttcttcaattcattatgattcaattcctctgtgaggttgcccgtttccaccccctgggaaataaaggatatgtggcctgctcttgaagaggagtctcttgtcagtagcgctacatatccttcactccaatcctaggcaataattttacacccgaatgcctttgctcagactggtccctctgcctggaatgctcctttctccacatggctgaagacaaactcctcatcatttcaggctgaaattgcatctcatcctccaccagcaaagccttctgtgactctcctggcagagcaaagggtccttttcctgtgttcccattggacttggctcattcctcaatgctggctctgataagtcatttgccatccattcattctccacagtacttttcgaagtgtttaaggtggtaccgatggttacattctgtccccaccctagaccgagacttcttccaggtggcacccatgctcagtcacctctggatcaatggtacctagcacataataggtaccaagttaatgatggctgagttgaatgatgccattagagaatactttgttcttttgacaaatatgtgctaccagatgctaggcaccgtgctgggccctggggatacaacaatgacatggtcactgtacaataatgatttcagataacatgttgacaccacagttcttaagactgataaaaggttagaggaagtaacctgagaaagataaaccaacagacttgttgagaaaggggtccagttttacttgctccttccttcaccaacccagccctggcccaggttcactgaggctggcatttggactttgctcagcttctggaggaacgtaatcattctccacgttggtgcaaggcctgaggtcctcattccccgcactggagttctttacataccctggtttgaacctgactccactacttacaagtgatttgaccttggtagctctgccaagtcatttgctgtgtgacattggacaaacttctctcagttcccatgtctataaaatagagatgttaatttctctctctgaccaaggtgttatgagtattgaatgagataaggcctgtgaagtatttagcacagggcctgaagacagtaagtgctattgttattattatctgttcactcacatgggttctaaagcaatgacaccacaatggtgcagtggacttgggagtcccaaggccagattttagtcccagctctgccattcatttgctgtgtaactttgctgtgtaaccccttagccttttgggcctctctttcctcatttgtacagtgg

SEQ ID NO: 489 - DNA, 4001 bp, Homo sapiens
tctctggtcctccactgcagccctggacgtcccccagcctggttaagtgggcctaggacctgttggagcatggtctcactctctggggggccgatatgcagagaggtttggagcccagctcagattcaggtcacctgacttgatctccagctccgccacttaccagctttgtgatcttggacaagttacttcacctttccgagccgagcctcagtttccccatctgtgggaaagaaataacattagcactcactcctcagcgttgttgtgaggatgaaatgagattattttggtaaaggcatttagccctgtgccttgcatggagttggcactcagcaaccataggttattttcacgagccataaatagcaggtcagcagctcacagaatccagcacagttcagttttcccctcacccctgcctccctcacagcctgtgtggtcacacctcccaggactgccaccttgcttttgtctgtgccacactgcgcagttccaaagccccctttctggatcctctcctcctaactcctgggccccctggccctcctgtcactgcggccatctctgctgggctctgcaggtgctcactcctgtggcccagcacagctcgatgtctcctgggctggctgccttcacattccctctttctgtttctccctcatcacgctcagccctctcccctcacactctcttccccacttcacacccctcgctcccttgctgtttctactctcacctcgagattctttctgtgggaagggtggggagggaggagggggctgggaataaacagaggggagaggcatttccagatatgctgcagataaagaaaaagagagagcaacaggaagagtgacagagtgaggcggtgactgaaatccacacagactgaaacgacagagagactcgccaagaggacgattgaggccagagagatatcgagagacagagaaaaagggcccaatgtacgccgacccagagagtgggcggggggggggcactcggaggcctggagcccgggaagcgtctgttaccgagagtttaagattcaagagatagcaggaaatatgcgagacagagaaactcagagagatagcaagccagagagaagctgaggaggaaagatggaaacagagagtgaaatagagacccagacggggaggggttgcgcggctggaactcacagacacacacgtcctgagagacagaggcatggggaggggagaatgattatgcctgtccccagcccagctcagtgtccccaaggagatacttggctgtgagtgacttccctggtgcaatacccccaaaagtaggggcatcctgtgaaaagagactcagtgtccagggctggggttccaaaggacgaatcccgggccccaggcctaggaccccggacatgaacacttggcagagctgtggggagtggccccaggattccagctctccatcaagcccaaggctcagcccctctctagggatcccctactcacgttggcacctctggcccagcccctgcttggcctccttggtctctcttctcgtcaagagaagttcctgaaaccagctgcagtccagcttctctccccgagctctgtcgttaatggctcagcctctgacaggcccgggggctggggattgcaacaccttccgagcctccctcctgccctcccttgcgccttcgagggcacaggcagccccttcctcccaggaaggagcctgtgagggaagctggtgaggcccgggcagccttcctgccttgggggtcttaaagggctggggaatgtggcaacgatgtccccctcccctgcctccggatttcctgagctcaaagctttgaggctgggcagggcccaggctcccacctggctgggtgccatccttatgccccctgccctgggggagcatcacttggaggcaggccctggctggaaggctcacccggccctaagcctcttttcagctctagccttggggaccacatcttcacagtactcagaagggtgtgttccaggttccagggaattgtgtaacccaatactcactgctcccctcttcattacgtattctgtgcattgcccatagaccaggcagatggagaaacaggaattctgggggcaagacaggaggacgtcttggtgaggcacggggtctttatatgttcactaaaaattaggaatgtttacccacaatggttctgcaacactgaatattttgtaattgagtgaaatagactacattttatgtcttttattgtctgtattcatgattcttctaaaactacaaataattttctttgcattttctgagaaaggttcaaactgctcatagtttattggattcataacccaaaaaaggttaggtgccaacagaccagcagactgtccttaacatataatccttttgaggcatctgggtctggtgtgatgctgcagaccagggctgtagttctagttccaagtcaaatgacctgactgcctgctgcaaccctcccaagatatcccacaggctctgctcgctcagtgagtcccatggactctcttctttccaaatataaccagaatcctgggtattcactgtaaagttcaacttggctctacgtttgaatatttttatgataatatttggaaaatataaatataactgaaaccaatactagccagctccaagctaccctcatctattgcctagataatcgcaatagccccctgcctgctctcctgcttctatttcatccttgttcccgcacctgtctgtaattccttcagcagccagtgcgatatcaatcaaacagaagtctgatcagcccatcctcgtcccaacctttccaatggctcctgtctcattcagagtcaaagtcaaagccctttggatggtctacaaggccctacaaaacctggtatccctgttacctcctggatccctctcctgttattctcccccttgctgccttgctccagctactctgtgttctttgcttcttgaacttgttatgctgtctcttgcctcagggcctttgcacttgctgtttcatttgcctggactctttcccccgcaaatagctacatgggctggtccctccccttcttcaggtctttgctcaaatgtcactttctcattgaggccttctctgagcacccttttcaaaatttgcaagccccttccctcccactccctatctctctctcccccaaatcccttttcaccatctgatattggctgtctcaatccccactagactgaaagttccataagagcaacagtttttatctgttttgttcaaaactttatctccagtgtctataacactgcttgccacacagtaaggcctccatgcgtgtttgttgaatgaatgatcaactggatgaatcttcccccacttcaccaaatctgtctctaatccccacgtaccttgtcatggtgaattaaccaccatcccctcctctccctagtcatgcagctcagggactcaggagtcattccttacaaccctttctccacattcccatgtccagtcagttcttttagttcttttttttctttctttctttttttttttttgagacagagtctcactttgtcacccaggctggaatgcagtggcgcgattttggatcactgcaacctctgactcccaggttcaagtgattctcctgcctcagcctcccaagtagctggaattacaaatgcctgccatcatgcctggctaatttttgtattttcagtagagattgggtttcaccatgttggccaggctggtcttgaactgctgacctcaagtgatccgcccacctcagcctcccaaagtgctggttttataggcgtgaaccaccgcacctggccttctggtcattttaaatttattttttatttttattttcattctttttttttgagatggagtctcgctctgccacccaggctagagtgcagtggcgcgatctcggctcactgcaacctctgcctcccaggttcaagtgattctcctgcctcagcct

SEQ ID NO: 490 - DNA, 4001 bp, Homo sapiens
tcggtatgcacagcctcccagtgggtgtgggtgtgcgagaggccagagctcccaggcgcgcgcaccgcgggcgcccctctctgggtgtcggtggctatgactcttagcagaacctaagaaagtcccgtcagctaggaatgagagagccagagctggctcggggcgccctccctgaccaagaaccccaacatgccgcggttaagcggtgggcgacacggtctgcgaggacagactcacaagacgctgaaggccagagtgggccagagagctcgccactcactgacctgccagaggagaggcgcactttcccaagaaggggaactggggtggtccaggccaagccttcagaggttcaatcggtggtttcaaaacaaaacaaaacaaaacaaaaacaaaaacaaaaaagaaaacacggctccaggtcgaaggtgccctaggtctaggcctggccagcaggtgtttcggtttctcccccagtgggtgtcagcctcgcgggctaaatgaaaatgcggttccaggcatcccggtttggacccgtctccacccgggcacacggaactttctagcttgtagctagaactgagcttcggaggggtgctgtgggtaaagcgggagggcaccagtcgcggccagtagcctccacaggggaccgggttccctcgaaggttcgcgtacctcccccgcgcgctgcaagctgcagccagacacccgcgaagttccgggactctccgcacccgctagatctgccccttcccggactcggtcgtcgggagctggtcccgccgcccgcgccgccgctgccgctgccgcagccgaggcgctcggctgcagcagggcgcgggaaagggcactttggcgcggagtgagcaccgaggggaatgtggcagcgcgaagcctggcggcggcactccctcccccgcctcgggctacaacccccaccccctccttcccatccctcaacaccctccagcccccacctgcaccctcctgcaaggaatgcgcgggacccccaccgtgggcacgcgtccacctgaaccccctcctagctccgagcgccgagggaggggtagcatttgaggagggggatggcggccgcagtctgcagtcggttccagagggggcaccggtttcaattggagaaaatgggcgggggcagggaagggcagaccttgcagacgcagaaatggggagggggcgcacggttcctctccagcccccaggaccagcgtgcctggcagaatcaggagccgggggagtagggctcccggaaagtttatcgggaaaaagcctagcaccgtgggggctgggaggctggagaaactgaagccacagaccaggtgccccgcaaccccgggcggggatgtctgtctcccaggcccccacaccggccgcatccgtccaagttgcggctggggttggggcagcagtgagggtgagggtggaggtgaggacgtggctgagggtggggtgggagacggaggcagggatgagaatgagagtaggcaactgggagggtgggagattcaggcagggatagaggcggggggagggactgggaccgggtcgaggatgggtgggctcggggctcgggtggggcgcgcggcggccgctggctcctcggcgcggctggactcacccgcggcggccgagacgctgagcaacccacagcccagcaacagcagcagaggcggcggcgttggcggcggcgggcggccccagcggctcccggcgcccggcacaagcgccgaaatcccggtttcgccgcgagccctccccgcggggcagccgcagcgccccagctcccgtccccgcgagcgcggcatggcgcggccggcagcgccgagggagaggctccgctcgccgccgaggagaaaggaggtcaggagagctctggagcttttttctgctcggaaaaaatcccggtacgcgggagccctgagcttctgcggctggaatgaaccaagtgtccgcccggccggggagaggcgcgctgcgctctcggaaatgactcgctccaatcccgcttcgcggggttcgcgccggggggcgggagggggtgaattatccccggattaatcactccggagccgcttctccgccgctccaaatgctgggggtggaggcgcagctaaggataaaatattggggggcgggggttcctcttcagcgccacctccacctccagataaaccacaaattacatctaaagggttgtttatccgtgtctgttttgcaattgaccagtttcttttaagttcagtcctcctgttttcatttataacatcacccattaatacacccccctctccacacacacacacacaaacacacacacacacacacagtgacagagacacacgcactcacacacacaggcacatacacgcacacctcttccacgtttggaaattggaatcctgtctgggaaaaggtaaccaaagaaggacgcgttccccaagtcttggctcttaccagctgatcttgggtggtggctttgaacttgccatctagggccgggggcgatgcttatgagcctcattcacaatagcctcctaccccatcccaggagaggggcgtgtgtgcgtagacagaggcagggttaagaattggagggcggtggaggggggttgtgtgtggggtggggaggggggggaaccggttcatttgacccagtgcggtcccactcctaccctaagacaaaaatctcagggtggcagaggcggtccctgtgtgcacgcgagttgggggtggggagtgaggttggtggaaggacggtgcaagagttactagtacaatttatccccaaatttaaataatcggatcctacttcttcttctccccttcctcctcccagccaaggccccaaaccaagagagttcttcccaaggacgtgagctgctccccacctctccccagtagcggctgcctctaggccccaagggcttagtgtcggtccccaccccatcccccacccgactcggtcgccgtctctgtctcgtctactccaggcttctccgccagtcacgatggctccttcgctgtctacgccaaactctcggcgagagggaagagacgcttcatggggggaggctggaggaaactgggaggggcaaggtccagagaggaggcttctgctggcgcgtgcagtggaaaggcacctgcgatgggcacccccgccccctttgccgacacaccccagagaagctgtgctccgggcttagggcagcctgatttggccaaaacggagcgttggcatctgtgtggccaagggggcagtggccggcgggcggtggggcctgagaatttccggggaagggtgtggagagggactgtagggatggcgagccaggctgggggtggctggcgacccaggttggccggctgtcagcgtggccaggaatttccatccaaggaagggtgtgaagaggggctgtggagttgacgatatgaattggggggcgggggcagggctggaggagtggaggcttgtccctactccccatgaaaaacttcctccccagagccacgctttcgcagcctcctagatgccactcttcctccctccccccaccccaagttgttccggtttccctgcatgagctcatcccacagctggggagccagcccggtggccctgggcgggcgaatctcctcagaatcgcgggcctggtccccacccccaacacgcttgtatgcccgcccctcccgacgccgccttgctgggtgccaagaaccaaccgaagcagccagaactcctcagtgaaaggcctgctttatgttcccggggcagtgaggagggggcttctcccttcccattgtccagactcagcccccgaaagagagggctcagccttcccaccagccctggagaggaggaagggactgactacgccagcagtgagtggtggtggtggccttgggggctgttagctgggcttgcctgggggtgggctcctggcttctaagctccgactttacccctctcttggaggcggggttct

SEQ ID NO: 491 - DNA, 4001 bp, Homo sapiens
tgtagctagaactgagcttcggaggggtgctgtgggtaaagcgggagggcaccagtcgcggccagtagcctccacaggggaccgggttccctcgaaggttcgcgtacctcccccgcgcgctgcaagctgcagccagacacccgcgaagttccgggactctccgcacccgctagatctgccccttcccggactcggtcgtcgggagctggtcccgccgcccgcgccgccgctgccgctgccgcagccgaggcgctcggctgcagcagggcgcgggaaagggcactttggcgcggagtgagcaccgaggggaatgtggcagcgcgaagcctggcggcggcactccctcccccgcctcgggctacaacccccaccccctccttcccatccctcaacaccctccagcccccacctgcaccctcctgcaaggaatgcgcgggacccccaccgtgggcacgcgtccacctgaaccccctcctagctccgagcgccgagggaggggtagcatttgaggagggggatggcggccgcagtctgcagtcggttccagagggggcaccggtttcaattggagaaaatgggcgggggcagggaagggcagaccttgcagacgcagaaatggggagggggcgcacggttcctctccagcccccaggaccagcgtgcctggcagaatcaggagccgggggagtagggctcccggaaagtttatcgggaaaaagcctagcaccgtgggggctgggaggctggagaaactgaagccacagaccaggtgccccgcaaccccgggcggggatgtctgtctcccaggcccccacaccggccgcatccgtccaagttgcggctggggttggggcagcagtgagggtgagggtggaggtgaggacgtggctgagggtggggtgggagacggaggcagggatgagaatgagagtaggcaactgggagggtgggagattcaggcagggatagaggcggggggagggactgggaccgggtcgaggatgggtgggctcggggctcgggtggggcgcgcggcggccgctggctcctcggcgcggctggactcacccgcggcggccgagacgctgagcaacccacagcccagcaacagcagcagaggcggcggcgttggcggcggcgggcggccccagcggctcccggcgcccggcacaagcgccgaaatcccggtttcgccgcgagccctccccgcggggcagccgcagcgccccagctcccgtccccgcgagcgcggcatggcgcggccggcagcgccgagggagaggctccgctcgccgccgaggagaaaggaggtcaggagagctctggagcttttttctgctcggaaaaaatcccggtacgcgggagccctgagcttctgcggctggaatgaaccaagtgtccgcccggccggggagaggcgcgctgcgctctcggaaatgactcgctccaatcccgcttcgcggggttcgcgccggggggcgggagggggtgaattatccccggattaatcactccggagccgcttctccgccgctccaaatgctgggggtggaggcgcagctaaggataaaatattggggggcgggggttcctcttcagcgccacctccacctccagataaaccacaaattacatctaaagggttgtttatccgtgtctgttttgcaattgaccagtttcttttaagttcagtcctcctgttttcatttataacatcacccattaatacacccccctctccacacacacacacacaaacacacacacacacacacagtgacagagacacacgcactcacacacacaggcacatacacgcacacctcttccacgtttggaaattggaatcctgtctgggaaaaggtaaccaaagaaggacgcgttccccaagtcttggctcttaccagctgatcttgggtggtggctttgaacttgccatctagggccgggggcgatgcttatgagcctcattcacaatagcctcctaccccatcccaggagaggggcgtgtgtgcgtagacagaggcagggttaagaattggagggcggtggaggggggttgtgtgtggggtggggaggggggggaaccggttcatttgacccagtgcggtcccactcctaccctaagacaaaaatctcagggtggcagaggcggtccctgtgtgcacgcgagttgggggtggggagtgaggttggtggaaggacggtgcaagagttactagtacaatttatccccaaatttaaataatcggatcctacttcttcttctccccttcctcctcccagccaaggccccaaaccaagagagttcttcccaaggacgtgagctgctccccacctctccccagtagcggctgcctctaggccccaagggcttagtgtcggtccccaccccatcccccacccgactcggtcgccgtctctgtctcgtctactccaggcttctccgccagtcacgatggctccttcgctgtctacgccaaactctcggcgagagggaagagacgcttcatggggggaggctggaggaaactgggaggggcaaggtccagagaggaggcttctgctggcgcgtgcagtggaaaggcacctgcgatgggcacccccgccccctttgccgacacaccccagagaagctgtgctccgggcttagggcagcctgatttggccaaaacggagcgttggcatctgtgtggccaagggggcagtggccggcgggcggtggggcctgagaatttccggggaagggtgtggagagggactgtagggatggcgagccaggctgggggtggctggcgacccaggttggccggctgtcagcgtggccaggaatttccatccaaggaagggtgtgaagaggggctgtggagttgacgatatgaattggggggcgggggcagggctggaggagtggaggcttgtccctactccccatgaaaaacttcctccccagagccacgctttcgcagcctcctagatgccactcttcctccctccccccaccccaagttgttccggtttccctgcatgagctcatcccacagctggggagccagcccggtggccctgggcgggcgaatctcctcagaatcgcgggcctggtccccacccccaacacgcttgtatgcccgcccctcccgacgccgccttgctgggtgccaagaaccaaccgaagcagccagaactcctcagtgaaaggcctgctttatgttcccggggcagtgaggagggggcttctcccttcccattgtccagactcagcccccgaaagagagggctcagccttcccaccagccctggagaggaggaagggactgactacgccagcagtgagtggtggtggtggccttgggggctgttagctgggcttgcctgggggtgggctcctggcttctaagctccgactttacccctctcttggaggcggggttctcctccagagaaaggaactggcagagatgcccaggcctcctgtgcagcccacagctgggcagaagagagtctgggctgctctgtaattctggggctgcaggccaatgggctttctcttaccctcttctcagctccagaactttgctctgtggctgcaacgggcagatgagatttacccccagaactttcccgggcaaaaggagcgtttgtcatccttctccctgggggctgtggagggcagggcacctattttatccctgcaaaaggcccagttactcacatcctccgccattcctgctctctgatctatttgggtccacgtgctttcactgagcgcctcctgtgctcgggggccctgagcgaggctgtgctctgggccctgcagagatgcacagtgtgtggtcctgctttgggaggatgcaggccagaggtggaaacccacacgtaactgataccgtcagacagcgataatcaccatgactgaagaaccggcatgctaccgagaggcatgtcaagacagtgagcttttcctggacttgggggatcagaaggctaatttaagaaggaaa

SEQ ID NO: 492 - DNA, 4001 bp, Homo sapiens
catcaaatgtttgctgatcactcagtcaagtgtcactacactcccaggctgcaactctggcccagtcaggactcactagctccagaggcagatgcacatgtgtgcaattaaaagagcaaacacctgggccaggaaggcaggtgctaagacagaccacaggcaaataggccacagcacccctgtttttcccattttattagcaggccaattgcagagttgatgggccttctctttagtttctctcctgcttcttcttccccataccctccatcctgggcatctcaggccttgcagacagttctctcctccctctcctctaacccacactacaccctctgcaggataaacttccttcctcgtctgactgcctccgccccggatatcctctccaaggcaaagagtcattcactggaagaccgtgagcaggaggaggctggatttaggaaacaatgggtaaaagctgccctccagcagctgagggctgaggacagtctctctcaaaagaggtagccagaaaccagctggagagtcaggaggcagcagttgagtgagagcagttgaggggaggctcagtacccatccccaaatcccacctggggaaaatccccaacatgcagtctgagaggacagagggagacaaccagcacctccagcctccttagcttctgggaggaaggcaagggatgaggggaggacaagaaagacagtaactgagagatcactcctgtgttggaggttctgtgtaatatgctccccaagtagcatccctgaaagaaactgagacattgagaagttaaatagtttgtccaaggaaacctgcgcgttaagtggcaaatccaagagtcaaaactctgccttccaaacaatcccaccaagactccaagccacctcttcatgatatactgatatactttctaccagggcccagtggatttcctcggtgccactgtgatagtatcccagcgtggggagagcctgcccattcattcactctcagggagcagctggtgggtggctggagcccagggctctaggcagagcctgagcccactattgctccagccgattcctgggtcctggttagttcacaacagcaccagaaccagaagcatgcaaaatattctctagtctgtaccagtagatacaatacctgcctcagagggctgattgttagctaacacattgtgatttgctttaaatgtgctcaataccagcccctttatcacttcccagctttcaaggactgaggccacaaaacactgactgcaggctctttcaggtttcagtaaccatcaccacctagcaccaagatttggagtggagaggtttccatgcagttatttcacaagagggaaaactcacacctgcgctcagggacacagatgtccaaggtcaggcccagatgtttgccccaccccgcccgcgggcattttctccccagcaggagggtgagggagggggtggcacggatgccctcatctctctgccatacaatgagcgtcagtggcgcgcagaatcgccgattgttctgcccgacttgcaggcggttgcggggagccgggtcgccctgggtcacgcacacgcggaagtcaactgtgtccaggaagcccaggaaggcccgggatggggacggacctagtgcctccagaaaagagcagcactgcccgggctaactgcggtcacttctcacagttccccgcctgcgacagccccggggctgcggcggggctggcaagaccgggaggcgctgagtgcgtgcccaggcgcccctccgcggcgggcagagccgcgcgactcagggcgcactcacctggcagctggctcggcggcgcaggggcggcaggcgctctcggaagtggcggctgggtgcgcccggcctgcgcgccgttttgttccgctccgcggaaggcgtgtcccgggccacgccaaccagtgggctttgcacactgcaccactccagggctgatgtcatggcgcgaagcccggcggtgctgccctcctaggccccgggaaggccggccggcaggggcgggggcaggagtcgccgactctgggggtgctccgagctcgtgctgcggtcccactgtgcgccctgtcgccgccaccgcggaaaacgtcttgcacgtgcgaggggcatttcaggagtttcctgtctgtcaggtgagaaggcggagatatgaccttagaggtcagacccatgataaacttgagcccctaacgaaagggtgtctcgaatttacttgtcctggtggcagagggtgagggacacattttgggcgccagggtaagacagacccttccagggcaggtctgattctgcccatccactcactagctgggccctgggcctagacagcccttctgggttcagggtcatctgtgaacggcgtgtaatctacagggatgtgaggggctaaaaggagatccggtaggacccgcagaccttcagcagcacccggcatgtaatagacactcaataaatgtaactcccccctccaacagctcttgcccctcagtttttcccagtcttccctgctaccctaaggacaacacctggaaaaaggtgttctcccgcaaaagcagcagttctgaaaagtgggtgcctccatagaggcttttctctggggctccaaccttcagtaggacagacacaggctcaggccactcaagctgcccctggggcagtttccaggggacattctgtccacacctcctcacccagtccccagcccttcctgagtgccccgtgcaggcatttcagggagcagagaagctcacagcctccagctggtcaccctacaccccaggtggcccatagatgcagctgctatgtcttccaccctgggcaggtgtcaagggttcaggccccaaccggcttcacttaaagccctggtttgctgaatcaactttttgccaggaataaagttaagcatcttatgatctagaaaatgaagtatttggccaggcactgtggctcacgcctgtaatcccaacactttgggaggccgaggcaggcagattgcttaaacccaggagttcgagacctggtgaaaccctgtttctacaaaaaaattaaaaaaattagccaggcgtggtggtgtgtgcctgtaatccaagctactcgagaggctgaggtggaaggatcacttgaactcaggaggcagaggttgcagtgagccaagattgcaccactgcactccagcctgggcgacagagcaagagtgtttctcaaaaaaaaaagtgtttatctaggtttttcttgctttctaccataagtaacatctttcctttggccaggtccatcctataaacaaggccctccaagattaaaatgtctagaagcacacaaccagtgtttcttgcagattgggccatcttcatctgacccaaccaagatgaaggaggagaaaccagaagaatttctggtcacggctgcactgactaagcaatagttaaacaggtccattaaactgcagaaccaccatcagtgtcagagaccaagggcttccgcccaaagatggcgatcccatgggatttccccctctcctttcaattctcagtatcttggagagatgagcctcggagttttgcccaggattttacaaaagggcaaactcctacattaccttctttggtctgggtttgtcctctctggagtcatgggactgttgatagatttccctgtgaggacatgccaacctgtgctgtgaaatggctttagggtagatccagaaaaagaagagcagtcactgcagtcacacttggatttctcccagatcttaaagcaccttataaacagaatggctgtacaatgtgtcatctaaaccagaatgctttggatagtaagtggtatgtggtagtattcgtaactacactaaggcaacaggactatctcaggcagtccagggcagatggtcacccctcttttccacccaaagactgtcaggtcacttgtcttaggagctgtctacgcagagctacagatgaagccaagtaggacc

SEQ ID NO: 493 - DNA, 4001 bp, Homo sapiens
ggcccctgctgccctgtgcggggtggcctcaggtgggtctacctagcgacaggcagagatgcaaacgtccattgaacaggtggctcttggcccatctgtatcctactctggagcacaaatcatgaaactttgcttcgtgtaatgcagaacagacaggaccccattcttggatctccccatcttcaggggcctcagaccctggtgagggcttctttgtatcacaccatcttgctacagatccctcagcagtgtgcgtgtgtgtgtgtgcgtgtgcacgtgtgtgcgcatgtgtgtgtgcatatcatttcttcaacactcataatcattttaagtgctttgtcttacaagcttctttcattttaattctcacaacaatcccatgaggtaactattattacctcctccgtaataatgagaaaactcaaccagagagaaactgagtaacttgtccatcatcacacagataataaacaccgaatcttttttaactaagacattcttctaccatccattctgcctaccatcatggggaatgtaccttggcgggcacagtggctcacacctgtaatcccaacactttgggaggctgaggtgggcagactgcttaaacccaggagctcaacgccaccctgggtaatatagggagaccctgtctctctaaaaattttttttaaaaattggcagagcatggtggcatgcatgtgtagtcctagctactcaggaggctgaggtgagaggatcatttgaggtggaggctgcagtgagacactgcactccagcctgggtgacagagtgagactctgtcttaagaaagaaaatgcaccttgctgaagttgcctcttcttctaacccagaccttctgctctgatcacaatgaaccaactcatttaggaacctgaggagaggcttcaccaagttgccacatcctggaaacatcacctggcccaggtaccagtgggtgcagcatcacggtgtcaggatccctgggtcgacctgacctctgtcagttgcttggtattcttttgtctgatttcttactcatctaggcttatgactggagcaaaccttgctctggcttcttaggagtagatatcagggaactttgtactccctcttcctctcatcccaggctgagtgggaatgggaagtgaagaactgaacaggccagcctgcaaggggctgaggaaggaggagccccactcttcctccagattcagcttcaccatgaggttgtggcctctgttgcctttgaacaagagataattagggtgcaaagggctgaaagtgttttcctctgaaatggtgaaatcatgacagggagagagagaagagagagctgagtggaaagttttcttaaccaagtctttacagcttggctttcagcccctgaacgcctgccaccccgacccgctctggccagttcatcccttagaaagaagcttctgaacggaacaaagaggccctgaagtgtttccctgcccagctgcgcttcagccaaatgtcaagctgtttacatcccatgggatcagttccctggggtgttgacaggcccagcctgtgggggcaggcccgtccagggtgtccaaggcaacagcaatagggcctggggcgtactcactgcacaggaagcaggatttatggaagctgttgccttcgcactgaacctcttcggcaaagtaaaccgtcttctgacacaccccacatttcttgcctcctccccagttcggcattctgaaaagggacacagaaatgggaattaattttacagggagatggaaacatctcagattgtccacgacagaaatgcaacagccagatccagaggagagaaagacaaaagtagaatgcctggggggccaccaggcctggcagagcactttctgctagctctcgacagcagcctcgcacgttctcggggatttcctccccccaatctaatcaacaggtctttacagagcagctgctgcattttcagccctgtgctaggcactctaaaggatgtggatcagcagaagaagcaggctttataaagaaggctccagctgcaataaaaatggactgcctacccctacacacgtcaacatggacggatctcaaagagaatgtggaagaagcagacagaccagagctgggaaaatgcaagtccatttgtaggaaattcacaaatgggctaaactcatattgccaagggatggacatataggtggaaaagttactacagaaaagcaagggaatgatgatcacaagcttttaccttagaagagttacctctaagagagggaagggaccatgactgggttgggagaccagggaggctggtaaggcactgcctggcaatgctctccttcttaactcagggtggttgtcatatgggggctcactttataattattctttgaactgtacatgtaggttttgtgcacacttttgtatataagctatagctcaccacaagaaaaaagttttttttgttttgttttgttttttaaatgcagggctgggcatggtggctcacgcctgtaatcccagcactttgggaggctgaggcgggcaggccacctgaggtcaggagttccggagttccagatcagactggccaatgtggcgaaacaccatctctactaaaaatacaaaaattagccaggtgtggtggtgcgcccctgtaatcctagctactctggaggctgaggcaggagaatcacttgaacttgggaggcggaggtagcagtgagccaagatagcaccactgcactccagtctgggcaacagaacaagactctgtctcaaaaaaaaaaaaaaaaaaaaaaaaaggcaggaggtaggcacacagggcagttatcaaacttcagagtgaggggcttttgcaaaatcagatttagtaacaccaccccacatctaatgaattataacctctgagaatgagatacttgagagaatgaggtacttgaatctgaatttttaacaagcaccccaggcaaacaaagcaggtggcccagaccaactttgagatgctctaggtgttggttcagagctggcgtcctgatgccatgcaggtttggctcaatcttgatcctgccactcattagctgtgtgaccttgggcaagatagtcagtctttccaaaccttgatttctgtatctgttaaataaggataaaagctgggtgcagtgggtcatgcctgtaatcccagcactttgggaggctgaggtgggcagatcacgaggtcgggagtttgagaccagcctgaccaacatggtgaaaacctgtctctactaaaaatagaaaaattagtggggcgtggtggcacctgcctgtaatcccagccactcaggaggctgaggcaggagaatcgcttgaacctgggaggcagaggttgcagtgagtcgagatcgcgccattgcattccagcccggacgacagagcaagactccgtctcaaaaaaaaaaaaggataaaaatagcgacttcaccgagtatgtctggtgattaaatgagatatgatatgtcaaaggcaaggcacagtacttggcacatatacagcacacagaagtccaagtgatgcctcaggtcagtgcccacgtggccacagagcagcacggaaggtaacactagtgagtgtggagaacagatggggcctgcttctctccttccatttcactcgctcactcaacagacgtggctgaaggaggaagaccacccttccagctctttcaacagaagttcatgagggaagggctatacaaagcaccacctacagtgggtacaggcttggtgccgggggttgcccaggacttggtgagtaaaggacacagggaggtgccgggaaataaaggggctgggagtcagagggatctgttgcctcaggaggcaaaggagcctaaggagagagctcacggaacctgtcacatggaaatgttgaaaaccgggatgtggcaacgagagcccaccctcctggtaacagggcttgcaccagcagctggagagtcaatgtcaagggcagag

SEQ ID NO: 494 - DNA, 4001 bp, Homo sapiens
tgtaatcccaacactttgggaggccgaggcaggtggatcacctgaggtcaggagttcaaaaacagcctggccaacatggcgaaatgccgtctctactaaaaatacaaacaattagctgggcatattggcagacacctgtaatcccagctacttggaaggctgaggcaggagaatcgcttgaacccaggaggcagaggttgcagtgagccaatgtcacgccattgcactccagcctgggtgacagagcaagactgcctcaaaacaaaaacacacaaaaaagcccaaaaaaaacctacgccttttttctctcacctgcttgtcaatctacccaagtggaaaaactggctagtaactatttgcaaggtttatgagtatcccgtaggccaactcagctgaaagaccattgctaccccactcattcatcaaatgtttgctgatcactcagtcaagtgtcactacactcccaggctgcaactctggcccagtcaggactcactagctccagaggcagatgcacatgtgtgcaattaaaagagcaaacacctgggccaggaaggcaggtgctaagacagaccacaggcaaataggccacagcacccctgtttttcccattttattagcaggccaattgcagagttgatgggccttctctttagtttctctcctgcttcttcttccccataccctccatcctgggcatctcaggccttgcagacagttctctcctccctctcctctaacccacactacaccctctgcaggataaacttccttcctcgtctgactgcctccgccccggatatcctctccaaggcaaagagtcattcactggaagaccgtgagcaggaggaggctggatttaggaaacaatgggtaaaagctgccctccagcagctgagggctgaggacagtctctctcaaaagaggtagccagaaaccagctggagagtcaggaggcagcagttgagtgagagcagttgaggggaggctcagtacccatccccaaatcccacctggggaaaatccccaacatgcagtctgagaggacagagggagacaaccagcacctccagcctccttagcttctgggaggaaggcaagggatgaggggaggacaagaaagacagtaactgagagatcactcctgtgttggaggttctgtgtaatatgctccccaagtagcatccctgaaagaaactgagacattgagaagttaaatagtttgtccaaggaaacctgcgcgttaagtggcaaatccaagagtcaaaactctgccttccaaacaatcccaccaagactccaagccacctcttcatgatatactgatatactttctaccagggcccagtggatttcctcggtgccactgtgatagtatcccagcgtggggagagcctgcccattcattcactctcagggagcagctggtgggtggctggagcccagggctctaggcagagcctgagcccactattgctccagccgattcctgggtcctggttagttcacaacagcaccagaaccagaagcatgcaaaatattctctagtctgtaccagtagatacaatacctgcctcagagggctgattgttagctaacacattgtgatttgctttaaatgtgctcaataccagcccctttatcacttcccagctttcaaggactgaggccacaaaacactgactgcaggctctttcaggtttcagtaaccatcaccacctagcaccaagatttggagtggagaggtttccatgcagttatttcacaagagggaaaactcacacctgcgctcagggacacagatgtccaaggtcaggcccagatgtttgccccaccccgcccgcgggcattttctccccagcaggagggtgagggagggggtggcacggatgccctcatctctctgccatacaatgagcgtcagtggcgcgcagaatcgccgattgttctgcccgacttgcaggcggttgcggggagccgggtcgccctgggtcacgcacacgcggaagtcaactgtgtccaggaagcccaggaaggcccgggatggggacggacctagtgcctccagaaaagagcagcactgcccgggctaactgcggtcacttctcacagttccccgcctgcgacagccccggggctgcggcggggctggcaagaccgggaggcgctgagtgcgtgcccaggcgcccctccgcggcgggcagagccgcgcgactcagggcgcactcacctggcagctggctcggcggcgcaggggcggcaggcgctctcggaagtggcggctgggtgcgcccggcctgcgcgccgttttgttccgctccgcggaaggcgtgtcccgggccacgccaaccagtgggctttgcacactgcaccactccagggctgatgtcatggcgcgaagcccggcggtgctgccctcctaggccccgggaaggccggccggcaggggcgggggcaggagtcgccgactctgggggtgctccgagctcgtgctgcggtcccactgtgcgccctgtcgccgccaccgcggaaaacgtcttgcacgtgcgaggggcatttcaggagtttcctgtctgtcaggtgagaaggcggagatatgaccttagaggtcagacccatgataaacttgagcccctaacgaaagggtgtctcgaatttacttgtcctggtggcagagggtgagggacacattttgggcgccagggtaagacagacccttccagggcaggtctgattctgcccatccactcactagctgggccctgggcctagacagcccttctgggttcagggtcatctgtgaacggcgtgtaatctacagggatgtgaggggctaaaaggagatccggtaggacccgcagaccttcagcagcacccggcatgtaatagacactcaataaatgtaactcccccctccaacagctcttgcccctcagtttttcccagtcttccctgctaccctaaggacaacacctggaaaaaggtgttctcccgcaaaagcagcagttctgaaaagtgggtgcctccatagaggcttttctctggggctccaaccttcagtaggacagacacaggctcaggccactcaagctgcccctggggcagtttccaggggacattctgtccacacctcctcacccagtccccagcccttcctgagtgccccgtgcaggcatttcagggagcagagaagctcacagcctccagctggtcaccctacaccccaggtggcccatagatgcagctgctatgtcttccaccctgggcaggtgtcaagggttcaggccccaaccggcttcacttaaagccctggtttgctgaatcaactttttgccaggaataaagttaagcatcttatgatctagaaaatgaagtatttggccaggcactgtggctcacgcctgtaatcccaacactttgggaggccgaggcaggcagattgcttaaacccaggagttcgagacctggtgaaaccctgtttctacaaaaaaattaaaaaaattagccaggcgtggtggtgtgtgcctgtaatccaagctactcgagaggctgaggtggaaggatcacttgaactcaggaggcagaggttgcagtgagccaagattgcaccactgcactccagcctgggcgacagagcaagagtgtttctcaaaaaaaaaagtgtttatctaggtttttcttgctttctaccataagtaacatctttcctttggccaggtccatcctataaacaaggccctccaagattaaaatgtctagaagcacacaaccagtgtttcttgcagattgggccatcttcatctgacccaaccaagatgaaggaggagaaaccagaagaatttctggtcacggctgcactgactaagcaatagttaaacaggtccattaaactgcagaaccaccatcagtgtcagagaccaagggcttccgcccaaagatggcgatcccatgggatttccccctctcctttcaattctcagtatcttggagagatgagcctc

SEQ ID NO: 495 - DNA, 4001 bp, Homo sapiens
aaaatgccatgtagtctagtttttgtgtttgaaaaacatagaaaacgccagtagagaaaaagaccatttaccatgaagatacaaataagcataattttgcttctttgaatagttggttttcaaagtgcccacagatattgcctaacccactaagtattgggtactacagtaaatctttcaggttttttttttttctcttttttgagacatagtcttgctctgtcgcccaggctggagtgcagtggcgtgatcttggctaactgcaaccttccgcctcccgctccgcctcccaggttcaagcggttctcctgcctcagcctcccaagtagttcggattacatgtgcccgccaccacgcccagctaatttttgtatttttagtagagacggggtttcaccatgttggccaggctgttctcgaattcctgacctcaagtgatccacccaccttggcctcacaaagtgcttctcaatctcaaaaagagattgagaaaattaagaaatgtctggttgaacttttacagctactgtccccactgcctctaccaccgcgctgggcctcagattgtataaaacattttaattgggaggccattatgctgaaacagctccaactgccttggatttcctgcttaagcaaactccagcccaaggtcaacagtgaaaggaaacttaagcttaacctatcagaaactgccaactaacctctaactagtaattttccaccaagtcatagctaaataaggcaaacagtcatagccaaccaagtaattattttcctttgcttccctgttcggcctataaaagcccatgctactaaagcagacctctctgaaccccttctggtttaagtactgccgattcataagttgttctttgctcaaataaaaaaggttatcctactttgtctgaagtctttcttttaataagatgttaggtttccacactaggcaggttctccataaacactttcaccatttttatttcttctcctaagtcatgtatatatacttttttactggcatctaagtgttctgcctcagattaatgtactagattaagaactaggaatcatgcctatttctacaaaagaatcgttctttgaattaagcctttggaccttcctgatgtcatccaattcctgctttcagtcatcgaagtgggcagtcaggtggttttaatattgctccagaaggtgtttgattaaagttgccagaagccttacaaattgttatgtagatagaaggaaaatgtactgaaagctattttttttaccactcttcatgggtggttttgaggtactttaaaggaaagggctagcaggtatagaaaactaaaggtaagcaaaatactctgcattctaatgtactgttggagtgctgagattctttcaaacgaaatcctcgttccttggaaacataaatggattatcctaccttgtttgctttttacacccagagtgcttccgcagaggcacagcaggggaatgaaaggagcttgccttaggaggcagatctggtttgaactctcgcctgcctacgcaggcacttacaggctgtgaggcctgaggagttactcaacttctctgagcccgagcttcctcatctataaattgaaggatccgtaaacaggaaggccctcatcgagtggtcaaagctggtttcggcgcccacggcacctctccttagggctccgttctaccctaacttctcttcgtgccctgaagcccagacctagaggagcagaggaaggcgctgacctcgaaatctggatggtggcgaatcgggcggcagagctcaggctccgggcatgggcagtcggtcccggccgcgagccgcagcgccagcagcgccagcagcgccagcagcgctagacccgggacgccgctcggcgggctagagacgaggcgccagcgtcgaagctgcggccgggacatagcagcaggtctagcgggccggagtgggttcctaccgcctgggtgggcggggcctgctgcgcgtcggggcaggaaggggcggggagagtcgggaagggcggggaggggcgggaggggcggggctccggggcgggcgtgggaggtcgggcttcgagcgtccccgggcgctacaggtgggtgaagttaagtggctgctggagcgtctcgggggacagccagtgtctgcggcgccgagagggccgttcgtggactcaaatgggtatcacccctaccgtttatagtcctcccaatagtctgcatctcgttttgtcgtggctggtcgtgtactccttgtggagtctgaaggtacaaggggatccccaaaatggagaagtgggtgtctttggaagggcctactgagtaacatggttggagtggccaaaagactttgtttttcttttgctactcaaaagaaagctggaataccaaaaatttttacttacggatatcaggtcttagttaagatcgtggtttgaattcaagcatctaattttgcctactctcctgttaaaaatcaagtttaacaacctaaacacaaggacaaagagataacagcaacaaaatgttggaagctggagagcacaagtatgagtatgagaggtaaatcggaaaagggggagattagtcaaaggctgctcaaggactctgatcgctagatcctttttccagcttcatgtctctgggcagctgcccctctttcccaccacgggctcccaccccggctgaattccctgaaggggataaattctctgctgagtgggtattccacctaaaacggagaataagtggctttatgcctactgaaaactgaaacccctcgctatctgattaacctaagaggctgagcaaagatactgacatcgggttttctggacaaatcatacacccagatcaccctacagtgaaattcaaagttaaaagcaccagctatctacttggagcttcctctctttgtactttttaatttttacttttaatcatggacagcaaccaaaaaaatccaataatgtagaaagaagggacccaaacaacagacaaaggaatatggaggaagcagatgctgcagggagaacacttttaaaaattctcataatagccccagaaaaataagagaagatgaagccacaacagggtgcaataaaaggggtaggggatttttaaaagttaatagaaataagaaagaagtgaaaaaactattagtagaagataacactgaggaatgtagagcaaaaactctgaaagataagaaaattggaaaacgcagtacagaggggatgaaataaataattcttaaaggtgcttgagaagcagcgtagtacaaataagaagaaataagtaatttgggctgggcacagtggttcatgcttgtaatcccggcactgtgggaggccgaggtgggcagatcacttgagctcaggagtttgagaccagcctggccaacattgtgaaaccccatctctactaaaaatacaaaaattatctgggcatggtggcagacacctgtaatcccagctactcggaaggctgaggcaggagaatcgcttgaacctgggaggtggaggttgcagagatcacaccactgcactccagcctcagcaacagagtgagactctgtctccaaaaaaaaaaaaaaaaaagaaaagaaaagaaataagtaattatcaaggctccaggactgaagaacacgcgttttcagaatgaaaagctaggccaggcactgtggctcacacctgcaattgcataactttggcaggccaaggcaggaggattacttgagggcaggagtttgagaccagcctggggaacatagaccctgtctctacaaaaaataaaaagcaaaaaattagccctgtgtgccagtgcggtggtaaaagcttgtagtcccagctgctcgggaggctgagatgagaggattgcttgaagccgggaggttgaggctgaagtgaactatgatcatgccactgcactccagcctgggtgacaaaacaagatcctgtctcaaaaaaaaaaaaagtacaattgaacct

SEQ ID NO: 496 - DNA, 4001 bp, Homo sapiens
aatacagtaaagagtattctaaaccagttgtagaaatggccttagaactgtatctcacaaaacaagggactgtctgtaaggattttcctcaacttatataacacactgaagtggtttccaaagcataatcaaggctttggacttacagactttaactaattcttacaaatctcagcaacttttaaattctctaagatccatcaagtatgccaccaaaagggggaaaaaagctatgtgattaacaaagagggctccttcgtaggctttacagatcattcatgtatgactctgtgtcagttccttttctataaaaagtacataatacctgtcctgccttctgacctggttgttgtgaggatcaaatggaaatagtgtaaatgtgaacatcatgaaaaaacaaattaccatcgagtaattattatgtactatacagccttaaatacatctcaacaacttatgtggtagatactattattatccccatttatacaggatcagtcagaggttttgataggttaactaacttgcccaaggtcccccagctcagaagaagtggtgtcagaatgcaaacctagcctttgactataagatttgtgttctctttttctgttgttgtttgagttggagtttcactcttgtcacccaggctggagcacaatggtgagatcttggctcactgcaacctctgcctcctgggttcaagcgattctcctgcctcagcttcccgagtagctgagattacccgccaccatgcccagctaatttatttatttttagtagagatggggtttcaccatgttggccaggctgggctcgaactcctgtcctcaggtgatccacccgcctcagcctcccaaagtgctgggattacaggcgtaagccactgcacccggtcatgagttgtgttcttaatcactaagccacagtgcttaaatgacgcaataggctaaattgttactagcattattagagatagcatagtgtagctgagtgcctaggagttggttcctaaagcaacctcaagtttctaaagtttgaattccatctccaatacttactagtctaaggctagttacttaactccctaaatctcagcttctttattgggaaaaaatgagaattcggttcagactagggttgttgttaggattagatgagacaatacatgtaatacacatgatatatacgagcacgtatttggcatatagtaggtactcaataactattcatacagctactggaaacaatcttaattctagtcaagttatcagacccttaatattttttaagctgactccgtactacatctttaaaatttatgctgctaaaggtaactcaaaaaagttatgaccttcgatttttaattgcaaatttgtcaaaatcacctgaatttcaggccaaatctaaatggcaagctggacaaacggctccttccagtcctgcttatcaaaagaaatacgatcactggaccatccgatacaaagctgtgctgcaagaattacagtgtagaaacatctttcggttgccttcctaatttataagtcatattataaattacttacatgcctttcaaattcataagccgtatctcttttaccgcccaactgtggacagccccagacagacccagctcaccgagtgctggccaggcgccccttgcttgaacgtggtggacagtgagatggggggcactacagccctggaggtccattgctctggatcctggcccacatggatcgcctgcgtggcgaaatgttggaagtgtggcaggaaaccttgtgaggaggcgtctttttcctgcatgctgaaccgcgaaagaagaagagaggaaaagaacaccgaagatataaccagtcgaagccgggtgtccggggttgggagagacagaaggatcaggcgagaaggagctaaagcacgcaggtagagccgacggcgagcgcactaaagcggcacacagcgattgttggggtggattttattagcgggtctgcagtctcacgatcacagtggggcgggaccagcgcggcccattgagcgcaggcccgacgcgtctcccgctccttattggctgacagcagaggcgttgcctgaaacgtcaccgcgaccgccccacccagtgcacaaagcggagtgaagctggagtccctgggtccaagtggtgttagtccctgcgggcgaaattcctgagtacccgtcctgaggaggctgccatgctggctcctgagagccacccgggcgtctctgtgacctcaggccggaggttcgcccgagacgtggcggaaagctggcttagtgttgaaaccgggtaactgtaaacagaccacataaatagccttcttttactgtggtagttacctctgaccaccatcctttgccctgagggcggtgctaaaagacgtaagccacaacgtggagggtggttaagaaaacagttgcccaagccgcccagtttgcagcttggattctcatcagtcacagcttgcgttttaggtacactgaactctgtaatgacccagtgcttacgatgacgaaacgatgactagaagtgaaggttaaattgttcgtaagacataacgaagctactgtagtgaggacgtctatgcacaactctggcagcttcctaaaagttagtcaatcttgagctttttcaagcatcattatcttcttttaaagtacagagagaaactccccctaatgagaaagataatgtggctttgaaatacttactggagcctaacatccttacacaaaatgcttttgcttttacacaacagcaacatccctgcaggaaaaaggattgtttaccactcacctgcgcccagagccctactctcagaagaatcactgctttaaaacaaaaatctccctgttccctaagcaatacagacttgacctacttactattgtggctgttttctagcaccaggaaatttggggatatttctgttgttgcaaaatattcgctaaagatctaaaactttattaaacaaattaagaacaaggagaataaggaataaacagctcttaaaatttacagtttgaaagaaagatatgaagagaaagaatgaggcaatttgcttttcaaattagctttagggacatttaacccattaagcactagaggagtggtgcttgagggcctacaagcttttagaatcctaccaaactttgtatggctgggggaaaaaatggatagacttcaaaacactaatgtatattaatacatatttaattaatatttttcttttaaaaatataacatcaactgcaactcacctcaatatttatgtataactataggtgggtatttttgtgtaatatgatatggcatttaggggccaaaagggtctaaaacagttccaattagttttacctcctaatatttgctgacaaaccctgagttgcataaatacagacattttatttagtgtactgtaataaagaatcattcagaagacagcactaggctgggtgcattggctaacgcctattaatcccagcactttgggaggccgaggtgggcgaatcacctgaagtcaagagttcgagaccagcctggccagcagggtgaaaccccatctctacaaaaaacacaaaacttagctgggcgtagtggtgcacacctgtaatcccagctccttgggagcctgagacaggagaatcgcttgaacccaggaggcggaggttgcagtgagccgagatcatgtcactgcactacagcctgggccacagagtgagactccatctcaaaaaaaaaaaaaaaaaagatagcacccaatacaaatgctataaatcaggccttttttactctcttaaactgagaaaactttattggatgcagcttaatatgtatcaaggatttaaaatatcccctttctatgactcagcaatttcttttgtagaaaattttacttgcaggaatttatcctttagatatattcttaatatgtgtacagagatgagcaaggatgctttttaaacctacgttactatttttaatag

SEQ ID NO: 497 - DNA, 4001 bp, Homo sapiens
atgttggtcaggatggtctcgaactcctgacctcgtgatctgcccgccttggcctcccaaagtgctgggattacaggcatgaaccactgagtccgccctgatccacagattctttttttttttttttttttttgagacggagtctcgctctgtcgcccagactggagtgcagtggcgtgacctcggctcactgcaagttccacctcccgggttcacgccattctcctgcctcagcctctccgagtagctgggactacaggtgcccaccaccacgcccagctaattttttgtatttgtagtagatatggggtttcaccgtggtctcgatctcctaacctcgtgatccgcccgcctcggcctcccaaagtgctgggactacaagcgtgagccaccgcgcccggccacagattcttatatgtaatctggcccctctccatcttcatagcacttaccactactgaaattattttgtccacttgtttgtttactcacttattgtctgactttcctcctctttaaaatgtcatctctgaggagggcagaaaccgtgtctgtcttcaccactaaagccccagtacttggaacggtgcctggcacatagtaaatgctcactactgaatgaatgaatctccatcccatagaggtgatttgtatttacaagggaggaccacgaactcccccagcaaaccgtgaatgacacattggcatttaacagcccgcacctttatttatgatccaaagtcctactttaaatctgaggaagctgctggtatctctggacattttaatggcacaagagatcagttatcacttggggacacactccaggaactggagcccagtggttgtagcagggagctaagagccaaggctcctgcgaacagaacttcaagacaaaccatgacttgcctccaggtcccttacccacacaccctgtacctcaatttacccagcagttggccagacatgttcctctcagttctgtgagtgacaggagacaaaataattcacagctggagcatactgagatcctcagacaggaggtggtgcaagccacacgtctcattattcataaaactcttgatttgcggccaacacggcccccgccgccttcccaggggctaacctgacaacaggcactgctcagacaagttcagctcacaaggcagagggagggatggagggcctagcagaggctgggtgtccagacctgagtgtctcggttaccaggttccaaaaaaaggaaggtggttggggtggggtgatgaaaaggaggtgagaggtgcagtttggggctccaggtggttaattttgcaggttcgtgcatacacgcccgccatccaggtgagatatgtgcccccaccaggtaccttccaggaaggctcaccggggaggggtggaatcgggagacgacagttcaatcaaactacagagggaggaagggcggcccagcgtttagtttggggaaatatggagagtaagagtctcagagtgggcgcaggtgagggaagaggcaggggcccagaggtcgggagggcggacgggcgatgacaggcacccggacgcggtgaggtgagcaacaaggtgggcggcgcggacacctgtggaggcgacccccgggcgaagagtcagggaggcgggaggtggtctgcggcgagaggcggccaggcccagaccagggcgccgcgccgctggggcagtcaggggtccgagcggggtcgggggcgctctccgcggcccctccccggcagacaaagggctggccgctcccccaagccccggcgcggcgcggcgcgggcccgggcggtgcaggcgcggcccggcctcggcgcttacctgggccgcccgacccggccgggccggcaggggcagcgggtccggcgcgcagcgcgcggcggcctgttccggggcgtgctcagcccgagcagccgctgcggcggcggcagtagcagcagcaggagcggccgcctcagcctccgcctcccgctccgagagtcaccgcggtggggagggagggaggcgccaggccgccgggggagggaccggcggagggggcggcatctggctccgcgcgggctgctgaggcgcggcggcggcaacgccccggagggaggcgggcgcgtggggccgggcgccggggcggggcctgcgggcggggcggggcccggggccgcgaattggttaactcagcctgtgggcggggctgcgcggtgcggggcggggccttgtggcgcatgtgaacgctcattgggccctcctggaagggggcgagaccagcgacatagggacggggccatgcggtgggcgggtggaacacggcgccggtagtgagtggccgagtccgcgctgagagcaaaggggaggagcgggccgggggtgagcagggaaggcgggttgggcgcgaggaggaggcggtggcctggaggaggagccgggtaaggctgaagctggcgctgcggtaaagccactctgcgtgtccctatctgctccaggagcacagtgttccggaaaaataatggcctctcccacacaccggtctgtgtttaaaaacgggagcaacaagacggggcagaatccttggtgaggccagtttacccagaaccccggaaaattctgaaatggacgaggttgcagaacatttagaggcgtggtcttcctgcgtcgttgagctgggaacgttgctacctctgagcttggggcctaacctgggattaacctagcccagagagcccagggatgggcctccgtaggtccattaaactcagaaggtcgtgtgtactggtagtgagtggatttttcgggggaagggtgcccatgattaaaatgtttctacagaaagtctggctgtatttggagagggtacagggagaagcagcccattttaggtaaaatgcaaattgcttttaacatccgccttccttttaaagggacctgtatctttaagtgtggtctcattttcagcagtttaaattatcagttacacagtgtgacactaaccccagttcagaagccctcctaccctactcctcccacagcctttctttttacaccttttctgtaccatcctcttccactccacatttcttccccttccctatgcaaaaagaatacgaagtccttttttgtttgttcgtttataatataatatccacattactctttactcatttggggggtttttttgtttttgagagggagtctcgctctgtcgcccaggctcaggtgcagtggcgcgatcttggctcaccgcaacctccgcttcccgggttcaagcgattctcctgcctcagcctcctgagtagatgggattaccggcatgcgccccggctaatttttgtatttttagtagagacgggttttctctatgttggccaggctggtctccaacttctgaccccaagtggtctgcccgcctcggcctcccaaaatgctaggattacaggcctgagacaccgcacccggcctgctcacactttttcatacttaataggtccccggccgggcgcagtggctcatgcctgtaatctcagcactttgggaggccaaggcagacagatcacctgaggtcgggagttggagaccagcctgaccaacatgaagaaaccccgtctctactaaaaatacaaaaattagccgggcgtggtggcgcatgcctgtaatcccagctactcaggagactgaggcaggaaaatcgcttgaacccgggaggcgagggtgcagtgagccgagattgcgccattgcactccagcctgggcaacaagagcgaaactctgtctgaaaaaaaaaaaaaaaaaaaaattggtccccaagtgggtttctcctacagtgtccccaccttcagtaactggcaccactctctacccagttgcttacaccagacacttaaattgtaccgttgacaccactctttcctttattcttcatttccagtccatgttgtttccaattctaaatggtgtccttaatctctccacctcctaccatctctacccctctttcc

SEQ ID NO: 498 - DNA, 4001 bp, Homo sapiens
tacatatgccagtgtacataaagatcaggcgggaggctcattcattcatccttatgggctactgacttacatgacagctactgtgcttggggactgcaaacattaatcagatttgggcccatatctcaactttctggcagtccagttggagagatgaaacattaacaaataaatgagtaattcagtgacggtggaagcagacagaaaacatgtttagactataaagggggacgatgagagcagacgctttcagtaccatggccatcagaggaaggtgagacaagtcctgggggtagtgggcggatccaggcggctcctgttttgtagatatgacttgcaatgggccttgaaggactgactgcacgactcagagcacaggaaagggaacagggtgaacaggcaggtgcagggcagctacagagaacagaggtaaggccgtgagggggaaggcggggaagcagggatatacagtggaagataaactggaaaggtaggcaagggccagatcatgtgcaaactggcatgcccaatctgaacttaatcctgaaggtgacggaaggcgcaagaaggttttccggcacagaagtaacgtaaatcaagacgcatcagagaaattcaacaaagactgaggggggaaatgctttttctttcaatgttatgagatgaagtgccagcccccatcactagtgtgcagacctcaatcatgtcacttgagctgcctgcaacgcgggttctcacctaggggaatgggggtgagaatctctgcgccgcccgcgtcacagggccgctgaggattcgaaactgtaacgagcgtggacggaagggcgccacgcaaacgtggtgagctctatacaccgccagcgccccgacccccggccgccgggaagggaggaagccgtgaggcccaaaggccagccgcggggcccagggccggcgagttcgcaggccccctcgtcctacggcgcggagctgccgcgcccagccccgggcggctgagcccgcgccgaggccggaggcccgaggcccgcactgcttgaatggatgggcgactgccgggcttcctcgcagacgaagagcaagggcggagggtgtgggggggggcgccgctccactcccctacggccttctccgtccgacgagcccggccgagctgattcggcgcggcccagcgcggcagcgcaggccccgcagcctctgaagccgccccgcgccccgcttggcccctctccccagcgccgcccggccacgaggcccgcgcgcgggagccggcagctcgccggccggggcgcccgccccactcccgttaggcacacagcccattgggcaggacgccgagtcacctcgcccctgattggtaggagcgacgtccgtcaccgcggcggcggggctattcggcgccgggctcagctcgcgccgctgactcctgcgcgggagaacagatcccccccgggatccctggagtcagcctacctgcggccggcttcagatcctcccgtcagcgacagagctgggccggcgacgcgcgcggagccccggacagccagtgaacaaccccgaccgcatgcgcccggcagtctttcacggaggcgggctctaggctgtgcgcacgcagaggttggagggcgggccgggcctggagggcgcggggcggggcggggcctggagtgcgcaggcgcgggacaggaccgctgggccgcctccgctgaactgtgccgccgtaggttcgaggccgggcgggtggtggcgtgtctgcccctctgcttccgtcccagcctgtggcccaagcttactctcttgaaggggaggaggctgtttgggaactcacgcctggcctattcgtcacctggcctcgcgtcctcccacagcggtctcctggagttctgggcgtcgccttccatccgatggtctttcactgtgggctcctggcggtgatgcgccagcgcatctctgcctccgggcgagggacggcggcagcgccaccctggcctccaagacggaagtgcggagggtcgcgcggcgttggctcctcgtcggcctccctcctccccacacctgccccgaaggcggctgctttggatggactaggatcccgaaaagtacggtttcatctagctatcgctccctgagcaccgactgtgccacgcactgtgctgggcaccgagggaccctctcctcggactaacgatgtagggaggcacactgagcagctcattacactttatggttgttatgggtgcttgctgcagagatgctggtgccggggcagtgagtgcccagcgcggggactgacccaagtccggtggtgattgggaattcaggcgggaagcccgccctgaaaaagtaactttgaagcagagacctaagtagacggcaaagatgggaaagggagaggcggggataagaaagtgagacatgcttgagcccaacagttcgagaccaacttgggtaacatagcgagaccccgtttcttataaaaataataatagtaggccgggcgcagtggctcacacctgtaatcccaacattttgggaggccgaggcaggcggatcacaaggtcaggagttcaagaccagcctcgccaatatggtgaaaccccgtctctactaaaaatacaaaaattagctgggcgtggtggtgggtgcctgtagtcccagctactcaggaggctgaggcaggagaatagcttgaacctgggaggtggaggttgcagtgagccaagattgcaccactgcattccagcctgggcgacagagcgagactccttctcaaagaataaataaataaaataaaaatagtaataataatttttttttaaaagtgaggcagaaggaaaagcctgtgtacaagcccaaagaggccggcacagctgaattggaaggccagtctagccaagtccacaagggccacaggaagcgagattaacatgagattaggttgaagagttgggtagggccatacggtgaagagcattatagaccaagtaaaggcttctctttctcctagggatagtggaaagctgtagaaacttttgagaggcttttgaccttcctttgaatagtgaatatatgtacatggttataatttttccccaaacactacacaagggtatccatgaaaagtaaatctcttatttctgtaccccagtgttcctgttttgttctctagaagcagtctgccacaagttcttaactatcttcactgaaggagttttaaaaaaaaagatgtgatgggatcagatttgtgttttaggaaaatcattgaagcagatggattcccagaaaccaggtcaggaggctcctgcagtggcctcttttagaggcttctggctccttccagatctggatcaccagtgcttcaaccctgacaacctgcccatgctgcattcagctccaaatctaaaaaatgtttggaatgccaggcatagtggctcacacttgtgatcctgacactttgggaggctgacacagggtgggaggatttcttgagtccaggagttcaagaccagcctaggcaatatagtgagaccccatctctacaaaaaatacaaaaattagctgagcatggtggcacgcatctgtagtcctggctactccagagcctgaggctggaggaatgcttgaacccaggaattcaaggccaatgggagctaggatcccaccactgcactccagcctgggcagagtgagactctatctcaaaaaaaaaaaaaaaaagtttgggttgtctttgaaggtactctacagccacatcttctttcaagaagcatttgatgtttatcaaagtgcctggaacataacagatgctgagaacatacttgctgaggtaatgaagatgctatgggagatggaaaaatgagccattcacccaaccactcctctgaatgaccacttgacattgtcttcttcctcaaagctcttccatctcctcccccatattctcctcagctggtggtcttgcttcccatttcacgagaaaatagaagccatcagtagatttttca

SEQ ID NO: 499 - DNA, 4001 bp, Homo sapiens
tgctaaggggtccagtggcacaatgattcttgatttttctcttcagagccttttagaacttctgccccattagtctgaaccttcacaataatatgccttggtgtaggtcatctgtcatccaatatgataggcaccaagggggccctttcaacccagaaactgatgtctagaaatttccttgaattgttcagataaggggtcagaaaattttttctgtaaaggccctgatagtaagtattttaggttttgtgggccacacagtctctgccacaagtattcaactctactgttctagagcaaaagcagccacagacagcacataaacaagcagacacagctgtatttccataaacttgatttccaaatacgggggggtaggttcatgtggcccataggccatcatttgctgacccctggggttcagattatacctccatttctgtgttcttattttttggaactcctattatttggacattagaacttctgagccagtcctctaattttaccttttctctcctattttctatctcttggtctttttgctgtacttccttgggtatttcctcaacttactttctcttaactttttcatttctgctatctaatttttaatttccaaggattcttttctgttctctcaatgtttctttcttatagcatccagttcttacctaacggatatagcttatctccttctaattttctaagaatagtaatgacaggtcatttttggttttttggtgtttttttaaagtttcctctgcttgtagcgcctcagttccctgtaagtttctttctttctgttgtttggtctcttacctatcagatgctttctccaagtgtatggaggcctgcttaaatgctacctataagttatgtgtgagtgtgtaggcttgtcatggtgaaaatctggctggcttatttcatggggagccgccagagccagtgtcttttatcctgggctatccataccccagaagacaatcttacaacctcctacgtggaatggccaagcctaaacatgatgattctgggaaccaaatggtggaagaaggcaaggactgtcaacagcgttaacattacacataaccccatgtttgtagtccagtgttactgccctcaactgtccctactgtctgctcatccaggaaccctccccagagaacaagcctccagtcttctgccaaggtgggaggaggctaacgcccaactgtgcactgtaggaaaaagatgtcagggtctgagtcttctgaagcagtagttacatgaggcccaccctcatcccactcctgagcttttggggttctgcagggcaaacagggctgcttctctgctttcactgctgcgggcttaagatccggcactcaaggtcagcttagtcggttctatgcatccatctgctttccggcttcccaatttttgttactattgactcctctccacaagatttgtctttaaaaacagcctctttactctagttccaccatatagtaaagacaaatgcacacggccaatctacatctgcaaatgcaactgccctgatttttcaaatgttttctatttgatcttttcaaaaaagtatgattgtaacaaatttaaacttacaaagttctttattctctgcttcctgcacctcaagtgaaaactactagacaatgagtgaaaatcattccggtttacctttcctccctcctctccatctcccccaaagtaaaactttcaatgtcttacttacctggggaactagactgacgtggatgttacaaaagttctctcttttgaccttgaattggaactgacggaaggcctcaataaagggcatgctttctatgtcccccacggttccaccaagctagaagaacaaagttgtttcagaggttaggcactaaacccttctctggcagtttagttttctaacaactgttctgtcttcctgattcagtatcagtaattatgtaacacggactctctaaccctgtataatgttagttaacagttaacaggaattagacaactctttgtactaaaaggttattcttttggacaggctcatccttcccaaaggttattatggaactttccacatcatttcaagaaaaaggtcagatgagagaggtgccaggaatgttatctctatcacagtgacaaagtaaaaaaaaaaaaaaaagaaaaacctaaatcttatctccttagttaaccataaataatttttgtactgaaaaagcatcagttggctgggcacggtggctcacatctgtaatcctaacactttgggaggccaaggcaggcagatggcttgagttcaggagttagagaccatcctgggcaaaatgacgaaaccctgcctctcccaaaaaagtacaaaaactagccgggcatggtggtgcgcactgtagtcccagctacttgggaggctaaggtaggagaactgcttgagcccaggaggtcaaggttgcagtgagccatgactgctgcactggactccagcctgggtgacagagtgagaccctgtctcaaaaaaaaagtattagttataaacaaactgctggaacttttgagtctcctgttatctgaggaacactgagatccaacagctaggatcagcacagcaggagtacagatactgaaaccaaatgaagctcattcggagacgaatgctcttgccagacgaaagcaaaagatctgctgacttgctcaagagacagatgaaaatgtgtcacactactcatggggacaatcagtactaagtgattgtaccataaatgctacaaaaaaggaacactgggcaaactacggttttcccttgcgtggccattccacatgactgttaactgtgcccttacctgccacattgcaacatactgcaccagagataggaaggccaagggctccactgggaactgtcttatcagttattgatggctgactaaggagatgagtacacttgttcacatgtgcaggaatcatacaaacctcaataacacacacttgaggttccaggccatcttcatctacaggtattaacgcctgtctcatcacccactcctggattgcatctgtgatatgagggacaactgggaaaaagaaaacaaacagggaacttacgcttgtccatctacattgattgagacaaatgcacttactgtgaaaacaaactgcagcactctttgcctggagagagtagcaatagggtcataaaaatacttttgaggccccctttaactggcctcaacaaatctctgagctcacacttcctgcagccagatgtctaagttgttgctggaagccctgcaacagagcaaggctgacagcagtgtcctgagccacacaggcgcacgtgcccctgtgcagagtctacccttttggccacacaccagtatagccaaccctattgctcacagctgaaggtaggcacattacacttcagtgcacttccaggaacaagagacttctgggaccctgttccatatgtttccagtttaccaaagggtagacaatccactgcagtgagccagcacagcacagcagagtggttagaagcacagcacccggggtcagaatgtctggattcaaaccttagtctcatgactcgttagctgtggatctttgggccaattatagaaccattttaagcttgttttccccacctgttaagctgtggaaattttgtgagacagcacctgtaaaatgctcggtaaagtgcctgccatgtcaatgctcaaagaatgccagcaattgctcaacacttcaaaaatcatagttgttgggcacagatggcaagttcctaaaaggtgaagattactgtttaactccaggttactccagttacagcaatgcctcatgcacaaggatattcatttgcctcacgcagaagaatattcattatctactccacacatggcgtcaaagtgatcttttaaaattcaagtcagaattcatcactcccacacttcaacttttcggtggcttcccactcctccgagtacactcctagcttc

SEQ ID NO: 500 - DNA, 4001 bp, Homo sapiens
ctcaccccgccaccctctctatctgtacctcccagccctacacaggcttacctgccagggccagctgtggggccgggcatcctctcctcccaccactcgggcggataggttgggcgggaagctgggcaccccacagctggaggctggggagacaggaggccagaagaaccagtgaatagggctggtagcccacggggaaaggggtgggagggtgggcaggtggaagaagcacagagttggggctgggcagacacggggttgatattttactgtgtcacgggggtaagccacccaggtctctaggccttgttttccctttctgtgaaatgtgaagaatcacactaatgcggtgagtttgccctgagaactgaattagacaacacataaaaaagaaagcgtttggccgggcacggtggctcacacctgtaatcccagcactttgggtggccaaggcgggtggatcgcttgagatcaggggtttgacaccagcctggccaacatggcgaaaccctgtctctactaaaaatacagaaattagccaggcgtggtggtgcatgcctgtaatcccagccactcaggaggctgaggcaggagaatcgcttgagcctgggagatggaggttgcagtgagccgagatcgtgccattgcactccatcctgggtgataagagcaaaactccatctcaaaaaacaaaacaaaacaaaacaaaactggctggcatgtgtgcgagtgcccggtacacctgtgttcttctgtctgtttttaggcccctgcatcatggtgtgtgtgtgagagagcagtaaatccactgttatagctgggaagctgtgtggagcggtcaagaacacgtgctgttccgcgagacagacgtggactcaaattctgcctcttccactaacctgccatgtgatgtcaggcaagatactaagtcgcacggaacctcgatgtcctcatctgtaaaatggggctatgaaaagaccctacctctttttctttctttttcttttttttttttttttgagacggagtttcactcttgttgcccaggctggagtttgatggcgcgatctcggctcactgcaacctcctcctgggttcaagcaattctcctgcctcagccttctgagtagttgggattacaggtgcccgccaccacgcctggctaatttttgtatttttagtagaaacggggtttcatcttgttggccagactggtctcaaactcctgatctcaagtgatccacccacctcggcctcccaaagtgctgggattacaggcgtgagccaccatgcctggcaatagaccctacctcttaaggttgttttgaggattaaattggctcctacatgtaaggggcctagcatagcgtctggcacatagtaaacacacaggaaacaggagctgctattattactgttgttgttgttagctggaaggactcttcattaagtgctctcctttgccaaaaaagttagtgagatttagagaggtgaaatgacttttccaggtcctgcagagaagaagtggcatttaagctaagtccctgggctcctaatctgggaaaacgccaccaaaatgatggaatggagaatcctcaagggagagagaatgctgggaaaggcagaccccgatggtccctggggtgaacccaggatgaggcatctcgtgtccctcccccttgcgtggtgctttccacacctcatttctaactggggacacgtcagatcatcttccctgttttgcagatgtggaaacagagttggcaggcaggctgtggcttgtctgacacacagctggttggtagcatctgaacccacaggggaccccaaagtgtcttacctggagagcagaggcccccccactccccatcccgtccttgccctggaggccagcccgagctcacagcctgctagctgcagccccaccccaccgcttaccacaggccaagagcgcagcgaggacagtgatgcccaacatggttaggtgctcaggactggctgaccatcgggatgggctggggcacacttataggcaggagcaggtgagtgcacctggtcaaggccaaaccgccccttggagagaaacctgctctgataaggccctttccctgaccttgggtggttactgtttaatttgggcaggagacagggctttcttagaagtatggattttccaaatatcctgaaacagaaaattctgagttgcagtgctttttggcatcccccaccccactctgtttgacgtgtgtgttcattctctctccctaccttatactatttatttatttatttggagatggagtcttgctctgttgcccaggctgaaatgcagtggcacagtctcagctcactgcaacctccacctcccgggctcaaacgattctcgtgccttagccccctgtgtagctgggactacaggcgcctgccaccacgccaggttaatcttttgtattttatttatttttttgagacaggatcttgctctgtcacccaggctggagtctcagctcactacaacctccgcctcccgagttcaagcgattctcctgtctcagcctcccaagtagctgggactacagatgtgtgccaccattttttttttttttttttttttgtattttagtagagacagggtttcaccctgttgcctagggtggtcttgaactcctgagcttaggcaatctgcctacctcagcctcccaaagtgctaggattacaggtgtgattacaggccgttaccttattctttttagttatttattgggcacctactgtgtgtcaggcattgcgctcaattcttcttgcattatctcacttaattcttccaacaacatgaaatagacgcggttatctgctctgaggtgagatgagaaaggaccaggcgcagtggtgcatgcctgtagtcccagctactcctgaggccaaggtaggaggatcgcttgagcccaggagttcgaggctgcagtgagccgtgatcgtgccacactgcattccagcgcgggtgacagaacaagaccttgtctctaaaaaaataaaataaaagtgaggaagctgagactcagcgggtaagtgaccatctagggtcacacggctgggcagcagcagagccagactttgaagccaaagcttctaacaccagcctggggcttcaagctgtggagacatgctgctccttctctgcctttctagtgctattggatcgcttcctggctctctctctgtctcatctttctaattgcctgggcttgatgcactcctgcacctgcctccagggctgtggttggaggcagggatgcagcaggctctggaaggtgcttagttggccagattccttcctggagtcagcttagttgtaggtcctcagtttccccatctctaaaatgggcaaaaggaccagatggactttcaggctcctttcagttctacaattctgtaacttgaatgtcaaggtcagtggcagatctgagggcccaaagcactgagtagcagaaattctaccagagcctccggcattcggggttggccatcccttggaacatgtggtttgatccattcgccccaaggcctggcctcagcctggttggttagattctgtctttcgtttcccctctactcatactgagctccccttgaaggtcattttctgagctgggcctactggccaccttaggaattccttcctgatagaaaagttcagagcactacgcaccccgccattcatagcggtgatctgggggtgaaggaggattctaacttacactttttttttttgagagtcttgctctgtggcccaggctggagtgcagtggtgcgatctcagctcactgcaacctccacccctgggttcaagcaattctgcttcctcagcctcgcgagtagctgggattatagatgtccaccaccatgcccggctaatttttgtatttttagtggagaccggatttcaccatgttggccaggctggtttgtttatttatttatttattttttgagatggagtt

SEQ ID NO: 501 - DNA, 4001 bp, Homo sapiens
taattctgatcagtatgaaagttactctcttggacagcagccacattttagttcttccttggctttgctctatctctgctataagcagttccacggctgactcaaagatggagagtggaagctggtgtggcagggatggccagtttctggaacctaagccccccttccccagagtaccaggcttggcctcccaggactagcccccagacattctctgctggtgctcctggccccacttactgcaggctgggctagtgcagtacacagaggggacccagaggttggaggagccagtgtcgaagatgacagtgaagttctgtggtggggagccaatggagatagtgccgaagtattccatctgcaaggaagagtgagaaggaaagagggtgtgggtggtggggagggacaagggtgctcaccaggaagccaggggaaagctcccaggggccagagcctggggtaatacagactggagtttacagagcctaggaagtggcaacgctggaaaataaaaggtaaaaggagcagagaaatggccatgaaggaggaaatcaaaccaagcctctggctacttcatttgattttacttgcactaacctgattcttataaatacattgtaggagaggcagtggaggaagaaccatctgttttacagaccagggaactggggctgggagaggttaagtaacttgcctaagggtacacagccagtaagctgcccagctgagagcagaagcaggggccttcagtgtgggatgatgctttcactcccagccctttccttctgcagagaactctgacatttgggtacatgggggcctgcttagccaactccatggggacccagggaatcagtccccatggatcatcatccaagtgaagaaatccacaatggccttcggtgctactgatgtggcactggccatgccctaatgctgggccttcctcccgctcccacctctccccagccctgaccccaggaggcctcacatccaagtagttgatgaggggttccttggcactctggtccattgagcaggactcggtgaactggatcatgtccaaattatgggatttccagaactcagagagctggctccgtgcccgcagcttcttcttgagggacggatgcctcctgaggggcaccctggagacaaacccccatgtaagcaggagatgtacttctgcctccctcttccccccattctcgtcccattttctcaggggccaactagagaagatggggtgggagggggggatctgcaagacagcacgcaggatacaggtgggatcagcgtcctctctgccactcagcctgcccggcctcatctctgccctatagagtcttagaatcttagagtggaaatggctcccctcctggagctgaggtctttgagatctaggaaaatgggagatgtggggcggtctacagttttacatgaacatcacgaagggctgatttaaagggacagaaaaactcttggggacagtgatggtcagtcccctggggaagtcctggggcgctttgagctacaaaccacaactgcaggttcctgctcttttgcaacacaagaagacccctgggacttgggaaggcacctccgtggaggtggaggcaggaggatgacttgttgaggactggagattaaggccatacacaggcggtcactggatgagtctcttccatgcattgacgcaagccctcagcttctcctcctcttcacctccccatcagctttcctaccccagagcagccctgagttgcagggcatgggactacccagctgaacacagtgcggggacgtcttctcacctgtgaagggatccttgggcctctcccagctccaggagcaccagcagcaaaagaaggagcgttttcattgtgagtccgaccagcagcttctcccttgccccctcctttcttctctccccgagggcagtgggaacggactttccctaactctcagacctgcccagcccagtctgagggccgaatgataaggccctggagtcattagccatgcccagagtaaatacggcatgtggaacagggcgttccccctgcacctctccgtccctttcccacctacaagaggaatatgagtctgcggggagaacttgggagtcctctggggcttggcttctctcagggctttggcacctcctctgaccccaagaaaccctgttaatgaatccggagggcagcacatgcctggctgcctggaaaggcccactgaactcttactgcaagtgctctagctggagactctggaggggtgggagctgacttgtcatgggtggcaggattctaactcaaaatattcgtcagtctgttttctgggtgattcctgttctctcctcaatctctcaaatgctccaaaggcagtttatccttccctggcccactttgaagcacaaaccagcactcctcaaaggccctgaaatgggaaaatgtagctgcagatttatggagcccactctcctgactctaaggacttgatgaatctggggctggggctcaggggtgtgtggaggagaatgcaggggcagcgagggagggtcaagggggtcagcgtctacagcaagtgcccgcatgagtctactaaagcggccatgacaaagtacagggggcttaaacaacagaaatttattttctcactattctggaggctggaagtccaagatcaaggtgttggcagacttggttgcttcggaggcctctctccttggcttgcagatggctgccttctctctgtgtcttcacatgggtcttccctcagcgtgtggctgtgtccacatccacatttcctcttcttataaggacgctagtcatattggagtagggcccaccctaatgactgcgtttacccttaatacctctttaaagaccctatctccaaatacagtcacgttctgaggtactaggtgttaggacatcaacatggattttggaggacaaagttcagcccttaacagtgctcagggacaataggatcttctatctgtcaagtgggactaagcgcaggggtggagagtgggtggggctcaggccttagttaccgcagtgtgtgaaaccccctcaccatcagcctatctctgtggccacccgcctcataaacagatggtggggcttcagtgcctggggtggggatgaaggggttacaggtaggaagaccctgaccctgactcaagttagccagggcagcagaggccaccaccatatgccaatgcttccagagggcactagctcagcagtaggaagtagatggcctgcgtttaggtttagctctgccctgaccagctagtgttctggaaaatctcttaagtgctatgggatctgcctttcatctctgaagttcaaatggcaagcaaacgtggagtatggagctaagccaaacccacccttgggtccaaaaatgttaaaaaaagacatcaaaaagacttaaggaacagcctagacctttgacccctgaacccaaggcaacaaagcctctttggcatttcccaggagcccgtcttgttgatctttcactggggagagtggtctaaacctagaagggcagcttgagtcagaagtggctagaagtggagatcattcattttggcagtaaactctgccatgttttgcccgtaactgcttattcaccacataccttagttttgtcatctgccaaataccttacctacatcaatgggtttttaaggaggattaaacaaacaaaataaggtacagatatacttgttgtactgcactctgctttactgcactttgcagatactgctttttttttttaattgaaggtttgtggcaaacctgtgtcaagcaagtctatcagcaccatttttccaatactgtgtgttcattttgtgtctctgtgccacattttggtaattcttgcaatatttcaaagtttttcatgattattttatctgttttggtgatctgtactcagtgatctttgatgttactgttgtaattgttttggggtaccacaaactg

SEQ ID NO: 502 - DNA, 4001 bp, Homo sapiens
gcattaatcttagaactcttcccaaaagagaaatgtaacacacttataaagcaaaggaaggatacagtttgacagaggatgatttgaagcataggaatgaaaaccgtatgttaacatgagttagggaagagggactgatttgcttggaataaagcatttggattgaagaagggagtctggaagctaagatgagagagctcaggtctcagccttcctgccatgccccctccaggaccccaggcaccttgttgttatattgcttcctgtgggtcttcttccatagctcccagtgggtgtccagtatctcctcagggtacagagcaaagctcaccacaggtagcagcagaaccttgagcccccacatcctgcagaagaatgtagttagggaaaactcttccatttggcagggaaacagaggaaaactaggctttatgaggaagagaaaggtagacggaaaaagggtgataaaacaatgatagtcaggaggggcctgtgtttagataggatgctggtacatctggttccaaggactttgatctagggggatttagccatttctctctttctctctctctctctctctcgggagatttaggcaacacacactctctctgtttctctctctgtctctctctctctcacacacacacacacacacacacacacacacacacacacacacacgtacacaaccagaaatgggggatagaaactggacaatcagaatgggctcagtgcgtttcctccagggtccctagcaggcttggagacagacaaatagcaaggtggtagtggggttcagaatacacaaaggagagatttccgtctaagttttgcctcctgatcatttcttcgaggcgttcttctctttcgtgcctaaattctggtactttcccagatcttgtcagaagaggacaagggaaaataggacaatgtttcctgttttctgagacattgtatatctcctcattctccttatgcatttcttcttcctttttctctcccttccctccttaggcaggaaactgccctaatcttaaccagatgctgcgggcaaggttttttatttttcccctaacaacaaaaacccactgtggctgccgcaaaggacaagaagcctcagatccaaggtttgttagaagaatgttcagactgaaaagcaatgttctatgatgatgaaattcacagcttttcataagtttactctagttagcttcactcatttcttgcattggctttcttaattacaaatcctccattttaagaacaatttgcagcctgcagcatgacatatggcttacacaattgcttatagtccatttacatgtaattttgcaaactggcaaaatgtccagtaggacatttaaaaactagagtgttaagggctttgagatgtctcagtgaacaggaagcactgagctactacctccccataccactctcctcctcctcactaaggagttaaccgttttgatccttgttggccaaagtagaaaacactgcagaaaggccactcttgaaggatggggaaatgattccctatatactttgcttttactaacaatcatgtatgtatatatataaatcatacaaggaattctacagatttccaggcagattttatttagccagggaatgacctaagaagtgcatctctgttttcatctgcagaggctaaaagtttattgtgatcctcaagtcactacatccctaatactcagagaattgacaggaatgaaaagctaaaagatctaggaagttgcaaacgttacctgctgatggaaatctgttgtctggcttcgtttcggcagcaaagtgtgggcacaccatcaggggtgctagatttattccatcgggattgcggaagtcagctccagtgatcggctggaaaatttgggtaagaggaggaggcggggatagaaatgctgagagaaggaagggtagggaggagggaaggaggcagtggatttgcagtgtttctgtgtgtatgcagcatgtgtgccagggtagggaattactagctatttagtctcacaagactgtctttggtggcaaataacaagacctcaatatctattgactcaaataggagcttactttctcttttggtgagtaaaaggaaggacacagccctagtctctcccatccttcttcttcaatatctttattttaatattgggggattatatcttttcctacccctttcctgttaggatttacctctccaacattgaaacctattttcatatttgtgtctgactctcacctctgggatgcggtaatgaacataaaaggctataaaagaataatgtaatggaagccataggctccagaattctttgtatttttataagcttgttggttgcaagttgtcattacttccaggcagaatagttttcccagcctaatgtggttttgctgaaggaggatatgcccagaaagtccagatgaaactgtctttaaaagtaaccaaaaacagcagtcctggttatttatgacagcacttgaatcaatgccgtaagttctgatggactcacatgtgactctgttgctaaaactctcaggtggtgggatgcccgataaacatcatctgtctcaattaaaatccccaatctaggacaagtcacatgagcttctccaaatgcttccccaacatccaagcatgtgacagatcataagaatctagctgattcctcaaaccacaccccaaacttcattttcttccataaacagatgtggggaaggagaaaaaaaggcttcttggaatagaaaggataataaatgggatctgtaatagactcagtttctagctggattccatgcataaaccctcaaaaatacaggcttatgcctctggattttaagagctgctaacaggctaggcgcagtggttcacgcctgtaatcccaggcctttgggaggccaaagcatgtggatcacctaaggtcaggagttcgagactagcctggccaacatatagtgaaaccccatctctactaaaaaaaaaaaacacaaaaattagctgggcatggtggcacacacctgtagtgccagctacttgggaagctgaggcaggagaattgcttgaacccaaggggcagaggttgcagtgagccaagatcgtgccactgcactccagcctgggtaacagagcgagactccatctctcacacacacacacacacacacacacaaaaaaaaaaaaaaaaaaaaaagttgctaatgaaccaacatagtctcctagagggaaaccaggtccagacttgaacagtttaaatttcactcattttaatccagaaaaggacatactgggggaaggcatccagatgtgccctagtggttttcaagtcccgactcttcccctctctcccaagaacccaggcaacgcccaccccaaaacccccacctcatggtcagagcattcctgctgatgttactcagaatgtgtcaggatcaggaggacaagtgaggggggaggcgtgcaatgtgatcagaaccctatgatttctgattcctgaaattaaagacacaatgtgccttatgtttgtatgtctggagcttaaactatagattcctctggttgtgggtgcctgttgtttatgaactggaaaggaatgataaagccgcaatcaagatcacacaacacaagaaattttacaaaaggaaaaaatattttgtttgaaaatctttgctacatgtcattatttttgccactgtaaagcttagcacagatgccagcaatacagaaatggccaacaagaaaacaaaacagtcaaaaataaaaccctgaaggaaaagcaaaaacaaaacccccagagcatcttctcgctatcctccccttccccaaaagccctataataactgtacaatattatagtcctgatcacatttaaaaagtcgattattaaaaaacaagggttccattggaaactcaactttttggtttcgtaaattgtgatataaatatatatgtatactgtaagtgtgcacatagaataaaa

SEQ ID NO: 503 - DNA, 4001 bp, Homo sapiens
ctgctcaaatggcacccttatccgtgaggccttccctaaccctcctgtcatatagatagacttcttaccaccaccaccacccagggcccttcctactctccatgccttctgttatttttatctacaacacttatcaccatctagcatactacatatctgcttgtttattttcttatttcctgtctctctcactataatataagctccataacaggaattttgttttgattcctgctgtatggtaccaagaacagtatctggcaagaaacaagtacataatatttatttatttatttttgagatggagtctcactctgtcacccaggctggaatgcaatggcacaatcttggctcactgcaacctccgccttcccggctcaagtgattctcttgcctcagcctcccgagtagctgggattacaggcgcccaccaccacatccagctaatttttgtatttttagtagagatggggtttcgccatgttggctaggctggtctcgaactcctgacctcaggtgatccgctcaccttggccttccaaagggctaggattacaggcgcgagccaccacacccagcttaaatatttactgaaaacactgcctgtaagaacacaattttaagaggtagaaaacagtactcctttaaaagcatatcgctcgagtggcaatccaatctaccttttccttgtattgtttgccataggttttcttccagagatgccagtggtgatccagggtaggatctttatgcaactgtgccactgcagaggagcacaccaagagcacacaaaccagccgtttcattctgtgtaaggaaaggtaacataggaagtgttgctattagctgcatatgttgtgaccacatgttttcataagagaaaataacaatgcaaagtctatcaaagggacagactattataaacagaattatacaggaaaattcctgggatatatagtcacagggaacagctgcagatttatgtcagaaatactacttccaatgcttagtagcactttaaaaagtgatttccaggaatttcccaatatctggtaaaccaaacacatctagagggttagaaaacagggactttccaggatttgccaacaaatctaatcaaaggaaatctctttctctctctctcaaaaaaaaaaaaaaatcatccttaagagagacaaacctctgaaaaatcagtttatctcctgaatttttgaatacatgggctcttcttaactgacctgtttaaatatccacagtctttacagatagttaaaagacaattctcatctattgctttcacatctttaggtaggtaattttcctttttacgtttttttttttttaatgatcagacatctgtttcaaatgaggcaattaactactctttaaaatgccacttctgtatttaattcaagagacatcaacagaaattcagcgactagctccctcaaactggattctactttcttttccatttctttttaattgaaaacatctggaattttaaacatgtaagcctttaaattatattccaaagaaagccatgtttcagtctcaacttagatgcttagatgctcaagcagacattaactttttaaaaatagagaagaggcaaattgaacgacacgattttttagtttacttcctgaaaccaaagatttaaaacctagcaggcagaacaagttacaaacacagagtgtttgaagaccaaatgggagaaaaagaacaaagagtacatacgtgatagaaccagcagttgctcccacagtaagagtccttgaattagtgggctctcttctaagatttcaaagcaacaaggagatttcagttcaattgacttgaaaagaaattggaacttgtcacatgaggtactcaaaatgaggaagtgaactttcatttcagtttcatttaaaatctagctagtacagtcacctctagtcatttccctatggtcttggggacaaagtggatacagtaagccatcaagaagagcccttgtctgagcccagtggctcatgcctataatcccagcactttgggaggctgaggcgggaggatcacttgaggccaggagttcaagaccagcctaggcaatatagtgagaccctgtctctgcaaaaaaattttttttaattagctgggcatggtggtgcatgcttgtagtcccagctgagggggagggtgaggtgggagaattgcttgagtctaggaggacaaggctgcagtgagccatgattatgccactgtgtttcagcctggatgacatatcaagaccctatctcaaaaaaaaaattaaattgaattttaaaaacaccaacttttacatggaaaacatttagttataaagagatttagataaagctccccaaatcccagctccttgtatgatttcctaggaaaacctgtcttactgcttttaacacaactcattcatgatctgatattgtctggttctcactcagccattccttcgttcatcaaactcaaaatgtctttattaatatatactatatgtatagtttagtaatatgcgtgtgtgtgtgtgtgtgtgtgtgtatgtgttagtatattcatggaaaaaaggatacactcaaatatatccaattgagaatgattacctgggtggggtgggagcaagacgaactatcatcttttaaatttgcattttcctaattactaatgaggttgaggatcttttcacacatttattgaccgtttgaattttctgtgaatttcctgttcatcttttttgctcatttttctattgtattgttgcattttcttagtgatttgtgggaggtgtgtgtgtgtgtgtgtgttgtgtgttttccgagacggagtcgtgctttgtctcccatgctggagtgcattggtgcgatcttggctcactgcaacatccacctcccaggttcaagcgattctctgcctcagactcccaagtagctgggattacaggcacctgccagcatgtccagctaatttttgtatttttagtagagacagggtttcaccatcttggccaggctggtcttgaactcttcacctcgtgatccacccgcctcagcctcccaaagtgctgggattacaggtgtgagccaccgtgcccggccaaggtgtatgtgttttaaaaatatattctggcttctaatctttgacagttatatacccttaaaaacatcctcccttagtcttccacttgtcttttattttattttttcttcctttgcataagcctatgaaattccacttgtcctttagtcttgtttatagtgagtttttctatatgaaatttttttatgttgaggtagaacattttattcagcttttccgtataatcaatctatactgtttttgtataagaaaattttcctcatccaaatgtaataaagatacactcatcttatttttatactttcagagagtgttttatttatcttttctatggctactgcttttaggtgtttaattcacctggaatttagttttgtgtatggtatgacgtagggagcttattttctttgttttccaattttgattctacctctattgtacaccaaattctcatacatagataggtcagtttctgagctcatgaagctgttctttttatcttttgctacttcagtatcacacagttttaattaaaacagctttgtaatatgtctccacgtatggtaaggcaagtcatctaggccaccctatctttgttcttctttttaaacattgtctttgtattttgtacttgttaactcttctttatatgaattttttgaatcagtttatcaagttccctgaaaaactctgttggagttttttgcttttttcttttggagacagggtttcattctgtcacccaggctggagtgcagtgatgcaatcatggctcactgcagccttgacctcctgggctcaagtgatcctcccgcctcagcctctggagtggctgggactacaggtgcacaccaccatgcctggctgattttgttttttgttttttgtag

SEQ ID NO: 504 - DNA, 4001 bp, Homo sapiens
tggtttgcttagtctcttaccttagtttattttctgttctctgttgatataatacaacttatctttttgggattttctgttctgcttttagttttttctgctgttattgctgggagctcacgtcttacccttctattgcagcacacattgcgtttgctagagacaccctccagtttcttctttgtactttcttactggagatttggaaacaatcactgagaagacctgtgagcaccgagtggctctgaaaacttcaaacctaactattcaaaagtaattatctttaggaagtctaccttcagaaagtctaatcaagaaggtaaaagacaacagtcattacaatcaccctccgtgattccaactccttgcattttattgccatcagctttggctatagctgacagaggggaggtagacttgagattggaagcaaaagaaactatgctaaaaacatggtaaattttaatatataaaagcgctagcaatagatgattactggggattcaacgacattaacatgaggtcaaaatcaacactttgcacctgctgaaatgaagaccacttgacaaaacctttaggagcacactagaagaggcactttttggtaaacatgaatagctagaataccttgcctttatttactcttatctctgagatttaaaaattgttcttacttttcatcctctaaattttgatagatgatcgtaaaaccaatcaaaatatacatgaatgtttcctgggggcggggaggacactataaaaaaggggttagagagttaccaaaggacataggactagattaatcataaacctagatgactgaccctgaattttcttcaaacacttcctgtcttttgtttcaacctgcagtataccttcaaggttaactgcagtctccctgagcaatggaccagcccaccctagactgggatatactcattcctaatccactgctacttatttacttatgtatactgtttcatttgaaaacatggtgttattcattgactgtcaagcaacatatactgcattcctgcccacacaaagccagctctgcagatatccaacacacccacctcactgtgaaatataagatggcttttcatcaagttctcagggaggaaatagggtggaaaaggaaaaatgaaacgcaattcaaacctaagaaacccttagaggctgggtgctcccagaaggaacagaaagtagaaggaaggtacaaagggtgaaggagaggaggtcctagttctccctctttcacagtccaaaacagtcccaaaacaggagagctctcgactcctcacaagaggccagaggatgcgaggggctgcgggaggaagactgagcatcagagaatgggggatgggaagaacttaagtgggagaagccgcttcctccgtaaagctggctgtctaggtcggtctttgatttttgcttcgccccatccctcctttttgggaaacaccaattttatcttacggaggaaagcagctccagtcccaccctggcgagcagggacaggtgtagggagggatgtttggccttccgggggtacgaaatggggttgggggcggcagcctagagaatcggtacctgtgagtcctctccgccaaggctgaggtgcggggtgggaggtgcctttgaatgaggggtgtcagagggaagccccttctgaggagctgggaatcgacgagggacaaaaagtagctgtgaggaccctcggaggatgaggagccgcctcctcggggaataccgggaggtggaggagacggccccgccccctcaggggatgggcccagaggccgttgagacggcggcgggaggctaccggtgcccctatccttgctttgctcttgagaacccggcctcccagccatcaccaagccccagggatagttgctcctacctttccacgacgctccgggctccgctcccctccgcctccactccccatccacagcggctgaggctccgccccctcagccgcccggcgggggcattggcattcaccagcgccaatcgcctccttgcttctccagcctcggccccaatccgcgccggctggaggcggggcttctccaaagtcattcaggctcctcccggggccccaagatcccttttgtttgggaagagcaaggccgggattgagctcgcgtcacttccgggaggaagcgccctcctgggtcctgggcttcagggtgggctcgcgcccctcccggctcggggtctgcaactttccacctctgcgtgaaaagtctgggcaggaccgtgactagtgcttcgtgcttttacctgactgtacgcggagtttaggaatggagggctctggtggcctaatcgattgggattttatccagaatgttaataaatgaagtgggctttggtgtctgcattagaatgaattcgttgttgaaaaacctggcttccttgctccctttttttttttcttttttctggaagcgcctgtgggcgtggtgctggaagcaagggtgcaaagatgaaacacctggagatcacccttctctcaaccacattttgtacagaagaggatactaactttgggggacataaacccagccgacctgccttccaggcggaagtcaaataattgcaaatttgtgtggcaggtttttccaccctatgcttgccagctgaggcgacttttttctttccttggcctcattatattgtggggaatggtgtttgcagtgaagttgaaacaatggagagtacagaggatgcaaggaatgtctgccttgtgaacacaggaatgcagatcttggtggcagcaagtcttaggcaggaccaaataactcagagaggggagtggatgtataactagttgtatccctacctaaggtcaaagtttctgaattccttttccacagaatggctgtcagctcacagattgatgcagctggttacatttacaataaccacattatttaaaatacaatataataaatatttgagacgaatattcataatgcataaataatgtagtacacttaatacattatccctaaacttagcaattataattcgcaagacagcattagggacctagtgcttgcctaggcagacagtccccaaggcagatgcagcctgcctcatgcagtttacagtctgactgagggatgtgatcagtttgtgcgattatagtctgaaagaagtaaacaagtatttatcatgttatcactgtgccatgtactttcatttaatggtatttgatgtcattttcagtgctgtatgagaaatctatcctacagtgtaggatagacatcattgtgtccaatttacagatgagaagatagagattcagagaagtcaaataaagtcatagagctagtaaatggtaaagaatttccagtaaggatgtatgactccatacttatgccatattctgctcacttcacactggctctcacatgctggactaagaatgggcgtggatgatggtaaagcaaacattagagccagaaggacagctctatgcctccccctgttgattttaggcttgggagggtcatctctgtatatgaaggatagcaagactatgagtgaaggtgctcgatagcagtgtaagtgaatctggagtaatgatgcagggtatactgaacttcagaaaggcattatgccttgtgttctgaaaactgacaatctgaaagctaaaatgaggggccaggcacagagtaggtactcaataaatattgacttgaaacaaaatgtctgaaatgattacaaatacagagtgttaggtgctggagcaggcaaaggaacttgaaaaatcccatttcctcctcctccctttcgctctgcctatgtgtatgcaatgaggaagtgcctcatcgcctgacaatgaagcagatgtgggagaacaagctattttctgctggcttctgagtcactctaagagttgttctagtgaatcagctcctcccttgtttttcttttcttttttttttttttttttatcgagatggagtctcgctctgtctccc

SEQ ID NO: 505 - DNA, 4001 bp, Homo sapiens
accctggctgcccggggacaaaggaggcagagcccacacagtgcctggacagcagtggccagcagtgtcagggctcccacccagctgtgccaggacaccagatgaggcagctcactgcgggtcctgctggagatgatgaagcccaggcccagagctgcacagaggatggctagggtctgccctgcccagtggagccggatccgtgcttttcgggagcagaagaagaacagggagtgttcaggtgagaagagtaggatggcttcagccatgcagaggcagaactgtgaacataggagagagccagtaagcctcatgtctggcttggaggcctgagaaaaaggaggtgctctcatacatcctaacaaagaggacaaagggtaagggttaaataagttcaaccaggaccaccagcctcacagctcaacatttctgggaacatttgggaatcagcacttgagtgcacgtctcctcattcaggttgacatctccccatcccaacctctacaatgactcccatttcttgaccagtggagtagcaaatgttaaacttcttcctgaactttggggacaagtcgggagatgaccggataacacctctccccccttctcctttccggccccaatggagaaagaaattatcttccatgccctcccgcccttttcaaccatctgacaactgcctatggcccagccctccaggtttcccaatcccataggctgcagggaaagatgagccctagatgtttcctccacctgtcttagccttagaaaggctgagctttctgaaagctgggtgcttccctgggagaatgaggtgaggaatacccaaacaaatcagatagaagcctaaactcaccgccaaggccatgaatacagggtgccaggagaaaagacctaagaatcaaagagaacaggctgagggcttggtaccattgttcctgcccctgtagctaggtggaacccaaagaatctagccacaggagaaaagtaccatccccaatcctaatcgggcacaggaactaaggacaaagtggagcagccaaggagccccagggtgagcaaccaagagggcctccttatccacacacatacaacagtttggcccgggttccccgttcagcacctctcagctggcagcccagtcctctgccccttttttgttttttgttttttttggttgttgttttttgttttttttttgatacggagtctcgctctgtcgcacagggtggagtgcagtggtgcaatctcggctcactgcagcctccacctcccgggttcaagcgattctcctccctcagcctcccaagtagctggaactacaggcgcgcgccatcacgcctggctaatttttgtattcttagtagagacggggtttcaccatgttggccaggctggtctcgaactcctgacctcaagtgatccacccgcgtcggcctcccaaagtgctgggatttcaggcatgacccaccgcgcccggcctccttcacttctatcctccatcaggggacctgtttctgaggaagtagttcggtctgttcaatcgtctgcccttcccccacagcacccaaaaccccattattccaggatccctggggccccgccccaccaggccctcaaaatccctccactgtttctgtctcccctttactgctggggtccctcctccaagtctcccggggctcccaagcgctgcccctccagcatctccactccgcccccttccgcaaccccgccccgcacactcactggttcctggccgggacagcgctgtcagaaagatggtgaagcccaaagctaccaggtgcgccaagatcccactgcctctccgcagccagcgggtcagtctcggctccccagctggagcgggaaccagacctacctccaggggctgcatggccgtggcccgcgggcccgtacactccagctgcccgaacacgtcttccgggtttgcgatcgcggaggcggtggcggctgcaggagaggctcctccccggggacgccgccggcagtgcggcggagtggcccacagcgccctctgggggctgggggggaaacgcgagtgccccggagaggcccgctcccgcgagagcccggaggcagaaggggaccgaacagttcccagcccaccttcatttgtatctgtgtgtctgtctacaagggcctaaatcccaagcagcctgtggaaattacttttgtggcaaacgatttcagtgaaaccccaaatcacacacttggtacgctgaaccaagactgtgaaacaagtgtttggagccgatttctagtagtactggatttccctggctgtgcactgtctcctgtcacctcattttgtcttgttcagggaacaagcttcctccatgcctaagagcaaggagaataggaaaggacatcgccaaaatatagtgccttgaacctggtggaccaaaggagggaaatgcaagtctcctctcgcatctgcacgggagtggtccccagcgagataaatggaaaaactagggcactcccagccctgccgcctcctcagcagctgctcagccctgaggagccaggtgatcctgaaggaccaaggcctcccacactcctgtggcctcccacaccaccagttctgcaagtgatgatgccttttcccttcctgcctccaaaaaaggggtggttcaacccaaggaggcctccctgggaaaggttctaccccttccttaaaggcaaacccacaggcagggaaggaaggctgtccaatagaaaacaggaatatcccaacagcaatgaccaacccagctcaagctccctaagtggctgagaaaatgaggctgcaggaacagctgaagaaaagcaggcaataattcagggagggatggatgcctagggttgctgaaggaccagaaaagggtcacaagccaattcccagaccctcggggcaaggatcctagaaagagccagaagtgcagctccccctctcgagtttctcttcccaatgggaccatagtcgtctctggtgtcaagactcaggaagccttactcattcagagccacacgcctcatcatcctgtctggaaagactaccccagtgacacaaacatttttcacactattgaaaatgacaagatgacaataataataataatgagcataagagacttttgcaggcaagctatgggagctggagtctggctgcctatcatctcagcctcccagggtagggctggggacagtaaggacactcattttgttattttttttccttccttttctatgtttctgtttttatattttcatagcagcaacagaacagggagacagtcttgaggtattttaaagagctttttttcttaaaaaaaaataatataaagttataaaaagcggcagcagcctggggcccggatctggaggggaggaggtgctggcggctccgttgcagtgggcaggcactttctcgttaatgggcttttgactgcaggaagacaagaggcgagagaaagggtcagggtgggggcctaccagctgtcctacccagtgaactgtgtgcactacagaggctaaagcttgatttccttctgctggcctggtgagtaaaactgagcaagggggaagatgaatgccagctcaccaggggcagcctgggtagtgaagctggagaacacacagggtttatgattaggcccacatctaacccaggagagcacccccgtcccacctccagtaagtccctcctggcagagatcatatggagagcacatagcacactacaccagggctcccaccagaagaggcaaataaaactggctgcaggctttactggaaaccctggagaacttgcctgtcacctgcacacctggaggtgggcacatgtgcataagtggacatggggttgtgtgcctgcccttcaaggccctgatgcccagaggaaaaaccagtgagaccagcccacccaccttgctgctcggcatgttaggctgtgacccagggactcaaactccctttccttcagggaacagaggtag

SEQ ID NO: 506 - DNA, 4001 bp, Homo sapiens
tccacatgtcagatggtagagcttgaggcgagccacccttgagaccctggctgcccggggacaaaggaggcagagcccacacagtgcctggacagcagtggccagcagtgtcagggctcccacccagctgtgccaggacaccagatgaggcagctcactgcgggtcctgctggagatgatgaagcccaggcccagagctgcacagaggatggctagggtctgccctgcccagtggagccggatccgtgcttttcgggagcagaagaagaacagggagtgttcaggtgagaagagtaggatggcttcagccatgcagaggcagaactgtgaacataggagagagccagtaagcctcatgtctggcttggaggcctgagaaaaaggaggtgctctcatacatcctaacaaagaggacaaagggtaagggttaaataagttcaaccaggaccaccagcctcacagctcaacatttctgggaacatttgggaatcagcacttgagtgcacgtctcctcattcaggttgacatctccccatcccaacctctacaatgactcccatttcttgaccagtggagtagcaaatgttaaacttcttcctgaactttggggacaagtcgggagatgaccggataacacctctccccccttctcctttccggccccaatggagaaagaaattatcttccatgccctcccgcccttttcaaccatctgacaactgcctatggcccagccctccaggtttcccaatcccataggctgcagggaaagatgagccctagatgtttcctccacctgtcttagccttagaaaggctgagctttctgaaagctgggtgcttccctgggagaatgaggtgaggaatacccaaacaaatcagatagaagcctaaactcaccgccaaggccatgaatacagggtgccaggagaaaagacctaagaatcaaagagaacaggctgagggcttggtaccattgttcctgcccctgtagctaggtggaacccaaagaatctagccacaggagaaaagtaccatccccaatcctaatcgggcacaggaactaaggacaaagtggagcagccaaggagccccagggtgagcaaccaagagggcctccttatccacacacatacaacagtttggcccgggttccccgttcagcacctctcagctggcagcccagtcctctgccccttttttgttttttgttttttttggttgttgttttttgttttttttttgatacggagtctcgctctgtcgcacagggtggagtgcagtggtgcaatctcggctcactgcagcctccacctcccgggttcaagcgattctcctccctcagcctcccaagtagctggaactacaggcgcgcgccatcacgcctggctaatttttgtattcttagtagagacggggtttcaccatgttggccaggctggtctcgaactcctgacctcaagtgatccacccgcgtcggcctcccaaagtgctgggatttcaggcatgacccaccgcgcccggcctccttcacttctatcctccatcaggggacctgtttctgaggaagtagttcggtctgttcaatcgtctgcccttcccccacagcacccaaaaccccattattccaggatccctggggccccgccccaccaggccctcaaaatccctccactgtttctgtctcccctttactgctggggtccctcctccaagtctcccggggctcccaagcgctgcccctccagcatctccactccgcccccttccgcaaccccgccccgcacactcactggttcctggccgggacagcgctgtcagaaagatggtgaagcccaaagctaccaggtgcgccaagatcccactgcctctccgcagccagcgggtcagtctcggctccccagctggagcgggaaccagacctacctccaggggctgcatggccgtggcccgcgggcccgtacactccagctgcccgaacacgtcttccgggtttgcgatcgcggaggcggtggcggctgcaggagaggctcctccccggggacgccgccggcagtgcggcggagtggcccacagcgccctctgggggctgggggggaaacgcgagtgccccggagaggcccgctcccgcgagagcccggaggcagaaggggaccgaacagttcccagcccaccttcatttgtatctgtgtgtctgtctacaagggcctaaatcccaagcagcctgtggaaattacttttgtggcaaacgatttcagtgaaaccccaaatcacacacttggtacgctgaaccaagactgtgaaacaagtgtttggagccgatttctagtagtactggatttccctggctgtgcactgtctcctgtcacctcattttgtcttgttcagggaacaagcttcctccatgcctaagagcaaggagaataggaaaggacatcgccaaaatatagtgccttgaacctggtggaccaaaggagggaaatgcaagtctcctctcgcatctgcacgggagtggtccccagcgagataaatggaaaaactagggcactcccagccctgccgcctcctcagcagctgctcagccctgaggagccaggtgatcctgaaggaccaaggcctcccacactcctgtggcctcccacaccaccagttctgcaagtgatgatgccttttcccttcctgcctccaaaaaaggggtggttcaacccaaggaggcctccctgggaaaggttctaccccttccttaaaggcaaacccacaggcagggaaggaaggctgtccaatagaaaacaggaatatcccaacagcaatgaccaacccagctcaagctccctaagtggctgagaaaatgaggctgcaggaacagctgaagaaaagcaggcaataattcagggagggatggatgcctagggttgctgaaggaccagaaaagggtcacaagccaattcccagaccctcggggcaaggatcctagaaagagccagaagtgcagctccccctctcgagtttctcttcccaatgggaccatagtcgtctctggtgtcaagactcaggaagccttactcattcagagccacacgcctcatcatcctgtctggaaagactaccccagtgacacaaacatttttcacactattgaaaatgacaagatgacaataataataataatgagcataagagacttttgcaggcaagctatgggagctggagtctggctgcctatcatctcagcctcccagggtagggctggggacagtaaggacactcattttgttattttttttccttccttttctatgtttctgtttttatattttcatagcagcaacagaacagggagacagtcttgaggtattttaaagagctttttttcttaaaaaaaaataatataaagttataaaaagcggcagcagcctggggcccggatctggaggggaggaggtgctggcggctccgttgcagtgggcaggcactttctcgttaatgggcttttgactgcaggaagacaagaggcgagagaaagggtcagggtgggggcctaccagctgtcctacccagtgaactgtgtgcactacagaggctaaagcttgatttccttctgctggcctggtgagtaaaactgagcaagggggaagatgaatgccagctcaccaggggcagcctgggtagtgaagctggagaacacacagggtttatgattaggcccacatctaacccaggagagcacccccgtcccacctccagtaagtccctcctggcagagatcatatggagagcacatagcacactacaccagggctcccaccagaagaggcaaataaaactggctgcaggctttactggaaaccctggagaacttgcctgtcacctgcacacctggaggtgggcacatgtgcataagtggacatggggttgtgtgcctgcccttcaaggccctgatgcccagaggaaaaaccagtgagaccagcccacccaccttgctgctcggcatgttaggctgtg

SEQ ID NO: 507 - DNA, 4001 bp, Homo sapiens
gcatacacatgtgtacacacagccatactgtgccaagaggactatgggaactgataaagtgggagacaggctcaaggagaagacaggtcattaccttttccagtgtaagtgagcaacccgcttggcccccgaaactccaccacatccccaaccttcaggctatccaggtactgagacatcttccctccctcaggaaatttggggtgcacacccttcaggtagaccttacaagacagagagaaaaataccttatttggaatgtcactggtttctgagccccatgttgactaaacctccctgaggctggggcagggatcagatatgtgctatcttttccccgtctacatactttctttctttcttttttttttttgagtcagagttttgctcttgctgcccaggcttgagtgcagtggcgcaatcttggctcactgcaacctccgcctcctgggttcaagtgagtctcctgcctcagtctcctgagtagctcatactttcttcacatccacagagtacataccatttcctgctgtcaggcaaatcttagaaatttctacaaatcccagaaagaatgggtaagcagcccctgggtcccttcctagccccttaccttgatgacaagatccacatagccttgatcctcatcactggtgacaggagtgtatggcctgatgaccaggctgccatcaattcgggtggagaggtagatatgtttgcctggggaccgtgcagagagctacataagggttgtctgtgatgtgctgcatccctcaaaatactcaaagagatttgagagaacaagatgtcttgcttcctgctgtggtcccaaggagctacaaggcagggaagatttgccccattgagccctcagttggatctcttataagcgcccagttgaggaaacacttatttccagcgtttcctgccagttactgccaggaccttgacagatgagccaaaagggtctgggcaatgggaaaaagttagtagtgcttgctcagagggagtaattagcaaatcctgcagggaagaggcaagactgttgagtgttaaagctggatgggggtcatggaagccacactctagaggggcccagtggcacctcacagcttggaggatgcagagccaagtgggggaaggggaatggtgtgtggagcaaaccggttgaagcagcgtgtttcatgagatcccaggaggggagtcaccttctgaggataccagggaaaggagcccattccacactttccttacccacaggcagccccagagtgtggtgggcggtgggcagggcaaagcggaacctcttggtgttgtggctcacagtctggagggtggaggacacaagtgtttcaccaagcgcgcctggcgctgccacgtcccttggacatcccaaccaccgtgggtgctgtaccctccatgccaggagcactctggtcccctccttcaccctggccctttcttccccaacttaccgtcttgtctagcagtcgtagcaggtacttttcattggggtccaggagagtgacctgaggccggcgggacctccgaaccaagtaggagcccacagccaggccgagcagagtgaccagccccacccccagggaggccagcaggacggggctctgtgggtagaggaggcagcgtgaccgccaggctgggtaagagcccggggcttgggtggtgaccgtcccaggggtggcgatcccgagctccagcgcggaggcatgccaagggcagaggggtaacctggcggagtcccgagcccggatgtgcgggatcgggaccccagcatccacggtgggcccagagccctgcggggcggggtcggcagcgacagcccctggtccggagctgagtggccagaaccagatggggaggggtcccccagtggaggatactgaatgagggtcttaccgtctggatccccatgacggagcgccttttcctccaccacctgacaagccgacagatcccacaatgcgccgcggggcgggtcggagggcggggcaggccgggggcggggccgggcaggaggcaggacctcgcggctgggggggcaggaggcggggcctggcgggggggggggggggtgtctgtcgggggcggggcctagcaggaggtggcggcggcggggccttttgggggcggggtccggcagaggcggggctgggcccctctgcgcgccaccctttccctccgctactcggtggctcagggtctccggtgcttattcaatacttttttttttttttttgagtcggagcctcgctctgtcgcccaggctggagtgcagtggcgcgatctcggttactgcaacctccgcctcccagtttcaagtggttctcctggctccgcctcccgagtatctgggactactggcgtgcgccaccacgcccggctaattttttttttgtatttttagtacagactgggtttcaccgtgttggtcagggtggtctcgagctccagggctcaaataatctacccgcttcggcctcccaacgtgttgggattacaggcgtgagccatcgcgcccggccccaagatcttttaagaccgcagctccagcctctcctcccagcgaggtggtccctgccacttcgacccgcttatatccgaactggatgggagttctgcctaaggtagaaccacgctaaattgggggattggaaatctcttgagtctgcgggtgctgagcggagagtgtaacgatgaaccagagacaggctcaaagtagagcagaagggcctgaagttaatcattgtgcagtcaccttagtttttcaaccggctgaattgcagcaagagaatggaacagcccagaggagtctcttacaggagtgaacagtggcatggcaacttcatttccttttgacaaaagactgattttgtttacagcgccaagccgtcagcctatcaggatgattcaggagcttcctttggtttcaaagaccaagcttcacatcctgatttgggttcttgtgcccttagggtcaaagaagtgggctttggaggcagagtgtacagaataagaatcttgcctctagcacttattggctctgtgaccttagatagcttactcaacctgagtttcttcatctacagatggatataagatggatatctacagatggatatatattattatctacagatagattgtatctagttcatagctttggtgtgaggcttcagtgagatatgttaacgtgcttagtgtagtgcctgtcataaagcaaaatattcaacagttggcagctactattataacttaaaagacagcacagagggtcagctatggttttaggaatgagctctgcctggggcacaagcatgggacaggaggaggcaggaaaaaacatcaggagccgctggagctacagatttcccaagatgaccattctttctcatacatgagtttctcaactagaatgacatttgctctttgatataccgtgatggatgagatctctgcagatgtcagtgtcaacatcttaaactaataccatcagggcagcagggacattagagcccccagttttcagttgtatttggtgaactctgtgaatgatccaagagatacttagttttccttttcctctccactggctgaaaatgttcctaagaccccagtacatgttcctctgaattttttaagcagcctgcacactgacttgagggaagtgagtgcaccagatcatggtgacatgccaatccatgcagagagggttgaaaaggggaaggaagggacccttcctcttttctgttccgagagaatgaggcgattatgttccggtgcttctgacatccccactgctggcttggttaagaagccacactactgatccttgccactgctccactctggctaaagaggttctaggccttcctccctctagtggatagatgtggcaagagagggggaagtatggaacgaaaggagagcataactacaactcgggcttctctcagtgattgcattttctgaaccccaaagtggca

SEQ ID NO: 508 - DNA, 4001 bp, Homo sapiens
ttctgtattctaccaccaagcacagccgggcatatggaaggttccctatgactgctcattcagtttacagatacaatctgggagctaggtgttgggaggcaacagaggtaaacaggtcattgttcctaccttcacagagcctcatagactacaaggtgttagatcaacccaattcatttttattgcatgctatggaccaggtatgcattatgagtgaatgaggtctggttccctctttatgctgatttcttttctttctttcttttttttttttttgagacaagagtctcgctctgttgcccaggctggagtgcagtggcgcaatctcagctcactgccagctctgcctcccgggttcacatcattctcttgcctcagcctcccgagtagctgggactacaggcgcccgccaccacgcccagctaattttttgtatttttagtagagacggggtttcactgtgttagccaggatggtctgatctcctgacctcgtgatccacctgcctcggcctcccaaagtgctgggattataggcgtgagccaccatgcccggcctttttttttttttttttttgagacagggtcttgctgtgttgcccaggttggagtgcagtggtaggatcacagctcactgcagactcgatctccgaggcccaagtgatcctcccatctcagcctcctgagtacctagatctataggtgcgtgccatcacgcctcgctaattttttttttattatttttagagaggaggtctcaccatgttgcccaggctgatctcaaactcctggcctcaagtggcccctcccacctaggtctcccaaagtgttgggattacaggtgtgaacgatgactgtaggacttctccacgttttaacagtcccactttctctgctattttggaaattagcagaaaagttggccacgtcagtcatgaattttaaagagttggttcatgcgtcctctgagctctatcttttcagttcaagaggcaccacctttaatccaggccttgacacatgttgcctcaggctggatgacttttcccaccccgcaggccttggttttaaaggtcacctcccttctgaggtcctccctgaaccttcccctactcattctctataaggcactctatttgtttctgttatacacgcattcactaaacatatttactatgtgccaggcactgttctcagtgctggggatatagcagtgaagaaacagaaacccttgcactcactgagctcatatcttagggtgagaaacagttattaagcaagatcaggatggaaaacagatggtacggtagtgtgaaatgctaaagagaaaaataactacggaaaagggataggaagtgtgtgtatcgcagttgacttatttgttcgcgttgtttacctgcgttctgtctgcatctcccactaaactgtaagctctacatctcccatctgtcttatttaccaatgccaaccggggctcagcgcagcgcctgacacacagcaggcagctgacagacaggtgttgagcaaggagcaaaggcgcatcttcattgctctgtccttgcttctaggaggcgaattgggaaatccagagggaaaggaaaagcgaggaaagtggctcgcttttggcgctggggaagaggtgtacagtgagcagtcacgctcagagctggcttgggggacactctcacgctcaggagagggacagagcgacagaggcgctcgcagcagcgcgctgtacaggtgcaacagcttaggcatttctatccctatttttacagcgagggacactgggcctcagaaagggaagtgccttcccaagctccaactgctcataagcagtcaaccttgtctaagtccaggtctgaagtcctggagcgattctccacccaccacgaccactcacctactcgcctgcgcttcacctcacgtgaggattttccaggttcctcccagtctctgggtaggcggggagcgcttagcaggtatcacctataagaaaatgagaatgggttgggggccggtgcaagacaagaatatcctgactgtgattggttgaattggctgccattcccaaaacgagctttggcgcccggtctcattcgttcccagcaggccctgcgcgcggcaacatggcggggtccaggtggaggtcttgaggctatcagatcggtatggcattggcgtccgggcccgcaaggcgggcgctagctggctccgggcagctcggccttgggggcttcggggccccgagacgcggggcgtatgagtggggcgtgcgctccacgcggaagtcggagcctcctcccctggatagggtgtacgagatccctggactggagcccatcacctttgcggggaagatgcacttcgtgccctggctggcgcggccgatctttccgccctgggaccgcggctacaaggacccaaggttctaccgctcgccccctcttcacgagcatccgctgtacaaagaccaggcctgctatatctttcaccaccgttgccgccttctcgagggtgaggccccaggacgggcggcaagggaccgtgttcctctaaccagcaccgaccccgaccctctgtggctttgggcaagacattgaaactctgtgggtcttggtttcttcgtctgcgaaatggggccgtagtgattcccgtcttctgagggttgttagaattgagttgtaaggagctgggcctctgtgcaggagtaatagagagtttgcgtgtcagcatgaaaagagctgctttctaggcctagccctggctctctctctttgactttgggcaaatggctggccatcctgggcctctatttcctgggaagtgaatggttttgactggacagtccacattgacctttccaggtctgacattctggagattaactgtatattttaaaagtagttggagagagtttatagtggagacagcaggatgtttaatctccaggcctgtcacctcttaagcccatgactactcctctgtcactctcactagggacagatcaaaatgactttgccaaaaccagcctgtctatctagaacagtaccagaaattattttccagagtccatggagaagcttgtttatccctttctccattcttccatcttcctcaaatcaggatagggatggggcaggtcttgaaaacagaatggttgaggtaagtggaaacagtattttccaaggagtgattaggggggaaaaaaaaggcaaatctggcaagattgggggactaagccagagaataaatcctaggtttgagaaaacttaagtcaattggccagcctcttaagcttctcaattccattcctgaaagctgattttcaagcctttaaacacttccagtgtccttacaaggtagtgggaaggatctcacaagacttggcatccttgagtgaccctggtaacaataccaagtggatgaatgcattagcagtattttagacgttaagattacattcgtttgcctaggctgaaaatgtattgtgtatcctatgtttttgctgctcacagagaggttctgtaggctgtaataaaactctgcaggatacagggctagagaagccatttggggtaatggagagaggtgatgttctttagggtagacatactcagattctcctcctagccttgtcacttacaaagtatgtgagttggagcaaattccttagtctctgagtttcatttttcattttatgaaatcccatctaacttgcaggtaaagctcctggcacagggtagatggtgactttcagtaaatggcagctctaattatcacctatttttcatatgcaaatagaacataaagtcttaatattttatctattgtcaagtttaaggaacagtggcggtgtcagagctaaaacttagtttatctgactcccagtccagggctctttctgctgcaccacaaaatccagaagttacttttttttttttttttgagacagcatcttgctgtgttgcccaggccagagtacagtggcatgatcgtgcc

SEQ ID NO: 509 - DNA, 4001 bp, Homo sapiens
gcataaaaaacaggaaaaacaaaataaataataaaatggtagacaaatcttaatatgtcaataattacattaaatataaatagtctacattcaccaattaaaagacagagattgccagaatgaaaaaaaagacccaagtatatgctgccttcaagaaactaatttcaagtataataatacaagaaggttaaaagttaaagaatagaaatgcatataccatgcacatactaatcagaaaaaaagttgtggctatattatatcagataaagtacagtttaggcaaataaaattatgaagaattaagagggacattacaggataaaaggatcaattcactaagaagacatgataatcttaaatgtgtatgtgcaaaacaacagagtttctaaatacatgaaggaaaaactactagaactgaatggagaaatagatactctcaactgtcctttgaaacttcaacattcttctttcagtaattgatagaataagtagataacaagtcaacaaggatataggcaaaccaaacaatatcattacccagtaaaatcaaattgatattgatatcaattacttcacccaacaataatttatatcaattattccacccaacaatagtcaaatacatattttttccagcctccatggcacatttatcaagatagactatatcttgtgtcatttaatcaaccttaacatatttaaaagaactgaaattgtacatagtatgatgtttgaccacaatggagtcaaactggaaataattaacagaaatgataacaagaaaatctccacatacttggaaattaaacaacatattaattaaataaggacacaggtttgggggcttagttttaacattctgtggctaattctgtcacttagtattaccaattgggtatttctcccataaagtgataaaactttgtctatcaatatttgagggcaatatacagccatgtgtttaaagtactgcaggcatgtgcagggaaaggggaactactatttgttatgtaccaactatatgtcagtattgaccattcactattttatctaatcttcataatcacttgtcacactgttgtctctcagcaagttacctgtgctgagtggcaggaaaaccagtattggtttcttgagatagggtttgatgtctgagagaacttgaaagaacttggtcaccagagtcggggagccctgataggagattattgtatagagacggaaagaagctgcatcaagaagggtcccaggtggttcagtcaggagtctgaacaccgtttggcaaaaatttaagcagaggaagaacattttaaaattattacttagtgagagtgcactgcaagggaaggaggttgaagctggagggctcagttagtgtagtgggaataactcagttgagaaatgatcaagattgaggtagtattatcaccattttatgtatgggaaatgaagtttctcagaaagaaagtatagcatttttaaggacaatcatataaaagagggcaaggtaatcacattacaagtaaggtgttccagtaatgtttaacatgacaacatgcaaatagtaaacatttaataatattccatccctagaaagtgcaggtggaatcatgccagttaatgggttaggaaatgaaactcaaagtgggttttaccaggttaccagcgttagccacacctcttcctgcccttcatcccccaccccacccacgttgccggaacgtcccttgtgctgcagaacagagttagggtcaggacacgctaggcaccttctcccactcctaccagctgaacctccaggtgcgactgctcgaagtccacaaggaagaagttgccaaggaagggcaggcgccagggccccggcgggtagttctttgggcgccgtcttttgagaaagtcagcagcgagcagaaaggcgacagtgcccagtaggagagtccgaggatggaccactgcccagagggcagccgccagagagcccatcgccgcgagcatggctcagacgtcctcctgctcttctgcggtccaagcaggcggcggtcccagcaggcgacggtccccgccccgcctcgctcccagccgtgccccgcctcccagcccgccccttcgcagcaccctgcgaagatgccaggcgctggattcccgggaggacacgcaccggtctcagaaaaggccaggctaggagcagtttcttttctatttagaaagctcatgggtttactgagagcgccacagacatttgagcctctgttcggttcaatcaccgtctctcctatgattggaactgtgcctggtaaacagcgataacaacagcagtacctaacatttcttgggctcttactatatgccaggcagcacatccgcctctttacatagattattatttcattttgacaaaattatgaaggagaagctctcggtagtctcatcttgctgttgaggaaacagaaaagttaagtactaagtatgtggtgaacaaataaatccacccttctgaaacacatctaaacgaggtcctgtatttgaaagtgtctggaagattaaaaggcactacaccaaagctgctagcactgagcagcagccataataagtgcttaattaacatttgttgaaggaatgtcttagttccgatccttgctggtttgctctattaggctcctctccaaagccccaagactgtgggacctccaggttccagcctttcataccatctggtgagtgcctgcttgggtttcacaaatggtgagactgaaaacatgaaacatagctcaggaatagtatagtacacactcatgtactcaacatagagtcacatattctgcttacaatattttattttatttctttatttttgagacagagtcttgctctgtcgcccaggctggagttcagctcactgcaacctccacctcccgggttcaagcgattcttctgcttcagcctcccatgtagctgggactacaggcacatgccaccatgcccggctaatttttgtatttttggtacagatggggtttcgccgtgttggtcaggctggtctcaatctcctgaccataggtgatctgcccacctcagccacctaaagtgctaggattacaggtgtgagcaagaaatgaaatgagagttgaagtctcttgttctctttctaaggtccagagagaaatactagtcagagcttagcttttatccttctagtccacattttcctgttttactacagctgttatgcatccatacaatatttctaatatttatatatgatatttttacacgaattattctacaactcagtattatgtgtttgagatttatcctgactgatatatgtggctctaattcacttaatttaatagatggatagtattctattactatgccacaatttatttgctcattcccgtatcagtggacgtcaggtttgttatatctctccttcctttttattttttgcattaaagaatgatgcaggggaatgacttccataatggcagcatgagaaaccccacagaacctcttcctagtaaaaaattgtgattgctaaaaattatttataaaactaaaataatttaagtccctgaaaattgttctaaaggcatacagtaaataaataaattttatttaagaagaatctactaaatgctagtaaacacagtaagagtctgtggcatttgagccataactcactctttctcctagtccccagatcaacgtgacagaaaccccattctagacagttaaatccaagaacactttccctagctctcaaatgaaggctacagtatctccctgagatggaaaaactgccagcatttcttatacccagcccccagaatgtcatgttgcagaagctctattctaggcaagactggctaagaggtctagggatatcctcctccatccagccctgacttgtaaggcagaaataatacctaccccgggccataattgccctcatcccagctttctcatgagatagaggttccacactgggagaggttagc

SEQ ID NO: 510 - DNA, 4001 bp, Homo sapiens
aacattagaaagctcttcctcactcactgagtcatcatttactgagggactattgggttacaaacataaatcagagatggtctctcccagaagaatcccacacttatgacactgcagaacaataactgagtcaagttaacactgctctggcctcttgagaaggatagctcatggaaaaaagagtcagcccttcactactgggagacccaggaggccttcttgaaggaggtagcttggtgctgggccttgacagatagatatgcgtgagaagataattccaggtagcaagcatagtgtgatcagagacctaaaggttgaaatgcagaggcaggtagtgaggtagtgagtaacatatggtaaaagaggagaatgggaaagaaggcagagtggtattgggaccagtccatatagggttagaactttggcaggtccccacatttgttctgctctgctgagaactatgttgcctcctttgctgagaaacaataggcctcagttccctgcaacccctatctctacttaagtgtgttcaattcatagcaccttggtgagtccctctccatgcagccgtttacctgctctgttcctacccgcccccctccccttgtagggatagcagtgcacaggggatgggctgtgtccctcctcagccctcttgctgctcctttctcttcttcctctgttcctctacacctggtgtgtccaatcttttggctttcctaggccacattggaagaaaaataattgtcttgagccatgcataaaatacactaacactaatgatagctgatgaactcaaaaaaattgcaaaataatctcataacgttttaagaaagtttacgaatttgtgttgggccacattcaaagccatcctgagctacatgcagccccatggggcgtgggttggacaagcttgctctacacacctgagctgatcatcaagctgtgccaggattttgctgattgccggggcacaggaaggggatgacatgctcaccgccagggagctcacagtccgggtgtgtgggaggagagccaggaggtcaacacaccctgttcaatgtgcaactcaaacaccagtctcctcacctggagaacattgtgcaggctgcccccctcatgtgtacccataattgtcaggttttcagatcctaaatcacctgttgtggaaattccgtgagtcttggggaaacttacttagccagttggtcccctataccagcagatctctgcctcagatatccaccccagcagagtgagctcctttcctgcagtctgacaccttctcaaattcctgcctgtattcttcacagaccataaactcctcatggcatggattcctcagatgggtgtctgtgctccctggcaaacacagggccaggcagagtgatggcattgagtgactgggcagagagcatctagaagccttgttctttgatgaaagccaaggcttatggggtaatcagtctggagacaatcaggcattgccctccacatgcaggactgccaagacacacttgatatctgcagaaggagggcacgggtgatagagctgaggaccagcaggatgggcttcatgggagaagtgagctcctcatgactgggaaaagctgagaccagagaggtaggctgggtgttcctttgagtcctcacatttgttacaaaacaaggctttgctctatggattttgtgaccagggtctcagagccccatccctctttgccctcccactcccccattgagttcctccctacctcctggatgtgcccgaagagccagtgggagggagggcacgggaactgctggagggctttgagcagccactgcctgtgcaggtagagctgaactgccttgatcagcagcagaagcagaatgagcagggaggccgcttggaggattccagagacatcacccaggagtctgctggggctcagcacagagacactcatggtgcagcacctgctggatctctgagtgcccctacctctctctgaccacccccgtccccctgtgctcaaatccagggaggattgtcccgcccacttgtggggagagtgaaggaggagggcagaacttggacctcagagttcagaatcaattgactatggatgatccacctagggcaacagtgggagaaaagcttcatcagctgtctaccacattcccctgtccatgtacctcacaaatatttaatgagcatttactgtgtgccaggcagtatgctaggtgtgtgggcaccgctgcgaggaaaacagacttgaatgctgacctcaaggaatttgcattctgctttactacattgcaataatgttcattcagtagcactttttttttgttatgtgttcaaagaaaattctcaacatgatatgtacatttaaacttaacattaaccaagccctgaatcattacttttgtcttattgcaaatctaattttatttaccataaaaaccacttccatctatatattgagtgaagagtgggaattatgtctttctagtaactggatgatgatatggacaaacagatgctaatatagcagctgttcaagtactttattttattccattggggaaactggtctcataatatgcatagcatgattttttttctcaattcatatacatgacaatttaaaaaaattctacatcatgttaggtatgactttttcccctattgataggtctaccttttctaccagagtaagtcctagagcaattttagtcctacttcagtctagtactatagtcacagcaggagcctgtttaccaattctctttcaccctacaatagtatgtaattacacaatcagaactttgcactctgtttaggagtcctgaccaaggacaatctgtactaaacagaaattaatatttaaaaaatgattgctttgccaacctcaagtaaagtaggttaaatagcaactgttgctatgaattaaccctccctggcatttttacatgcatatctgtgcatgagcattctttttttcctctttttataatttcaacttttattttagattcaggtacgtatgcaggttttttacactggtgtattgtgtgatgctgagggtttggatacaaatgattctgccactcaggtagtgagtatggtatatattagtcaaatttccaatgcttactcatatctgtacctacccctttagtagtccccagtgtctattgttcccatatttatgtccataagtatccaaaatgtagttcccacttataagtgagaacatgcggtatttggttttctgttgctgtgttaatttgcttaggattattgcctcccaattcatccatgttgctgcaaagaacatgatttctttatttttttatagctgtctagtattccactgtgtatatgtatcacattttctttatccagtccaccattgatgggcaccaaggttgatgccatgtctttgctattgcgaatagtgctgtgatgaatgtatgagtagaggtgtctttttggtagagcaacttattttctttttgatatatagctaatattgggattgctgggtcaaatagtagttctattttaagttctttgagaaatctccaaactgctttccacagtggcggaactaatttacatttccacaaacaatgtatacacattatgttttttttctgcagcttagccagcatatgttgctttgaaactttttaataatagccattctgacttgtgtgagatgtggttttgattcacatttctcattagtgatgttgagcatttttaaaaatattttttggctgctcatatgtcttctttagagaagtgtctgtgtctttaatggggttgtttgtttttcgcttgtattggaagttctggccaggtaagagaaagaagtaaagggtattcaaataggaagagaggaagtcaaattgtctctgtttgcagatgacatgactgtatatttagaaaaccccatcatctcagtccaaaatctccctaagctgataagcaacttcagcaaagtctc

SEQ ID NO: 511 - DNA, 4001 bp, Homo sapiens
tgaacattagaaagctcttcctcactcactgagtcatcatttactgagggactattaggttacaaacataaatcagagatggtctctcccagaagaatcccacacttatgacactgcagaacagtaactaagtcaagttaacactgctctggcctcttgaggatagcccatagaaaaaagagtcggcccttcacttctgggagacccaggaggccttcttgaagaaggtagcttggtgctgggccttgaccgatagatatgagtgagaaaataattccaggtagcaagcacattgtgatcagaggcctagaggttgaaatgcagaggcaggtagtgaggtagtgagtaacatatggtaaaagaggagaatgggaaagaaggtggagtggtattgggaccagtccatatagggctagaactttgtcaggtccccacattggttctgctctgctgagaactatgttgcctcctttgctgagaaacaataggcctcagctccctgcaacccctatctctacttaagtgtgttcaattcatagcaccttggtgagtccctctccatgcagccgtttaccttgctctgttcctacccgcccctctccccatgcagggatagcagtgcacaggggatgggctgtgtccctcctcagccctcttgctgctcctttctcttcttcctctgttcctctacacctggtgtgtccaatcttttggctttcctaggccacattggaagaaaaataattatcttgggccgtgcataaaatacacgaacactaatgatagctgatgagctcaaaaaaattgcaaaataatctcataatgttttaagaaagtttacgaatttgtgtcgggccacattcaaagccatcctgagctacatgcagccccatggggcatgggttggacaagcttgctctattcacctgagctgaccatcaagctgtgccaggattttgctgattgccggggcacaggaaggggatgacatgctcacctccagggagctcacagtctgggtgcgtgggaggagagccaggaggtcaatacaccctgttcaatgtgcaactcaaacaccagtctcctcacttggaggacattgtgcaggctgcccccttcatgtgtacccacaattgtcaggttttcaggtcctaaatcacctgttgtggaaattccgtgagccttggggaaacttacttagccagttggtcccctacaccagcagatctctgcctcagatatccaccccagcagagtgagctcttttcctgcagtctgacaccttctcaaattcctgcctgtattcttcacagaccatgaactcctcatggcacagagtcctcagatgggtgtctgtgctcccaggcaaatgcagggccaggcagagacaatggcattgagtgactggacagggagcatctagaagccttgttctttgagaaaagccaaggcttatggggtaatcagtctggagacaatcaggcattgccctccatgtgcaggactgccaagacacacttgatatctgcagaaggagggcatgtgtgatagagctgaggaccagcaggatgggcttcatgggaggagtgagctcctcatgactgggacaagctgaaaccagagaggtaggctgggtgttcctatgaggcctcacgtttgttacaaaacaaggctttgctctatggattttgtgaccagggtctcagagccgcatccctccttgccctcccactcccccactgagttcctccctacctcctggatgtgcccgaagagccagtgggagggagggcacgggaactgctggagggctttgagcagccactgcctatgcaggtagagctgagctgccttgatcagcagcagaagcagaatgagcagggaggtcacttggaggatcccggagacaccacccaggcgtctgctggggctcaggacagagacactcatggtgcagcacctgctggatctctgagtgccccttcctctctctgaccacccctgtccacctgtgcttaagtcatgggaggattgtcccgcccacttgtggggagagtgaagggggagggcagaacttggacctcagagttcagaatcgattgactttggatgatccacctaggggaacagtgggagaacagcttcatcagctgtctaccacattcccctgtccatgtacctcacaaatatttaatgagcatttactgtgtgccaggcagtatgctaggggtgtgggcaccgctgcgaggaaaacagacttgaatgctgacctcaaggaatttgcattctgctttactacattgcaataatgttcattcagtagcactttttttttgttatgtgttcaaagaaaattctcaacatgatatgtatatttaaacttaacattaaccaagccctgaatcattacttttgtcttattgcaatctaattttatttaccataaaaaccacttccatctatatattgagtgaggagtgggaattatgtctttctattaactggatgatgatatggacaaacagatgctaacatggcagctgttcaagtactttattttattccattggggagactggtctcataatatccatagcatgatttttttctcaattcatatacatgacaatttaaaaaaattctacatcatgttagttatgactttttcccccattgataggtctaccttctctaccagagaaagtcctagagcaattttagtcctacttcagtctagtactatagccacagcaggagcctgtttaccaattctctttcatcctacaatagtatgtaattatacaatcagaactttgcagtctgtttaggagccctgactaaggacaatctgtactaaacagaaattaatatttaaaaaatgatttctttgtcaacctcaagtaaagtaggttaaatagtaactattgctatgaattaaccctccctggcatttttacatgcatatctgtgcatgagcattgtttttgttcctctttttataatttcaacttttattttagattcaggtacgtatgcaggttttttacactggtatattgtgtgatgctgaaggtttggatacaaatgattctgccactcaggtagtgagtatggtatatattagtcaaatttccaatggttactcatatctgtacctacccctctagtagtccccagtgtctatcattcccatatttatgtccataagtatccaacatgtagttcccacttataagtgagaacatgtggtatttggttttctgttgctgtgttaatttgcttaggattattgcctcccaattcatccatttgctgcaaagaacatgatttcattattttttttttacagctgcctagtattccactgtgtatatgtatcacattttctttatccagtccaccattgatgggcaccaaggttgatgccatgtctttgctattgcgaatagtgctgtgatgaatgtatgagtagaggtgtctttttggtagagcaacttattttcttttggatagatagctaacattgggattgctgggtcaaatagtacttctattttaagttctttgagaaatctccaaactgctttccacagtggcggaactaatttacatttccacaaacaatgtatacacatgatttttttttttctgcagcttagccagcatacgttgctttgaaactttttaataatagccattctgacttgtgtgagatgtggttttcattcacatttctgttgattagtgatgtcgagcatttttttcaatatttgttggctgctcatatgtcttctttagagaagtgtctgtgtctttaatggggttgtttgttttttgcttgtattggaagttctggacaggtaagagaaagaaataaagggtattcaaataggaaaacagaagtcaaattgtccctgtttgcagatgacatgattgtatatttagaaaaccccatcgtctcagtccaaaatctccttaagctgataagcaacttcagcaaa

SEQ ID NO: 512 - DNA, 4001 bp, Homo sapiens
gacttcaatccaacaggacaggtgctgagatcaaaataatgcggctaaggcagaatcctggggaggaacctcgcccagctcgggagcaaggctctggtgtctgttttcccttcagaccgtaagctctttgaaccccaggcctgggtctgattcatctctctgacccacactttcctttcctggatgtcttcaggatgcatgttacagggttatctgtcagggcaagaataagcctagaggtcaagctcatttctagtgtcaatcaaggaagagaagcagtgcccccatccagactgagaatgaggaaagtgagttcagaaggtaggagaaggaacttgcctcactctgagcctcaatctctggcatgtcagccaggcgcggtggctcacacctataatcccagcactttgggaggccgaggcaggtggatcacttgaggtcaggagtttgagaccagcctgcccaacatagtgaaaccccatctctacaaaaatgcaaaaattagctaggcatggtggcgcgtgcctgtggtcccagctacttgggaggctgaggcacgagaattgcttgaatctgggaggcagaggttgcagtgagccaaaattgcgccactgcaccccagcctgggagagagagcaaaactccccatcaaaaaaagaaagaaagaaagagagagagagaaagagaaggaaggaaagaaggaaggaaggaaggaaggaaggaaggaaggaaggaaggaaggaaggaaggaaggaaggaaagaaagaaagaaagagagaaagagaaagaaagaaagaaagagaaagaaagaaagagaaagaaagaagaaaaaaagaaagaaagaaagggaaagggaaaggaaaggaaaaagagagggaaagaaagaaaagtctctggcatctctacctggattccccaagctggctgcagatcaaaacactaacacttggacaggtttataaatgtaaactcctagttccaatctgacaaattggaatctccaggaactggaggtccaggaatttgctcctcccagttgattccaattccctgccctgtgtctaattagaaacctctggtctagatccccaatacagtaggaaactaagagatcttcctgagagcaggggctaaggtggttcccaccctggagtaacaggaagacgaaccatgatctgaacctgggaaggtgtcacggctcctgagccacccataggcatggccgggagagccctgcctttggggacaccaaccgcttagacactcggtgaggtctgtcatgtggcggtactcatcttcatgctcactctcatttcctgccttacaaatggaaatctttacactacacacaacaacacggacgctgattgagctttcaatggattgcctacttctatgtactatccagaggttttggatttctgccattgcctttctgtcattgctgagcttttagcagaacctggtccaaactttgggcctcagaatgaggagaaggtgtctgtgccatgcttgagccctgacttggaagttgcccccacttctgaagtcagcttgaaaggctggagtgaaggagaaattccggtgggaaagctgaatggaagccatggatcccaggacatcatccccctgcccaagtttgaagtctccctccacagccccctgggaattaggcctgattctctgaaaggagggaggatgttttctttctcccccaccctcccgacctccacatacctcgagggcatgtccaaaaagccagtgggtgggaggccctgggaatttgtccatagccttagccaacgtctgcctccgcagcagcaggtggatgagcttgagaaagcctaagaccaagatcagcccagaagcccacaggcccaaggaggagaagctcagggagaggaagctgggcaccatggttgcagttccagccacctagccttcatctgacctgccttcagctgctcctgggttcctttatactctggacccatgcatcttgtcagcgtccagccctagccactccctgcagccagcagcagccaaggctgggctgagtgccataaggcggagacagcaacctccaaaactgcaaacaacagaggagagagcctagtggccttctcccaaaattcagctaaagagaaacctaatagtggactccaaaaaaaacaggcaatgggtatcccaccttgattccttagaacaaacagatggcaattcttggtgtaatcatcagcataataaccactgtcttctcatacaagcactgtgaatgtttcaggcactttttacatactatctcatttaacccaaacagcaaggaggtcagaggcactcacattttatacccatttcccagataatgaagctgaggctcagcttgcctatgctttctctcaagaaagcttccagtgtccccttcaatgtgaacccttaagagagctggcatttatgctaggctcgcaatgctttgagttcttttttgtgaggcaccttcagagacaaggttctagccccaaaagggaaataccaggtcagaaaggggccaactccacccctaaaacaatagtgccattttgacacttaggaacatagaactttcagggtgatgagaggtcatcaaattcaatccctcctggctggatggagccacttaagctcaagagaggtagggaaatatccaaagttgcacagcaagaaattggcagctcccagtgccacagcccaggcttctgtggaagaacaagtttggctcagaccactgccttgcctggggagggtatgttatttgcagaggcaggcagattaaagaaatcaaacaagatatgatgtggcatgcagagacttgaaacaacaagaaatgcatcaataccccaggactaaaggaagaagggaagaaaatcatgatcctgtagcttggtgggggttgtatttatggggaacacagctagtgcgagagaagtgatgctggaacagtggaagaacagagcaaaaatgtcctaaactctttcatctgccatctcccatctcctactagtgtctccaatcagccaagccaatcagaagtgaaatggcaaggagcctggggagtcagtctgcagaagtcagcctcccagcaagataagagcaaggacagtctggcagggaggtggcaggaaaaaaaccagcaatcaggtggacttggatctcaaatctcagaactcagatcacaggttctaattcagagaatgataagccatcaacatggctgccttatcccctctggcacaagagaccaagcctcctcctctgctggggagacataatgtccaatcttacccataggcagagaaagcaagaagagagtacaatgaaagaactccaaaagtgtcttctccattggtctgtcacacttcctgaaatttcacatttgtgcttcattttataggatcgagacattgagtgcaccatttaaaaagcaagtcatgttgtatctttgttcttattggtttcaaacaacatctttatttctgccttcatttcattatgtacccagtagtcattcaggagcaggttgttcagtttccatgtagttgagcggttttgagtgagttcattaatcctgagttctagtttgattgcactgtggtctgagagacagtttgttataatttctgttcttttacatttgctgaggagtgctttacttccaactatgtggtcaattttggcataagtgcgatgtggtgctgagaagaatgtatattctgttgatttggggtgaagagttctgtagatgtctattaggtccgcttggtgcagagctgagttcaattcctggatatccttgtttaactttctgtcttgttgatctgtctaatgttgacagtggggtgttaaagtctcccattattattgtgtggaagtctaagtctctttgtaggtctctaaggacttgttttatgaatgtgggtgctcctgtattgggtgcatatatatttaggatacttagctcttct

SEQ ID NO: 513 - DNA, 4001 bp, Homo sapiens
catttgcataataaaaataatacaaatagaagtttttctatttaaaaaatacaatactatatagttactgggacagtggaatatgaagtgtaagtgattgcctgtcataaagaagttcataggtggatgttgtcttagtacatttgtgttgctgtaaaggaatacctgaggctgggtcattcacaaagaggattatttgggttacaattctgcaggctgtacaagaagcatggcattggcatctgcatctgcggaggatctcagacggcttccactcatagtggaagtgaacaggagcagttgtgtgcagagaccacatggtgagagacaggaagagagaggggaggaggtggcaggctcttttcaacaatcagttctgggggttgaagagggactaagagagtgagaacttatgaaggagacagctgcaccaagacattcatgagggatccatcccaatgacccaaagatctcccatcagatcccacctccaacattgggaatcaaatttcaacatgaggcttggtggggacgaacaaaccatatctaaaccacagcagatgtctaaacttattaaattaatagatgcaatatggtaatactattttacaaataagtatttaaataccagaagaaaccgataaaagagttgaaagtggttgctttatataagaaagactagaaagtggggaaaccaaaggatcgtgtagtagctctgctggaatgccttccccacaccacccaaccatcctttaagactctgctcagcccttcacagactttccttccttctctaggcggagatgtatactttcctccgacagatattcccttgtctctaggcctctagtaaagcacccattgccttaaattttcattttctctctgtggcctaagtctgcacctgacttgggtggtgcaggggagggacttagcttctctttgtaatcttagtacctatcacacaattgccactcagagtcggttgaatgaataaaaaccttaattaggggtgggagtggatttaaaaaacgggagagaccaaaagctaacagtctccctttacaaatttccatcaatcagtatttctcgagtggctggctggggctgctccttacttcacaagaatcttaggaaaagaaaattttctcttgttaaaatggactaagggtgccaacgattgggatagattttgcatattttctgcaactaataagttatttagaataacatgctatttttaaagcaacacatgtggaaggcttggtgaagcaatgagagacagacttgagttacagctcgctttctttttccatattcaggttctttaaatagctctctcccagcccccaaagcttcctcttttgtgacctttccctgtggggctgcgggaaagcaattctccagagcaaggaaaaatgatgctaagagccacaggccgggctggaaaggccagtgcaagccggagggtccccagggatggaagaaagctgcgtctctctgccggctgggctcctctgccgcatcctcctccgcccctccctcctccttcctccctcctccctcccatctaccttctggtgcccaaggaaccagtgggtggggggcgctgggaaggggcgcaggtcccgcagcagccgctgcctccgcaggtacagcttaatggcctgcagcagccccagggccaggcagaacacgaacgccaggtaaaagggccgcgcccagcgcgtctccagccaggagaattccatggctctgcgcagcgccgaacgccggcggtttcctggggcgcgggagagggtgggctttctcccgcccggagctggcgtagggtcgcccaccccaccgcctctctgggccctcgcgaagcttctgactcgcgggaagaaggaaaggcagtgggaggggcagctcaggcctggggagaggaggcaggcgcgcgtgcgggatttctagccggttaccaaagcgcgcacgcttcgttcggcccaactgcttttgcgctcctggagcgtcctcttttaagtccaacagttttcagtcacgggatctgaatttatattgtaaaataatgctaaagctgaggtcattgtttttcttccttatcacaaattataaatggctatgcaagagattttcttttccattctggcattctaccaaaattcccaggtggtagaggtagggggaggtgtaccatcattattcctttatcctgtggcctgcctagtggtgttccggtaaatggtttacaactgattcccaccctgattcccagcgtgtaccatgagctagttcaagctgccgatacgagggcactgaacactgaacggggaagatatgcacagtagcgtaccatcatatagtaattccactatacaggtacagtcagggcctgctatataatttatgaatctcagtgcaaaatgaaaatgcgggataaaaactttattaacaattctaagatgacagaccattaaaccgagcatatgctcttctgggttcagagcctcgtgtggctgcttgggtctcatgcccatgaagggctgactctagatgccagaaacataaataaactcgagtacagataacaggaaaatgtagtaaaaataatttgaaagtgatggttttagtatttgtaacgtatcaggtggtgaactaggatctaacaagcctgacttcccaagctggtgtctccccccacctccctgtcccagcaatctttataggcattgcccacatttcattcatttatttattcattcatttattcattgatttaggctaagacaggcatatgttaagtgttcattgacagctctgaacaataaacccaatttctgctacaattccctgttctccctatcactgtccctcccccaccttccccgcccttccgcccccaattccttaagcctacgctccactctctggagccagattttatttggcgggtaagtgattaagacaggctccagggggccgggcgcggtggctcacgcctgtaatcccagcaatttgggaggccgaggcgggcggatcacgaggtcaagggatcaagaccatcctggccaagatggtgaaaccccatctctactaacagtactaaaattagctgggcgtggtggcgcgcgcctgtaatcccagctactcaggaggctgaggcaggagaatcgcttgaacccgagaggcaaagattgcagtgagccgagatcgcgccactgcactccagcctggtgacagagtgagactccgtctcaaaaaaaaaaaaaaaaaaaaaaaaaagacaggccccaggggtggtgacttcatctggaccaagttcgtcctggccccttgcatgttccattaagccacacacagcaagtgtttcagctccttctttcccagacttccctacctcctacctaactccaaccttcaactagatgttgttatttgacagggtctcagaatcctctggcttacacagcttcttctgggtaactcatggcatttcagcttttcatatgattcctctatgccctattcctcccccaaatcatgatggttgtatgatggccctcatatgatcgcatggtggtagggccaaagacctcagatccatgctctgccccagagctgaaacttcagctttgtgatatcttgcctggtccggtccctgggttcttcatgagaccgaggaatagtatgtgtggttggtgaccttctaatgagttctcttggcagggtcagagcctgggaaccccttggctcacctactcccacccaggttcttgctggtggtgtgactccctctgaggcttggacagttctatgcagttactcctctgctccagggccagttgcccctgtccagcaccgttccatgtgctttcatgggtaacaaaggaactctggaactttttgcactatatttaggagcctaagagaggctggaaggtgttgaagaggcttgaagttcaggccttctctgcttcactgccattttcactctggtt

SEQ ID NO: 514 - DNA, 4001 bp, Homo sapiens
agatggtgattctggcagagtgccctgtgaaatgagagagccacaggctgcttgaaattttgcagaagcaccaagagtggtatggaggcattttataactgaatgactcatgtaggtagctgggagagtgaggcgaaggccagccttatatgccaacaggcagttgaggaaagcccagtgggggaatcctacacacatcttgccacggccaagaagcagctctgcaattccacggaattcccacactagggaccagatggagaactggtgtccacttgccagagcctccaacctggcactggccattcccagaggacaggcaacattagtgggcaaagcatctatggggaacactcatctctgtgcagcactggcgttaagccaattgtaagcaaaccaccactgcatgcccaacccactgtatgttcacagtgatggtaagtggtagtcctgggggtctgaggtaagtaaatgtgatggaagcatcagaaaaaatttgccatgtagggagagaagattgcttgaaaatggatcagagaatcctctacaacagccctcaatagagtcctgactatgatgttgaggaggacatggaatcttcccttcaacatatcaaatgatggatttcccttaaaaatgcttcaacctgtccttccctagtgccacagacaccctgagaccctctttgttgctgctctgtactgtgagcccctcttggtttttaccttgtcttttcaggagaatcttggcatagtctgggtcatggacactgaagaacatcgtaaagggtccaacccacaagggaacagcacatgggtatttttccatcagcttatgatacacctcaaactcctttactgggtaaaactgtcataagataagtcatgactggttagtaaaggttgtcaccccaggaggacccctttccctcggatggaccatgtgctaagttgaggatctgtggacaccaccccatcagacaggttcacatctgttgaaggcaagttttcttctccatgtgtctccagcacctccacagaatcttcgtggccctgggcaagtgctcaggacctgttgctgagcgattggtcttctcactccagcgtcaactttggagatttaagttcaaatcccaatctgacacttattcattatctaggtcatcagggccatgatttcctcacgtgtataataggaagaccaaatatattttacaaagctgccatgaaaattaagtgaaattataaacataaaattcctggcacaaggtaaaccgttagtaaccactgatgccctacctcatctttgctctggatatacccactcatgctttatctgcctccaaagcagcgaagtctcacatgccttttactccttttggttgctgctcatctttcaactttcctttctaatttgctaaatgttttcctatttccagcttcattagaagctgtagcatcttggtatagttcctgttaacaattggcttggtctatttctctctagaacacccagagtcctgagaatagtaaagaccttggccttgaatcagaagaccagggttcaagtttcatttctgtcatttatgaggtgggtagcacaggaaagttgcatttctattttaggcttcagttttcttatctgtaaaacaggaataacaatatctttcctccccatatcatagaatttttgtaaaaatcacaatgagattggtgtgaaagcattttgcatattacataatgccccaccagtctgtgctgtttttttttaatacctcatctttctgtcccttaacctccccaactaattttctcctcttacctccttgtggccatagaaccagtgggcagggggtgcaggaaacaggtgcagggctctgatcatccatctcctcctctggtacaacctgattacctgaaacagcagcagagacatgcagaggaggatcagcagcaagaaggggtgagccatgagttcctgaagccaggagggctccattcttctcagaggtcctgagctctggagagcctgagagaactgagccagggagaatgcaggtctctcataaacacaaaggagatgccccctgggcaacactgggctttcaaaatgccatattcagggaggggacataaggaagaggaagcctaattaagtctgcagggtgaaaactgctgagatgttggccagcagacctggattctagaagaacaagattttcagataggagccatgtgcatgacagctcacacccatatgaaagctttgctgcactgctgtccccttccagaatctaaaagttcccatctagtcatcctttgtcacacctctatacattcttgtaaaaaatctcccccactctcattctctgttcttttttgtttatgtttctgatagaatttatctttctagagaagtttcaagttcacagaaaaattaagcagaaagttcagggagttcccatatatcacccctcccttccagcttccctgattatcaaaatcctccaccagagtataacacttgttacatttaatgaacctacaatgacacattatcgtcacccaaaatcttaggtatatacctaagttttttttttttctattttgaaaggggttgagttcttgatttgattctcagcttggttgctgctggtgtacagcagagctacttatttgtgtatattaattttgcatcctgtaggagctttttggatgagtctttaggcttttctaggtatacgatcatatcatcagcaaacagtgacagtttgacctcctttttaccaatttgaatgccctttatttcttccttttgtctgattgctctggctaggacttccagtactatgttgaatagaagtggtgaaagtgggcatccttctcttgttccagttctcaaggagaatgctttctacttttcccctttcagtataatgttggctgtgggtttattgttatgtggcttttattaccttaaggtgtgccagttttgttgatgagagttttaatcataaagggatgctggattttgttaaatgctttttctgcagctattgagatgatcatgtggttttgtttttaattctgtttatgtggtgtatcacatttattgacttgggtatgttaaatcatccctgcatcccacttgattatggtggattatctttttgatatgctgttggattcagttcactagtatttgattgaggatttttgcatctatgttcatcaaagatgttggtctgtagttttctttttttgttatgtcattccctggtttcggtattaggatgatactggcttcacagagtgatttagggaggatgctctctttctctatcttgtggaatagtgtctatagaattggtaccacttcttctttgaatgtgtgatagaattcaactgtaaatccatctggtcctggactttttttttgttggtattaaaaaaaattacaatttcaatctcactgcttgttattggtctgttcggcgattctatatcttcctggtttaacctaggagggtggtatattttcaggaatttatccatctcctctaggttttctagtttatgcatataaaggcattcatggaagtcttgaataatcttttgtatttctctggtatcagtttgtaatagctcctgtttcatttctaattgagtttatttggatcttctctcttgtttacttcgttaatctcactaatggttcatcaattttatttatctcttcaaagaaccaggtttttcatttcatttattttttgtattttttttgtttcaatttcatttagttctgccctgatctttgttatttcttttcttctgctgggtttgagttttgattgttctttctccagttctgtgaggtgtgaccttagattgtctatttttgctctttcagactttttgatataggcatttgatgctataaactttcctcctagcactgcttttgctgtatcttagggtttttgataggttgtgtcactatta

SEQ ID NO: 515 - DNA, 4001 bp, Homo sapiens
tcttgctgcatttcttgcccttctgtaagagaaaggagagaaggaaagttaggggtgatatttctctttcttcaaaaagatgttcacatcccacccacctgccaggcaacagtctacacgtccctgaaggaacttactttcaggctgctgtacactggctgtccacaaggccgcacctcacaaatccgggtttctttcacaaggcggcactcagggttgtcattggtaactcgtgtggagataccagttccacaggtctttgagcactgggaccatgaagttgtttgaacaatacatttctggccttgtaaagggttgtataggatgcgaggctccattccaaaaactagagacatataagagggaagacttctcagaggcataccgacacaaacaggctcaagcactcatttctacaaagatttagaccagaaatgcatctcagtacagtgtctgaagtgctcagtctccacttaccagggagccgcttcagtgagctgccttttccaactgcaatcaattcattgtttctcgtcaactccacctcggaggcatcgaatcccagctccttgccaaggaggccgtcctggtcctccatggggtccttgatactatcctcgtcacagacccactcctcgcagcactgcccggtaactttgaccagccgagggttgggacagcccaagttggggagagatagttcttggggacacagaggaatgcagcccacggcgccatcaatacatgtgcactgatgtttacagttgggctggaaactttccccgttttggtagattctggagttatattcacagggtctgccctctgactgagctgcaaagatcaccaaaagagaaaggtagaaggggataaagttaagattccaaaccaccgcctgaaactcatacatattttctgctgttaaattcaatttatggtaaagttccctacaattccccggagactccagaccagaacaataagttagtcaggaatcacttttccgtatgcgctttcgttgggcccagacacactgaattgcattccagactgctgaaatcatgtgcctttctgccaagctaccaacaacaaagcatcaccatacatggtctcagaattactaaacttctggactatggggactagtattttttttaaaggggccaaaccacaagcatcttacctctgcagatccccttcagagcggtggagctggcgccgaagttgcattccagccccttggtgtggtcgcagggctgcgttttgctgcagtcctcgttgagctgcttggcgcagaccttacagcagccgcagccgtcccggaccagcccgactcccggcgcgcacttgggcgcctccagggggcagtggcaggcagcggggcaggtggagagcgcctggaagggggagaagatacgcgtgagactcggcgcggtgcgcaggaggggcgccgcggctgccgcagtgagggacgggggtctccgaccctatcgacggggagcctctgatctcgtccagcccggccacctcggaaggctgctcccaccaagaggtcccgacacgtcttcggggggagggggagagtgcttaaagaaacggctacccgcaaacgatcgcgaactttttaacttttcctgccgtgggcaatctgggaccaggggaaggggctggagagcggacggggaataggtggcaaaaggagagtccaactcaccagcctggtcaagtggagaagggtgacgactaaggcgagcgccctggcgatgcgggagctcattgtggcgcgcaggagtagcccggggcgagcgcggcgacgaagacgccaacaagctggtgtgcagcggacaggccgtgcgcagcggggtcggggtggcggcgcggtgggcccggtgggcagggaggcgagggctgggcggcgggcgggcgtctttcgctcgaggtcccggcggagaaggcgcggagggcgcgggcgctgctcgggggcgctctcgctcgcggtctgcccaggcgccccggagcccgccttttatacgggccggcggaggcgccgcgtgttgcagtgacgtcggctctgtctgcgcgttccagaattctcaaacatctcaggaatgctggttggcgcgggctgctgccaagcgcctcccctggctccattgcacctttgtgtgtgtgtgtgtgtgtgtgtgtgtgtgtgtgtgtgtgtgtgtgtgtgtgtgtctgtgtgtgtgtctgtctcccagacccgtcaagaaaacagttcggggggtgtgtgtgtgtgtgtgtgtgtgtgtgtgtgtgtcccagacccgtcaagaaaacagttcgttttttccaccttaaattacgacttatgttgggaagggttctttggggcgtgatggtggtgatggtagttggagggtcgtgaggggcgaggggggccagttcagaactttgcctggactgggtgggtgggaggacctgagagggaggaacaaaagtcgttttgtttggtgatgcgagttgaccgggcagccactgaagccctcacccgggaaggcagtgagctgtttgcttttttacagcgaaggtgagaggcaagttatctgttgaaagagtagaacggggaagaggagtgtgtctctgagtcaggaatatttgtggacttcaaagaggcgtgttcggaacaagtcccaaagctttggcatgatgtttattagcaaagttcagtgaattgcaaattaatacccacagtggcatttatgaatgaaaaggcggggggggggtggggcggggggaaacttgcccatcgtctggcaaattcccaggcagaggtctcccccactcctccagcccttccctcttttgggtatgttgtacttgtttgtttttggaggttcccactttagttccagcccactgcctgggttggaagtccgagaggaaacgaacgcggggagttctccgggaggctgacttatacttcctcacggatgcaggagacggggtaagcccttcccgcctccctccgcgggcaggaggctatgctaaccaagcagccagccagaagtgcaggagaccaccgtggagtggcctgaaatcatcacctgcaaagaccgcaaggccaaaccagattccaggaccattgtgccctatgaatctctgggaaaagcagactccttcaagctggacattttgtggggtttttaactcctttcctagggaccactggaagcctcccattttaaatgaattgcaatgcccttctctccaagtacagaaaagagatttaggatgtaatattttgcagtaaaaatgtcagcagattttaagatcccgttctacttgcaacacactcagtagaagaccccaccacaagacaatttacttgaacatcaccaataccattagtgtgattgataaactttccctgcaagtttcaaaaactttttgcataattttaataaaaattatcatgtaagactcatatgctctaggataactacttatcctttttaatgtttaaggctattcagacttcataatttagcagtcttgcttgaaaaggcccttagtgctaatgctgactttcctgataagcacaatgagaatctgtcaggatgaaaacacactccagtgaagagaattcttgcaggaaggagttcagtttcattcattccaaagtgccctttcataaatggaagcagcatttgctagagggagtgggatctctaaagctctgttagagggttaggggtgggagacttttcaagacaatggattgtcaggtgttatgcaaatacagtgaggaaagtgtgggcccaacacgtacacaggttaatacatcaattattatttacaaaacactgtttttcctgccttatcatttcattattgtttccttcttaatgaagtgacggggggcgggaggggggaggaggggtgcagggacagtactggttgaactagagagagaatggagaggagggttcctggcttctgttgtggcgtcttttctattt

SEQ ID NO: 516 - DNA, 4001 bp, Homo sapiens
cagaatctgaacagaaatctactatctagcatcaaacgtacaagcagatagaagaagcttaaaatagagacagaaagcggttcaaatgcacatcgtgcaggtatgaaatccactacatgtcccctgcaagaaggatttgggcagggaagtgtgtggaagatggggctgcagtggtggagggctctaagctctgaagacctttttaatatggctgtgttgtaatactgcagtgacaaaccccgccagtcattccaaaagcaaaaggaaaccccactctgcagcagaacttcccagccctggaaacagattgtcttccttttgcacccatttaataaccactgtatttaacacgatcaggggaattgtgcattctcggaaggcacagtaaggaacctcggtctgcaacgacgcgattcctcagacaccaaactaaaatgcattcattggaactcagcctcccaaagcggaagcaaagccactgcaaggcgatttacaggcaagagcccctctgaaagagaggaaaggagggggcttggaaagcaaggggacacaccttttctgagctgttcgaaacaggctgcctgcaaagtccacccatactgcgctgccaagggttaattttctcagcaaaaattggtacacgcacacacacacacattctctctctcctactgcacccccacaacctctgccaccaccacatatttgaatctttttaatcttaaattcccagaaattccctgatcagccctatcttttcggaacagctccccccgccccgccccacaccccacctgggctggattcccacctcatcatcagtgaaagctcagagagccgggcataattattttcctacaaggttatgcctaattggtcactaatctaattgatcaatcatctcatttttcaaagcagcatcaaagagccaagctgagagggcagaaagaaagcatgcgtccggatggcgggagggttaaaattacagtctttgggtaagacccctggccagcttgcctggtttctagatacataagtggacagaaaagaaatgaagagaacgcggactgagcgaggaaatgctcaagaccacaggactgaaccccccggaagtctcgacgctgcccagccagccagagtccagtcgtcgacgcggatgaagttgtttccccgggacaggaagggttaaatggctgcgcgtcaactcggcctcgactggggtgtcagggagcaagagccgcttgtctcgggggattccgcttggggggttcccaggggtcgccctggcgctccggccacaacttgggcggctctgtgcggcggccctcgcctgcgcctttgcgcgccacccaaaactttgcgcacactgcagccgccgccttcccgctcttcgcggtgagacgcgcgccgccaagtgccgcaggcagccctccacagccgccgcggcagccgctgcctggcttctggctccagacttttcccccactgcctccagttcccacccaggaggctccctcgcggccgcgagagctcggcgcccgacccacagtaggcagtgcgggcacagtgttgcagaccaccacctcgccaggtccgggcagcgcccactagacggacaggcgcccgcggccgcccctaccccggcgcgcccacctcgagcctctcacgccgcggcgggcgggcgcaacatattctcctacctccagccgccgaggaccacactctccgctcagccctctcgactcatcctccggctgcagtagagggcgagcgggctccgcttttgttccctggggctggcaggtccgtgtggggccagggcgcgcgggagacgccgcggagctgggtatcccggagaggggatgctcactcctagcggctccgctggcagcagtagtggcggtggcagcagaggcagcggtagcaacagcagcagtagcagcagcagcagcagtagagatagtgccggctctctgcaggccacatctttcataccttatacatcactaccgcattcccccgaataggggagcccctcagcatttcgccacctagcgcggaatgctgctgcaggaagaggtggcgcggcctgaccgacctggcctgaatgtgagctctgagggggaaggacctcagcacccactcgcagactcccttctccgctacggtcacagtgaggtctacaacttgcagccattctgcagtcttcagtttgcagttctcagtgtctgctcccctgggaagtatggacttcaggttaagcaaaagtgatttactggggagagccctctctgtgctgcctctagggtcttggcctgcacgtgcttttacacagcctcctccttcttggggtgttcacaggtgcaagattttgcagcagcagacacacactcttctgcaggtacataaacccctgagacatgttatgcacaccccacaatcaagtgtgtcggcactgaagcaggcagaccagggtttcagttgtagctgtgtggtcttatcaaacgaccaaatgattgagcttccatttcttcatctacaaaatgggaaccatatgtctcatataattgtgagaatcacatgagacaagcacagagcttgacacatggtaagtgatagcaaaacatgagtttttcttccttcatctgatgcaggtctgcccttcctgaggtaattatatatcagtaacaattcactcatcaataaatatttttgtgtgcttactatgagcctacctctactttatggagaggagcagaacattcaaaagaacacagacaagtaatgtttattctcttgtaacctgctctttagtaagacggaaaataaacaagtaaatcagcaagaaactattggatagtaataatcgctattgaccaaaatttaagtagatggcgacatgtgatagaaaatgactagggtaggacatcaggctgggcatttgggaaagaggcctccaagcacatgaccactaatctgagatctgtatgataaggaaccagtcattagaaatagagggaacaagagccaaggccctgaagaaggaacaggttgaatgtgtttgaatagcagaaggaaggaagtgtggctagaatgtagcaagagtgatgagttggtgacacgagatgaggtggagaggttgaagagggaggctggtcttatgggtaaagatcagtaagggaaattgacttgatgctaagtttggagttttgggggttagagatgtaactgttacaggattggaaagagtgtgatttttatttgtaaaagctcactccagctgctgtgcagagaatgtactgaagggggcgtgggtggaaggagaggatccaatcagagtgtcccacagtgctgaataaaagtccctttcaagttccctgacctccacaaccacagcaacttcccctctgcctgtagttccgctaggaaaaaaaggccactggacagctaccctgggggtctgggtatgagtttctcctaccactctctgagtatccttttccttaactggaaaatataaataataatctatatattctcatacaagtattgtgaggatgaaatgtgacaaggaaggcacctaaggtgctaaatgaccattaatttcatgttcaacatttctctactttcaggtcttcaaggagcctctggagtgctcctataacccttctgtcctgtccaggaccaggcaggggttgcctgtttgttgagtccatgaaaagcttctctcagcatctgggatgcttgcattagtaatgccagcccctgaacccatctgtctttttctcaagcaggaaacatttcgagcaggaaagattttcattttgtttaggtcttttcaattttttcctgtctgccaccttcatctagttagaagcatgcaggacatcatcatataaagcactcaagatataaaaatagaaaggaaaacagagctgtttggggatgtgtagagccagagatggcaagaaagggaaacagacagtcctttctctcttagc

SEQ ID NO: 517 - DNA, 4001 bp, Homo sapiens
actaaaaatacaaaaaattagctggacgtggtggcgggtgcctgtagtcccagctactcaggaggctgaggtaggagaatggcgcgaacccgggaggcggagcttgcagtgagccgagatcgcgccactgcactccagcctgggtgacagagcgagactccgtctcaaaaaaaaaataaaataaattagctggatgtggtggcatgtgcctgtagtcctagttgctcagatggctgaggtgggaggatcccttgagccaaggagcttgaggttgcagtgagccaggactgcactactgccttccagccttggcgacatagatcctatctcaaagcaaacaaacaaaaaaaagtgtaaatttacagaagagttgcaaaggtagtacaaagtgctttcttacaattttcattagagtttccttaatgttacatacatatgaccatggtacaattttcaaaattaagaaattaaagctggtacaatactatttaaaaattgcagactttatttgcatttcctcagcttttctgctaatgtcttctttctttttttgagacagggtctcgctctgtcacctaggctgcagtgtgatggcgtgatctcggctaactttgcaacctcttcctcaatcctcctgcttcagcctcccaagtagctcagactacaagcgtgtgccacacctgtctaatttttgtgtctttttgtagagatggggtttcaccgtgttgcctaagctggtctcgaactcctaggctcaagcaatgcgccctcctccgcctcccaaagtgctgagattacaggtgtgagccactgcgcccagcctaatgtcttctttctgttacaggatccagtagaagattccacatctggagatcttttcctttctttatatctatcaccgacattacctactctttaaaaattttgtaaaaggcataaatttgaaaaatatatcctcattaatctaaatcaagtcattgatacaactatttaacaagacgcccggcctgctttgttttattaacgacttggagggacagaacactacccattacacccacaaacgttatcgacatcaacagaactgtaaatgacaacacggcaatactctgcaccttccctatgcctaggagctaattccactttacatatattattatttcgtgtgtgtgtgtgtgtgtgtgacggagtctcgctttgtcgccaggctggagtgcagtggcgcgatctcggctcactgcaacttccgccgcccgggttcaagcaattctcctgcctcagcctcccgagtagctggggctacaggcgcccgccaccacggccggctaatatttgtatttttagtagagacggggtttcaccatgttggccaggattgtctcgatctcttcaccttgtcatccacctgcctcggcctcccaaagtgctgggattacaggcgtgagccaccgcgcccagccctatcttattatttcacacaccaaccctggaggcatgtttggagttgcctaatttttatgtacactttttgataaggaactaacaaaaataacttgctgaagacaagggaaactgagtccagaactgaatgagaagcacatggtttcttcatcctccatcaccaggctgtctaacgaggctgaagtaccatccatgagtaagtgcgtcaagggcaaacaaacatcatcgcatatggacagtggtgtgaaattcgagaaatccgaggagggttaacaacaacaaaaagcacaccaccacgccgaacttcctcgggtcccaggttggcaactcaacgcccgggaggaatcccccccggaggcgcgccggtctaccggcctcactccctacctcctggaggtccggagtcccgctcctttccctcagcggtacaatacccgtgtcggtccattccctcaccgtgagtcgaggactagttctccagactaggcgaccgacacacgctgcctggggccggctccaaagcgcccgtcctgagactgcaaaaaagggtcgggtcatccggcaggaaacgactcaacgcgcagccgccgcggcctccaaccaccggccggcagaggggcgctaggccgccctcgatcccctcgccgcggtcccatggaggaggaggcgagccgcagcgccgcggcgacgaacccagggaggtaggttgtcatgggactcggccggccaccctggcaattccagtcaaacggcaagccagactcgctttgccggtcccttcctctcctgcccctgcagccgccaggaatggaacagtcccgcggtggggactgtgggaggcgcacgcgcgaggagtgtagggtgggggtgctggcggcggctgctttggcggcggttggtggccgtgcgggcggggagggagggggaggagagaagaggaggtggagaaggcttgggctcgcgccgctgaaggtacgcgtgagggcctgcgctggagccggcttgacagggtctgagggggagtggagaactgggcgaggaggttcccgtgggtgagcgcgtacgggatggctggctcgcaggacggccgaaggtggtggttggtgggagcagccagcgacgagcccgtagacactcgtacgcgtgcgggctgacgtgcgcgctacatggccggagtcgggcgaagcgggggaccgtggggaagaacgcgaggagggaggagtgggaggttgggggtgtcgctaggcgcccttagctccctccctctggaggagctgccgcggccactctgctgccgccgctgccgccgccattttgggttcgctttgcgaggggaaacgatcccagtgtcggttgcgggatccgcctcctctcagtttgcccctttagccctccacctttcccttctcctctctcgcatttccgccagtcggcttacccgctggccgcctcctgacaagcgggagggatccgcggtggacccagggaagcggaggagcctggcggccaccccctcttcctcacttccctgtactctcatcgctctcggcctccgacacggtgagtagaacgatttgggccggcattcgggcctaagcactctctcagcgattgaatcctgggctttctgggagccactgtcatctcccggacctggacctctgggagagcagtggtgaagatgggggaggggagagcagggagggggatcctgagcctaccgggaagtccctccaggcggggtgaaggggtgtccctgacaggcagactcccggagggggctgggaagtaagcgagtggaggcggagtcggctgtgcccctgacaggttagtttgtgtttgtaggcatgatcggagcctcccccatagtccagtttgtgtgtgtttaattaagggataagagtggtcgaggacacgatcttgagaggggattttacctgtgtgacaaggtctgtggtgtccctgccgcgttgaacggtatgtgggaacgacaggatgatctcagtgttgtacgtttaataaatgtcactggttagtttgtacatggaaagagatgtttttggtctagcagacagatggtctgttggtgtgtagcggctgtgttggtgtgtgtatgtgaggatggcaagtgtttccgtaagagtttgcctttatttgtgtaagtgtaatggagttccccttataagttagcttatttcttgaataaatgttgggaggttccttgcaggttgatatgtgtgtgtattttagggattgggagcccctagttacttgttgggaaagagcggcaatggtagtgttctgtacagcatgtgtctgtgaggtcagggaggggagaaacttggcatagccagttgtggtcttaagaatagtttgtgcctttggttagagtgagttgtgtaaatgtgaagggccaaaatatctttaacagaatcattgctacaaagctgtaaagaatgggtggccttatttgttgtcgcgggtttatagtaatagtttacaatacaataagaaagctctttcagtttctttgtgatact

SEQ ID NO: 518 - DNA, 4001 bp, Homo sapiens
tctactaaaaatacaaaaaattagctggacgtggtggcgggtgcctgtagtcccagctactcaggaggctgaggtaggagaatggcgcgaacccgggaggcggagcttgcagtgagccgagatcgcgccactgcactccagcctgggtgacagagcgagactccgtctcaaaaaaaaaataaaataaattagctggatgtggtggcatgtgcctgtagtcctagttgctcagatggctgaggtgggaggatcccttgagccaaggagcttgaggttgcagtgagccaggactgcactactgccttccagccttggcgacatagatcctatctcaaagcaaacaaacaaaaaaaagtgtaaatttacagaagagttgcaaaggtagtacaaagtgctttcttacaattttcattagagtttccttaatgttacatacatatgaccatggtacaattttcaaaattaagaaattaaagctggtacaatactatttaaaaattgcagactttatttgcatttcctcagcttttctgctaatgtcttctttctttttttgagacagggtctcgctctgtcacctaggctgcagtgtgatggcgtgatctcggctaactttgcaacctcttcctcaatcctcctgcttcagcctcccaagtagctcagactacaagcgtgtgccacacctgtctaatttttgtgtctttttgtagagatggggtttcaccgtgttgcctaagctggtctcgaactcctaggctcaagcaatgcgccctcctccgcctcccaaagtgctgagattacaggtgtgagccactgcgcccagcctaatgtcttctttctgttacaggatccagtagaagattccacatctggagatcttttcctttctttatatctatcaccgacattacctactctttaaaaattttgtaaaaggcataaatttgaaaaatatatcctcattaatctaaatcaagtcattgatacaactatttaacaagacgcccggcctgctttgttttattaacgacttggagggacagaacactacccattacacccacaaacgttatcgacatcaacagaactgtaaatgacaacacggcaatactctgcaccttccctatgcctaggagctaattccactttacatatattattatttcgtgtgtgtgtgtgtgtgtgtgacggagtctcgctttgtcgccaggctggagtgcagtggcgcgatctcggctcactgcaacttccgccgcccgggttcaagcaattctcctgcctcagcctcccgagtagctggggctacaggcgcccgccaccacggccggctaatatttgtatttttagtagagacggggtttcaccatgttggccaggattgtctcgatctcttcaccttgtcatccacctgcctcggcctcccaaagtgctgggattacaggcgtgagccaccgcgcccagccctatcttattatttcacacaccaaccctggaggcatgtttggagttgcctaatttttatgtacactttttgataaggaactaacaaaaataacttgctgaagacaagggaaactgagtccagaactgaatgagaagcacatggtttcttcatcctccatcaccaggctgtctaacgaggctgaagtaccatccatgagtaagtgcgtcaagggcaaacaaacatcatcgcatatggacagtggtgtgaaattcgagaaatccgaggagggttaacaacaacaaaaagcacaccaccacgccgaacttcctcgggtcccaggttggcaactcaacgcccgggaggaatcccccccggaggcgcgccggtctaccggcctcactccctacctcctggaggtccggagtcccgctcctttccctcagcggtacaatacccgtgtcggtccattccctcaccgtgagtcgaggactagttctccagactaggcgaccgacacacgctgcctggggccggctccaaagcgcccgtcctgagactgcaaaaaagggtcgggtcatccggcaggaaacgactcaacgcgcagccgccgcggcctccaaccaccggccggcagaggggcgctaggccgccctcgatcccctcgccgcggtcccatggaggaggaggcgagccgcagcgccgcggcgacgaacccagggaggtaggttgtcatgggactcggccggccaccctggcaattccagtcaaacggcaagccagactcgctttgccggtcccttcctctcctgcccctgcagccgccaggaatggaacagtcccgcggtggggactgtgggaggcgcacgcgcgaggagtgtagggtgggggtgctggcggcggctgctttggcggcggttggtggccgtgcgggcggggagggagggggaggagagaagaggaggtggagaaggcttgggctcgcgccgctgaaggtacgcgtgagggcctgcgctggagccggcttgacagggtctgagggggagtggagaactgggcgaggaggttcccgtgggtgagcgcgtacgggatggctggctcgcaggacggccgaaggtggtggttggtgggagcagccagcgacgagcccgtagacactcgtacgcgtgcgggctgacgtgcgcgctacatggccggagtcgggcgaagcgggggaccgtggggaagaacgcgaggagggaggagtgggaggttgggggtgtcgctaggcgcccttagctccctccctctggaggagctgccgcggccactctgctgccgccgctgccgccgccattttgggttcgctttgcgaggggaaacgatcccagtgtcggttgcgggatccgcctcctctcagtttgcccctttagccctccacctttcccttctcctctctcgcatttccgccagtcggcttacccgctggccgcctcctgacaagcgggagggatccgcggtggacccagggaagcggaggagcctggcggccaccccctcttcctcacttccctgtactctcatcgctctcggcctccgacacggtgagtagaacgatttgggccggcattcgggcctaagcactctctcagcgattgaatcctgggctttctgggagccactgtcatctcccggacctggacctctgggagagcagtggtgaagatgggggaggggagagcagggagggggatcctgagcctaccgggaagtccctccaggcggggtgaaggggtgtccctgacaggcagactcccggagggggctgggaagtaagcgagtggaggcggagtcggctgtgcccctgacaggttagtttgtgtttgtaggcatgatcggagcctcccccatagtccagtttgtgtgtgtttaattaagggataagagtggtcgaggacacgatcttgagaggggattttacctgtgtgacaaggtctgtggtgtccctgccgcgttgaacggtatgtgggaacgacaggatgatctcagtgttgtacgtttaataaatgtcactggttagtttgtacatggaaagagatgtttttggtctagcagacagatggtctgttggtgtgtagcggctgtgttggtgtgtgtatgtgaggatggcaagtgtttccgtaagagtttgcctttatttgtgtaagtgtaatggagttccccttataagttagcttatttcttgaataaatgttgggaggttccttgcaggttgatatgtgtgtgtattttagggattgggagcccctagttacttgttgggaaagagcggcaatggtagtgttctgtacagcatgtgtctgtgaggtcagggaggggagaaacttggcatagccagttgtggtcttaagaatagtttgtgcctttggttagagtgagttgtgtaaatgtgaagggccaaaatatctttaacagaatcattgctacaaagctgtaaagaatgggtggccttatttgttgtcgcgggtttatagtaatagtttacaatacaataagaaagctctttcagtttctttgtgat

SEQ ID NO: 519 - DNA, 4001 bp, Homo sapiens
ttaaaaggcaagattaaaaatacatcacttgcaggttgcttaaaaatgaaaattctcaaaatatatcttaggtatgtcagggctacaggggaaatttataaaataaaataagtcagagtatgtaatttaattcattcactattaaatttacctgcaaatgtgtcaaaagccaagtgaataactgaatgtaaatttctgtcttgtgttaggaaatcaaaatttttttgatcttctagcatttgcattgacctaaaatcctaattacccaattcttaatattgcacatttcttcctcaaatgaaataggattttagaaactgcagaaatggacggtgtaggaactatttagctttagtatgaatctagtgtttaacagccacttgtacactagaaaacactattataattctgtgaaaaatgatttttttttttttttgagatggagtctcgctctgtcgcccaggctggagtgcagtggcgcgatctcggctcactgcaagctccgcctccgaggttcacgccattctcctgcctcggcctccccagcagcggggactacaggcgcccgccaccacgcccggctaattttttttttatttttagtagagacggggtttcaccgtgttagccaggatggtctcgatctcctgacctcgtgatccgccctcctcgacctcccaaagtgctgggattaacgacgtgagccaccgcgcccggccgaagaaggatttttttaaggcatcaaccaaaagcagagtattctatatattacgtggttacctttttgtggtctttctaaaaactcagggaaaaaaaactgccgtataatgaatataatgagagtgaatttcgcttctacacataaggctatccagttaagaacaggggaaaagccgggcgcggtggctcacgcctgtaatcccagcactatgggaggcggaggcgggtggatcacgaggtcaggagatcgagaccatcctggctaacacagtgaaaccccggctctaccaaaaatacagaaaaattagccgggcgtggtcgcgggcgcctgtagtcccagctactcgggaggctgaggcaggagaatggcgtgaacccgggaggcggagcttgcagtgagcggagatcgcgccacttcactctagcctgggcagcagagcgagactccgtctcaaataataataataataataataataataataataatgggggaaaaaatgaaaaatggaataaaagctctccggccgtagataacaggctgaagtactgttcataggatagatctcttcgctattttcacctggaattctcctctgtgaactctgcaacagacttctgtagagagaaccccagatcggttgggtggtccttctgatgggtctggataaacccctgtacagctgacttaaccaagaagggaagtacatgttggagccacacgatggcgaaaaacaatcacgaaatcccacgctgccggtagttaaaagtcagttttggaaatacacagaaatcccttaaaattccaggagttcccactctcttctcgaatatttaaggcctcctccgcacaacattggagtacacgtgtctagaaacaagacaaatctccaaggtctctggggtgcttgctggggtggagataagggaaagacctctccctgagtcttaaagcatcagtctgcacttctactcaacaagtcggcagccaaaagtgacgacgagagagcgactccacgtagcggcgccaggcgcgagcccaagacaaccagaggcggtcacaaggtatacgcccttctcctctttccacgcttctcgagaggctcccgcggccagaaccggaaaacaaggagtaacagtcgcgtttcaaatctcgcagacctgctggccgatttcgagtcttctgaaagaggaaggcgagcaaagccaaaattctcccagagcgcgaacccaaacacagatcgccgctggggtccaagcgcccttcaactccgcccgctagtgcccaagattaccgggaaggaattcaacgaatcagtggtgaggtgccgccgccatgcctactacgggcggaaatttgagagaaagcttcgcaccggtaggaaaactgaggagcaaccgagcacgattggaaaggttgacgatagtggttaagtggctcggccttgccctcagttaaaatggcaattttagttgcttcactgatacggaatcggcgaggcgccaaggaggcttcctgcgtggggccgcagagcgagtcgggaaacgattttaaactgaagaggcggcggagggccgaattcccttttctcaacggcttgatttcagagctgggctggtctctgacaggctcagctggagagggacgggttgggacgcactgtccttttgcccttccccctccgcgagcagaagctgactccgcaggagcgagggtcgcagagctgggtgagcggaaatgtccctcccagagtgaagtcgcagggcccgccccgcgtctgagggagcggaggtcttcctgggtgcgtttgtgtctcttgtgaacccacttgtggagcgagagggaatttgggagggccaggggttagtctggcctctgtcttagctgtcattttggcggttttttttttttttcttcaggggatttcagtctccacatagttttggagccggacttttgaagaatgattcgtgaatccggaatgggtgacagcgtcatcacggcattttattggtaaagatgctttgtattggtcccggacctgctttaactttgtatttgccctgttgtgtggtcattatcttacaatacttgcgtgttgaggtgtgtttaaacactacgtgcttaacactggctaagtattggcattggggcggttggatttaggtattggtggcaatgtagaaaagtgatcaagtcagagccccttcacggactaatcacaagagaaacaacaaagctttacttgtgtgctgtgaaccacaactgcaagtggaattgtcaagagaactagccctgccaagctcaggaaaacttctgaggagatggcacatggaaaatggataagatttactgagacaaacgggagtagagaagtgtttttaattggcgataaggtgaataaaaaggcagggagaacagtagagtgatcatctgtctagagtagggggtgcatgtttgggtatagggctgtcatttaacctcttaaagaattgtctactggaactttcttcactcccatccccccaccccccaatgttgtatacaaaaccttagaggaagtgtatgcagaatgttggattttggaaaggctaatgtcgatggatcttggggaagaactgaagtagtagaaaatgaacctggataggatcagataataagatcaaatacagtagtgccttgaaagccagacaggaattctgatttgacttcatatagatgtgtgggaactgttatgggatctcaagcaaggtaatgataaaagtggtgacaatgaaagactgatgatggattagggaaaggggctaagattgggaacaagataagtagctataattgagaatgaaagtgaagcccacatctaagaggacaagtgtatatctttttaagaaatatgtcagaggccaggtgtggtggcttatgcctgtaatccagcactttgggaggccaaggcaggcggatcacctgaggtcaggagttcaagaccagcctggccaacatggagaaaccccatctctaccaaaaaatacaaaaattagccaggcgtgttggtgcatacctgtagtcccagctactggggaggctgaggcaggagaatcacttgaacctgggaggtggaggttgcagtgagccaagattgcaccactgcactccagcctgggagacagagtgagactctgtcttcaaaaaagaaatatgtgagaatttgatgataaagttaacaaagttaactttttagatgtaaaggtgatgttgaaggaagagtaaaagatgatgaaag

SEQ ID NO: 520 - DNA, 4001 bp, Homo sapiens
cactttgggaggccaaggcaggcggatcacttgaggtcaggagtttgagaccagcctggccatcatggtgaaacctcgtctctactaaaaatacaaaaattagctgggcatggtggcgtgtgcctgtagtcccagatatttgggaggctgaggcaaaagaatcgcttgaaactgggaggcaggggttgcagtgagccaagatcgcaccactgtactccagcctgggtgacagagagagactccatttcaaaaaaaaaaaaaaaaaagacaagtttttctaagctcccttgtgctagccggggccatgtaacacagttctggccagtgagactggaacctcctcctcttccaccttcctgccttcaacataaaagaagaagtcgtagcagccctcttgtatacagtaggaaaaggacaaatgaactactagggaaatgacgacattgataatcataagccacttaatgtgagctgacatctaattggggatgctctgtatgcatggatacttaatttcctatttattggttgggtttttaattgcagctggaaaacatcacgtacatatgaaactggagatttccaggacagtaggatatatgggtttggagtagacctggttggaagactggggaactttaggactcatcagcatagatggtaactaaagccaaagagtggatgggataacccagaaagtgggaaaagtgcagagggccaaagtcagagccctttagaaaaagcaatatttaaaaggcgggaagggaaacaggatattgggatgaagtggccaaagatgaagaaagaataatattgggaaactggtgtcacagaaaacaagaatggaaagctctagaaagaagagagaccaatatgtgttaagtgttgctgagaagagctctcttctcctggttatctcttacttatccttcttacatctcaagtcatacagtatcctctgggaactcctctgacccccaagtccaccataggtgtccactcctgtgtgttcctgtagttctaggcacttgtcccatcacagtacctctcatgctgggttgtaatttctatctgtctccctctcctttgtcctccaccacaaggttgtaatctcttgagaaggaagatatgatgtctatttcatatttgtatctccagtgcctaacacagcactggtacatagcaggctcttgaaagtttttgtaagatcggggtcaccaaggcaggagcatctagggaaagggagaagaggcaggaagaagaaacactaagcaaataggggtaacaagtatcattaccggtatgtgtcagtgcttggtgctaagactgggagaaagagaaggaagtgcaggggagatggtgatgggtcacagccttggtgacaaaagggtaggaatgatatgtggtgcggacatagaagtacaaggcaaaagagtgacgccgagctgctcagttcttcggaagcagggacccctgctgatattctataacttgaacggcctcttcctctacacactgtagattccttgagggtaggggtcgtgttaccagtgtttggcatactgtgggtacgcaataaatgctaaacgaatatatctctggatccacagcgcctatcacaatgcctgggcacctggaaggcgctcaataaaacgctagctgggcctcggggtacagatggagcaggacggctgagtcgctgcagaagcgcttccaggtaaggggagggagtgggtttccactccagactggtcgactcgctccgttctctgccctttattttgcatgcatcccttcacctctccatcacgcgtgccctggacgcctggcaccggaggagaaagtaaaacaccactcctggatgactccggacaaatcactccttcccggcctcagatctgcccaaacgtgcttaccagcttccccgcattcctgctccaggttctcagcatacggactgcagccatcttaccccggaaatgacaacagtgccgcaaactggagagactctcctcggcgcggcctatcaggagatgggaaacgcgcctccccctgggcgaccaatagggagggaagaaacgagcctcccacccaacagccaaccaaggagtagggcggagcctgagctaaaccctaggatctgggacccagcggggagtgaaaagagcctgggggacggaggcggggcagagggcagcccaaatttaacactgctgtgtaaatacagatgcaccaaagataatctttttagtgtatgtgatggggaaaatagagagtgttaaggaaacacaaagaaaggtacttacctcaagaaagttatgttgcagtaggacctgagcgatgagttggaaaacatttccccgtcttcatcttgtagtgtagccgccccaaatacagaaaatagaatatttctatacgttgtagcaaggctctggacaactagttgtttcacaagtccatacagcagtacttcccaatgactgccttttttactcccatttatgtttttgattaccaaaattggctaatcaatttttttcatgaaagatgaacattacctaatgtctaaaataaacatgttatcatctttctttttacagactgctatcagatgcagctaactagcatatgcaatacatgtcacagacacatgatcttgatttagttgtctcttaaagaaatgtcaaattcaggtcaagtggaactggtaaagaacagatcagagctttcttttaaaaggcaatcttcctcagagcaactaggaaaccaattcctggaaatgtccaggatgacattagtctgttattgcttcttacgtgggaatgaaaatctgcacagatgtctaaggaattacagagaaaaaaaactggaacaaatacattttaaatgctcaacattgaagattagtggttatgaaacaaaatctcaggtatttcacaacttcattgtttaatatgacccaaacacttttccccctcatttgccattttatgtattacacatctacacacaaaaaatcaatgcaaacaataaatcttattatcttttttgtttgtttgtttgtttggtagagatagggtctcttgggccaggcgtggtggctcctgcccataattccagcactttgggaggctgaggcaggcaaatggcttgagctcagaagttcaagatgggatctctctatgttgcccaggctggtctcaaagtcctggtctcaaactgcgatcttcccatttcagcctcccaaagtcctaggattacaggcatgagccactgggtccggcctaaatagctatctttctcagaaaatctagagtagtcaaaagaatttcaagtttttacatttccttaaaaatgtttatagacattattaatatatttgataatcccacaagcatgtgtttgtataaaaagcagtggcagttgtacctttgaagtgaatcatctcccttccaagctgctgctatacaactttctttgtcctaatttcgtttttaactgtacctgctcctcagaagataactagtttattttcctttaccgtcttcttatgtcaatggattcttgcttctatattcagtataatatgtgtccttatctttcattccagcatctggaaagaaatacaccatctattccctagttaattcttttattcgagtttgaaagaaacaaagaccccatttcttctctttttttagatttaaaaatggccagttatgacccaccaattccactcctggatagctacataagagaaatgacaacagtgttcacacaaagacttgaataggaataatcataacagcataacagccaaaatctagaaacagcccagatgtccattaacaggtgaataaacaaaatgtggtacatccatattctgaaatattattcatccttaaaaatgactgaattagcgataattgctatgacatggatgaatgtcaaaaaaatattatgctaagtaaaagaatacaagcacaaaagatcacatatta

SEQ ID NO: 521 - DNA, 4001 bp, Homo sapiens
gttcaattttaaaatgattaatcaccactctaggtacttatcctacaacaaatgcacagaagcttgtagaatgatgttcattaaaatgctgtaagggcgaacgtctacttaaagaagaaaggttgagtaccctatggtacttcataatgttacctactatgtaataatttaaaagacagaatcaatctatttttactgccatggaaagatctccaaaatgtggagaagtgaaaacaatgtttacaatatgacaccatgcactcaggtgtctctctcatacacacacaaacacacacacaccccagcatttgtacatgtacatatgtacttgtaagaatgcaaacaaaaaggtctggaagaatattcagaaaacagaaaatattatttctaagggtggcggagtgaaattgaatgggagggatcaaagggatttttgcttcatttttattgagtttttataaacaaaatgtattcgtattttacttgagacactaaaaagaattaaaaaattgcatgctaacttttcttaaataatttacaaaccagaactgttggttgtaatgagatttcattttcttctctttacttgaaatcaaaaacaaatgagagcaacaaacactttttaactagcaagtggcaaaactggaaagaaaaaaattttatgatgttgtttgccgtatctccaaatagaaagaaagagtaatgaagagtatacaggaagaaacaaaaaagacctttactaagtacgtccatttttaagaaaccaaactttttagttgactcgggcgtgacctagaatcctcaaaaaaaaaatgttatgcaaaacgaaaaaagtggaatactgttcccccaagtactgaaggttgtttttagaaagcttaactacgaaactgtaaatgccaagtgtgttttccaggggtgggaagaggaacgtgaaaccctacaccacctttaagcggtcaaaacgaactgaagagcagagtggaactgggagagcgcgcgggggtggggagagctcagctatcacttttaggttttggctcagcgccgcaaaaacagtttacacggattctgtctggagcgtgaagtccctgagggtggtcaacgcgtcgcagccgacacctaaaccctctggagattgaaggagagggtgggcaacaacttaggttcttcggctgagcggggaaagcgcgctggaaaagagcaaaagagctaacttttgctctaaacgcggcagctcctggaggttccgcaagtctcccgagtcccaacccatcagcgaccccaacacctttacaagccagtaccttctgcccacggcccggccctccgagaaaaacccagcaagggcggcggctggcagcatgcacagggggcttgactgggggaggcaccggcacggaattcggcaaccaaggccccacccaacaccccagagtctccgggcgcccccaccgagacgccgtcccacctccaacagacccggcagcgtgccccctcccccactctaggcggcgacctcagcgcctccgccccggggcccccgctcacccaggtagcgactccgcagccgggacgggtcctccagcccgagggaccttttcctcacgtcccacaacaggtgtgggtaggagccaccccgagacatggctctgcctgagccgggtgggaggggagaccaccgcgtgggggaggggaggagggggaggggacacccgtttcaacacccgagccgcaccggcaccatccgcgcgccgggcctccagggcgcagcgttagatggcggtggcagcagcggcgcctgggcccctgaagcccggccgcacccgggccggagctcgcctcatactctccttcttagactaaccagaacatccaaagatcagcaacagtctcctccctcagcccccctccaacaggaggaggcggaggcggaggcgatggcgactcctccctctcctcgtcctggataccctccccgccaaccctttctcgcgagatgacgaccaccctggggactgaggctggtgtgtgctgcggctgccctcaccctggaagaatgcattcgggccactctaaccagatccttaagtcgctagggataaaagacgagtagagagagaagctactcaattctgtagtctctcgctcacgagtctccagtgaaaagaagcaagagaattgtgcggcatcatctttaggcactgaaggcccaaaaacccattttaactacgggcctgcttaatcaaagtgaaagggcagtagaaccagcgcagcttcactttcccttctccaacatggcctcgagggcatggggagaaggaggaggtttccgctcgaccccgcccgcgcctcggggcgggccaatcatggcgggcagctcggcctgcgcaagcgcgctgccagcagggcgcagcgcagacttggtgaggtgattattttggcacctgttgccatggctcctccctctctcctgccgggggccggaggcggaccgggggctggcagtcggcagcctccgccccctcaaccttcgcggggcgcgggccgcagcttttcggttcacagcgggcagggaaagccgcgggaagggtactccaggcgagaggcggacgcgagtcgtcgtggcaggaaaagtgactagctccccttcgttgtcagccagggacgagaacacagccacgctcccacccggctgccaacgatccctcggcggcgatgtcggccgccggtgcccgaggcctgcgggccacctaccaccggctcctcgataaagtggagctgatgctgcccgagaaattgaggccgttgtacaaccatccagcaggtaatggaccctgaatggctccttatcgagaccttccttctcgcttcctctaaaatggaccttttagaggccctctgacaactgcctctagaggcatccacagccccaatcccttcccttcaagtgaagccgtctactctcctagcctgtgcatttcaccctctctcctgcaacatctcttcctaagccaacgtatctcaagtcagctcccttccccacctatgtgacatccgctcccttacgcacgactccaacccaaacctgatctccagatttgagccttctcaacttctgcggccaccaaactgtctggggccaccatgaaacactcattctctttctcttttcgaattgtggcatattaacccactctaggcagagctggatgggtggtttgtcgcactgtagggtttggagtaaaggtcactttcttcagctgctgctggcagaggcctgcagactgagccctcccccaaactgcatgctttacttcatccaggcttgagtcagtgtcatttctcatcccataggtccagtgtgtttttttaagtctatccttatttatgaaattgttgaacaagctctacccagagctttttgtgtggacagacctggatatcattctcttctaccacttatagttgtgaccttgagcaaaagcctagatctctgtttgtgtaatacgcggtctatgagaatgacagataacatatgtgcttgactctttgtaaatgctcagtaaacgttacatctctctttgcctactggaaaactgtgttcttgtggttgaaaaaaaaaactgtaagaaactgaaagattccaatccctttattaaagatctagaattctgttacctcttctataaagtgagttgtaataatacttatttgctaggggctaacatcagatatattctgaggtctgtttcaagcctaagacttggcaaactagaaaatgtgttgtaaattgaaagactgaagtgctacccgaaaagtggcttttattctcctacatagttaaaatctgtattctgtagttggtatcattaggaaagttgtctagttcccccattatctgattatgaaccagctctctggagtctgaactggttactaaatctgatttccagtttgataatggaatgaattgaacatctggattatactctaaccct

SEQ ID NO: 522 - DNA, 4001 bp, Homo sapiens
ctgctaccagaaacctgaaagcctcacgaaaactgcatttataagtatgttctgactccctttttggcaccaacccatgctgctgaatgcccaggatgtttcttctgctaaccaagaattcttcagaccagctacaaaagaaagagcagccactattttttttttttttttacaaaaaatttcccactatatcctaaaaagtcggaattctgaaatagactggactcagacaccaactaaaggcagcatcactcatcactccccagcttttagtcacaagcagctaaatattctcctctaaataccaagggatgacaacccgaagctgtgagaggggaagagacctgatttgacaacaggatgaacagaactcaggcaaactaagttccagtttttaacaacgtaaaaaatatgatcgacacaaagacaaaatacaaggaaaatgaataaagaagaaaagaagacatggggcagggggcacacattcacttctaggcttaagtcatttggagatacacagcaatagtttaggacagaaagacaagaagcccacagacaattaaacttgtaaaagtaattcaaccagagctggaacaaagccaagaacaacactcaagctctttgggaaactggtaggaattttatgactttagtggtcagcagttgagcatcagcgcagtctgtcttgaactcaagaattttaatgcctccaactcccactcacctttcctccttttatcactgaagtaaggccaggctgagctcctgagaaaataggtctgtagattcactgaaggactgagaaaagttaaaatttacatggcaaaggtgtgtcttctactgaacataataaaaatatttatgaatacactttagtatttttaggccttctcaaaactacttaaaagcagaatactttatctaattctaattactgaacaaataacccacacacatatggaaataaaatgaaccaacatgaagattagaagccaggcaagtaatctcccagctccactaaaacgtaaagtcatttaaaaggataacctgaatcttttcaacgctaaaccataaccaaacaacctctcaacaagaagccacagagcagggggggaaatcccggagagaatgtgatagcgctagtgccggtttgtttacagagactccagtaacaatcatgagtcagaaattcaagccaccagatgctttccaactaacagggaccaaatgggaccgttctaagatatcctaaaagatttgggagttagaggaggtaaactaagataattatattacaaagggtacaagaccacaagacaacaaccgactccggaattcttggacctccgccttccgtacaaggtgctgggcctgggaacttgggatgggggagggggacacattgcgcggtggccctgaggtgacggggagacgcagggcgagccgtgtccctcaatctaaggggagaaataggagcgcacacatgggtcacccaacgaagcaaggcgtccctgtgaactgtgcggctggctcttgggggcaacaccagggctgacctgaggaaagggcaaccagtactcccagcgatgacttcgggtcggcggaaggaaaagacctgagcgctaagagcttgggatacgggtcaggcccatccttaggggaaaccggctgggaagcgagggggggcgcaggccgagccggaacgagacacagaccgggtaggtcaagggagggggggtgtccggctggggcagttacaagcacgggaatcggcgaggctcagcagcccgcttcccgtcttgggtcatccttctgctagcggctgctccgactgttccaggcccagccgccccgtccactgccaccaccaacgccgccgccatcttacactggccagcggccgccaccaccaccgcctccgctctctgcgcttgcgcctgcgctgccacgctttccggccccgtttgcgacgatgtgctcgagaagactgagggaagagtggtcgcgcgagctcacggctcgcaaccctcctcgaaggacgcacaaggggcggggcttaaggccaacggaaaacagagcgagaggcgcctgcgcattaccgaagaggcaaagttgtttttgtagtttcttcgggcttgcttatcttgtgatactctaaacaaatgcgagttaggggctacccagagttgtgatagaaataaactaaatttccagcggattggcaggccacttcctggatgatggccagttttgccgtttttgaacactggaacgagcaatgattgccacaaggatttcttctgaaaatccccgtttcctttcagggctttgtttccttaagtggtttctatactatcgaggcccattttcccctgagagtccccatttacgtatttttaaagaaggggctcagtagcttgaggtgtagctattccagaagctcttttctgaagagaggtggtgtgggtaaaggttcccaagagtgggccgggtgatgtggggtgacttttgtactctgtttcgttatgacacctacagtaaccctgcagaggattactcccagctgccaggctggggtattttttttttttttcttaccagaagcccagggtgcaaaaatctgaccctttctcacctcccctaccgctactctcctattccaagtcattacatattacttaagactaccgcaatagaaacttacctcgtttgtctacttccattattgccattacagttaaacataaggcagccagagtgctttttaaaaatgtaaggtctggccgggcgcggtggctcatgcctgtaatcctagcactttgggaggcggatgtgggcggatcacttgaggtcaggagttcgaaactcgtttgaaaccaggccaacatggtgaaacccgtctctacgaaaaatacaaaaaaaaaaaaaaattacccggcatggtggagcgcgcctgcaatcccagctacttgggaggctgaggcaggagaattgcttgaacccggaggcggaggttgcagtgagctgagatcgcaccactgcactccaggctgggcaatggaatgagactccgtctcaaaaaaaaagtaatgtcgtattatttccccagtccccaccctgctcaaaacctccaattcccatcacataataaaagtcaaaagtatgatagccttagaggccatcaaaaaatgaattgcctctaaggaggaccctacatgatctgatctagcacctgcctatttatctgattcatctcctcccacactgcctagctctgctctagcctcactagccttactgtcactccagtcaaagcatgtcccagccctagggtttttttccttttcttggaatgtccatctactagatatttactagacttgaggtgtctattgaaatcctacttcctaacacaggcagctcttgactattgtaactaaaatggaacctcatgtcatcctcctctatccccttactctgcactgtttttttaataacattttttacctataacatttaatctaaaattatgtttgtgatccagctatactactagaatataaattcttgagggcaaggactgtgtttttatcatctttgtaatctcaacacctagaagagggctacagcacaaagtagctatttaatgccccaccgtcctattcattctttcattcattcagtcaacaactattgaattcctgctctggaaggccctgttctatgtgctggggctgcaacagtgaatagaaccaagattcttgcattcatggaacttattagtgcaagggttgggagcataggaggaggggagagacacacagataataaagttataaagagtactgtaaaggaaaataaagcagaataaaaatgggttacctggatgggtgtgctcttttacataggggattcagagaaggcccctctgctgaggtgacatctaaataaaggtttgaagtgagacaataagctatacatacttgggaaagaatatttca

SEQ ID NO: 523 - DNA, 4001 bp, Homo sapiens
gtgctcaagtgctgtctgggtaagtgctgagtaagtctggaaatccagactggggtctcagtactaaccatgagattaaaggtcaagaaggctgggcatggcagctcacgcctgtaatcccagctctttgggaggctgaggcaggaggatcacttgagcccaggagtttgagaccagcctgggcaacctcattgctaccaaaaaacaaaaaaattagccaggcatggtggcatgcacctgtggccccagctacttgggaggctgaggcaggaggattgcgtgagctcaggagttcgaggctgcagtgagccatgatcgcgccagtgcactgcactccggcctgggtgacagagcaagaccctgtctcaaaaaaaaaaaaagtcaagagaaactagaaactagtgcattatgcatcctgctgtatcccaagaatattctcattcatgagataggtcgttttatctccattttgtatgagattccaagaaattaagtgacttgcccaaagtcacacaaggaatgaagcctagattctaagtctacctagcttccctcctctggccttttttttctttttttctctttttttttctttttgagacagagtctcactctgtcccccaggctggagtgcagttgtgcgatctcagctcactgcaacctccgcctcacgggttcaagcgattcttctgcctcagcctcctgagtagctgtgattataggcacgtgctaccaggcctggctgatttttttttttttttttttttttagatggagtttcactcttattgcccaggctggagtgcagtggcacgatctcggctcactgcaacctctgcctccaggttcaagcgattctcctgcctcagccacccgagcagctgggattacagacatgcgccactacgctcagctaatgttgtagttttagtagagatggggtttctccatgttggtcaggctggtcttgagctcctgacctcaggtgatctgcccgccttggccttccaaagtgccgggattacaggtgtgagccatcgtgcctggccaatttttgtatttttagtagagacagagtttcgccatgttggccaggctggtctcgaacacctgacctcaggtgatccacccgccttggcctcccaaagtgttaggattacaggcgtgaaccaccgtgcccagccacttactccctcttgatccttacattatagtaagcaacctcagctgagagctaagagtaggacctggaagccagacatgagtcagagactcaggtactcaaattcttctcccaccctgggagacagtctcctcctgcaacagaggatggccctagcctaacgggagagtctgggatgcctatgcacagtggggaggaatggatgggtggatttagagtgttcagtgatagggggtccaagcaagaagagcttttggaaaaaggggctcaccctgtgggagagtggtcttcccacaggctgatcttggctgtgatgggcataaacattagtaacacacagaattctatttgaatttcagttcaactatttgttatgtacttttaggcaggttttctgtctgttttccctttctaatggaggcaaaaccaccccccctacatagagttcagtaagtaccagtaacatgctggtacatacatggtaggtactgaatacacgctcttgccgttacctcccttgctaggctgtttgaccagccccagcccactcactggagcttgtggaatcgttcaaatccagcggccacatactgccctctgttcttcaagtctgccaggttggtgacagggtggccatgacaaggtgtgtagagggcacgcacagccagtggggcctgcacagctgatgtcacctcgcagaggaaggcctccatggtggggaagcggcgttgagtcaccaccagctgggagcctgggaagaatgggtccccattccggtacaccactaccctcttggctgctggactgccacctgccatagtgtatcctcagtcagagaaacagacctgttgccaggcaaccaaggaagggctgggaacattgccaatcagaggtggagtcctgccctctcacccaggaaggcagagggagactgtggcaggagcatttatctgcattcagggttttatcccatctgccctggggagatcacacttaaacataggtgttaccctactctccagagcctccttgccactctaaagcacaaggctgagctcaattggggatcagctttgggagctgttccctaaggaggatggctagatcttttcctgggccatggctcccagctggctccggggtcaatgccccatgccagtaggaagtgaacggcagggcccagaatctgtcctggccagaagcagaaatgaaagcagccagactcagaatctaagaaaaacctttattcccaacagacctctcattctacttcccccaggtaactccttagccacacatttgttttttgagaccgtgtctcgctctgtagcccaggctggagtgcagtggcatcatcttggcctactgcaatctccatctcctgggttcaagcgattctcctgtctcagcctcccgagtaactgggactacaggcatgcaccaccacgcctggctaatttttatatttttagttgagatggggtttcatttcaccatgttggtcaggctggtctcaaacttctgacctcaggtgatccactcaccttggcctcccaaagtgctgggattacaggtgtgagccactgcacccggccccttatccacaaatttggattgagctacaggcagaggattgaaaatgtgtccttcctccttccctatactcatgccagctctctgctccagcttctcttggccccactagtcaccaatggccaggggcaggagcagaagccagagctggtcagggaggtaggatgaggtcttgtctcactgccctttcatagcattcccctttggaacctgatcctctcctggcttcctagggtctagccaggtggttctgttttccatggcctgcccctccactgttcctctcctgtacagcctgcctttgtagaagacagaatctcaggtgactttgatctccatggtatagtcctctgctttttctgtccttcatgactaggctcattggaggttccatctctggagcttctatcagtgggggcctggcctttgggtggtttagtcctccagagatcgaggacactatgctctggcccccccaaggtaccatcccagatgatgtggtcctctgagaggcccaactcttgtgtcctgactgttcggcagtcaggctctttgtggtctagttttctgggagacatctccttaatatttgagtcctcatagagtgcagacagctgtgtcctggacttcctgggacaatggttcctaggttttaaacctctgggggtctggtcctccaggattttcatctgcagcaggcaggtccctccaaaggtctgtcttccatcgtctggccctttggtgagcctgtcccccaaggcctggctgtttgatggtatagacgacggtggtccagacttgctgtagcatggttctctgcacttagccccagcaatgtttttttgtgtagtggccaaacttcctggggatctgtggggtgatttgaccctgtgacaggagtcatcctcctgttctagctctccagtggtcctgtctctgtaggactggtcctccagtggtgcgcttggttgtgactggtccctctcacaggcctgttccccatgttctaggaacacgcggggttcctctctgatcgggcccgcctctggggatctcagtgtttgtttaagaagtaggtactgttgggggagagaacatacattgtaccaagcaggcctgcttgggcatggcaggtcgtctctccctaacccccacccttgaccctaaatgttcagaaagagttccaggttagtgttacctccttacggctattgatggcctgttg

SEQ ID NO: 524 - DNA, 4001 bp, Homo sapiens
ttgaggtcaggagtttgagaccagcctcggcaacactgcgaggccccagtctatacattaaaaaaaaaaaaaaaaaaaaaaaaaaaaaacatctagtctggagaagtcactgggattccttgagaggcccacctgtgtagaggatggttccaaaatatccttcaaagagaaacatgacagaaccaggacagtgattggcatcgaggagggttacggtcatggtctcttgtccaatttcatctaggggtaatacatggctctcaccaacctccagggcttggatccattgcttagatacctgagaaaacagttagtcatcccagtgaccactgactcctctccgttacctccccgggtcagggactatcccttacatgaatcaggaaagctgaccaaatcctgagccaccgggagcagaagctgtaatggggattcccaagcaatctgcccttcctccttccacttcccatcccaccctttgtacaatttaagagttcagctggccgggcgtggtggctcacgcctgtaatcccagcactttgggaggctgaggcgggtggatcacgaggtcaggagatcgagaccatcctggctaacacggtgaaaccccgtctctactaaaaaatacaaaaaaaattagccaggcgtggtggcgggcgcctgtagtcccagctactcgggaggctgaggcaggagaatggcgtgaacccgggaggcggagcttgcagtgagccgagtttgcgccactgcactccagcctgggcgacagagcgagactccatctcaaaaaaaaaaaaagagttcagcaaacagtctagtcagcaattcccaaacttactcctgatcttaatctcttggagacttaagggtggggtggggagagagctggagaaccacccagcacattaggtggattcttaagatgaggcaagtttaggcggggcgtggtggctcacgcttgtaatcccagcacttggggaggctgaggcgggcggatcacttaaggtcaggagttagagaacagcctggccaacatggtgaaaccccgtctccacaaaaaatacaaaaaattagctgggcgtggtggcgtgcgcctgtaatctcagctactcaggaggccgagacaggagaatcgcttgaacccgggaggcggaggctgcagtgagccgagattgcgccactgcactccagcctgggcaacagagcgagactccgtctcaaaaaaaaaaaaaaaaaaaaaaaaaaaaggcaagtttgggaaacatcggcctagcttacttataaaggtaggaatagtttccttggctggattaaaatatctcctcaacttatggctaactatctcaagttggtcacttcgaaaacacgttcctattctgggttaaagatgcatttttgggttcaaacaacttccaaatcagttttcgtggcccccattctatgactccaagaatgacaggttgaagtcccaacccagatgcctggaccagctctcggagaccgactccagccccatacctgtaggtgacgatgcaagaggtgggctgtaattggggagcagtagaggggccgggcccaggtgctagacaggcccacggtgtggtccgagtgcatgtgagacaagaagaagagacgtgcggtgccagcccggcgcaggctccagaagtccactgcgatgggcgtatgggggatcaggaccccattcatggtggtagggttggagtcaccagtgggatcttctccacgggggcagggctcctgcgtgaggcttccacaacggcgtcccgataaaagtcatgctggggcaagaacagggccagagaccctaagggaaagagcccagcagagcaataagttaccagagtgggcagaaaaaggaagtcaccctgcccgctggagcccaaatcgcggagggcgctggacactcccaaccgcgcgggagcggaggccgagccgggcactcaaagcgcgcgctgcagggaggagacaggccaaagtagccgatttccgattgcccgccgcagctccaccagagggagccgcgcagctgcgcctggagagtgagaggttgggggaagggcatcctaaggtcggagtcgggactacgcttagcgctcgctcgcggggagaccggcagcggtcttctgtttggtctcttgacaagggggcgggacttccgcagaaagcaagattgggcctatccgcgatgagaacggcgtggagggggaattaaggctggaactggagagggaggggtctgcggtcagtcggacgcggcgctggaaatccggcggaggacctagaagtagcgggagcgatctgtgggcggggcgaacggcctgccggccgacggtagggcctgaagagcctagggtggggctcgcggtgtcgcggagggcgtggaagtgtgtcagggccagcgtgccggccctacggaagccgagcctgaggcgagatctcgccttttgtattttcactgactcatatttcctttactcaggctcccacatcaggacgagaaggagccctcgagttaccgtgggagctgtgggagctgccctgtgactcttaggaagatgccgtaccttggctccgaggacgtggtgaaggagctgaagaaggctctgtgcaatcctcacattcaagctgataggctgcgctaccggaatgtcatccagcgagtgattaggtatcacctacctcccttcgcgtgctaactgctccctttgcaatccccatcagggctcactagccccagtctctctgaaagggtgaattagctttcacacgtggcagttatatggttcggtcttcgtcctgctgctttggagtaccatgtcagtctcccctctgcagcatcttttactcagctgggtagtttcctccatatcacgggcttgagcaattactggtgactcttggatctataatatagctagtacagacttccttttttagcttcagacccacgtatcccactgcctgcttggcatttccacgtgcgtggtttatcaaaagtatgtccgaaatagcccggacattcttccgtcttcctcaaacctgttcagcttacatttgtgttgatgaatgccaccagcagccgactatgcgtgggagccaaccttgaggacacctgatctctcacttcttatgtcagatggtttgaattcataattctaaatatccatcctctcttgtttattagcattgttgttctggtccaggccttcatcaataaagcaattgcagcagcttactagtaggccactttgcctcatttgagacagaatttttccattatacatacctgaacacataactcttgcctacagctatggttcacaaactttactatgcataaaaatcccttggggtgctttttgtcatccagtccagggactgattctgatttcagtagggtgggagggaacccaggaatctgtatttttaataaacatttcagttggttccagtaggagaccagtctgagaaacaataaagtccaaacttatcacagcacccaaggaacaagctgttaattcaactacctacagactcttaaaaaaatgtgtgctgctcctgctcatgtctacttacctcatagcatgtatctttaccttgctattacatctgcctagtgagctcctgctcattcagctaaagtattacttcctctgtgaagaaacattttctgacttcctgccagtgtcagacctctgaatcccctctacaccttgtacaatacttctgtttaagtacttatctatcatactgtaattaacggtattctcatctggctcattaatagatttgaagttcctagaggtttgagaccacaccttcttcaagattatgtcccaagagcatgtccctggatgtaaaagttgaatttcaccaaagtactagggattcaataagtgtttgttgaggctgggtgcggtggctcacgctggtaatcccagcactttgggaggccaaggcgggtggatcacctgcagtca

SEQ ID NO: 525 - DNA, 4001 bp, Homo sapiens
aggtgtgcaccaccacatccggctaatttttgtatttttagtggagacagggtttcaccatgttggccaggctggtctcaaactcctgacctcaggtgatccacccgcctcagcctcccaaagtgctgggattacaggcgtgagccattgtgcctggcctgtttcttcctctttttttatttttttctgatctttgatattattgtatgaagatgtgatgccagagttgctgcagctatcttgtgacctgaagagaagtggtcaatagactgaagatggcagagaaaagacagaaggaacctgagtccttctcgaagctactgagctgttaaattatccaaactgggctgggcacggtggcttacacctgtaatcccagaactttgggaggccgaggcaggtagatcttttgaggtcagaagttcgagacctgcctggccaacatacagaaaccccgtctctactaaaaatacaaaaattagctgggcatggtgatgggtgcctgtaatcccagctacttgggaggctgagcaggagaatggcttgaacctgggaggtggaggttgcagtgagctgagattgagccactgcactccagcctgggcaacagagcgagactccgtctcaaaacgaaaacaaaaacatacaaacaaaaccaaagcaaaacggctggatgcttgtcatccttgtttactgctaaatcctcagcagattctcagtaagtgctgagtgaatgaatgaatgaatgaatgaatttaatttcttaggaggatcagaaaacgaggtcagacaggtcaggagagatgagagttatgaagggttatggggttggactatatcatgtgggtgatggggagtccctcggaatggagagactccctcagggcaaggacggtgtcttccttcttaaattggcagcctcttccctctggacctccccgtaaagcccaggaggaggcggaagccacaggggatgtatgggtacagaagaaacaagtcccgactccttcctgggcatgcaggacggcgctgtgttccacaggccgcttgagtgttcctggcttttgcccagcactaacccaccaagctgtacaagaacataatcttctgttcttcgtagatgttcatggggttcaccaggagctgaaagagacctaagggcacaaggtcaagccaaaggccaaaagatgggtcctagccctggtccagcctctgcccaccccgaactttctgcttccacactcacctatggccaggagccccccagcgcctgcccccagcaggagagcagtgacaggaaactcgcccggctggcgccacaggaaccagctacaggagactggcagcccccaggtcaggagcctctgcaccgctaagagggggacagggtagctcaacagcccactcttctgcctgggatggggctcattaggattcagggcttgcaggtggatagaggctggggaaacctggcatgtgaaacagtaggaacttaggggaccctggaggaggatgagggagcctgaggaagtggtatgggtgtaagggacagcaaaggcaagggctgggctgggaggcgggaggcactagaccagagaggtggtggaggcgcggacaccgagttgggggatagtgtgcaggagttccaggaggagagatgggatgagagtggaggtcaagggatactgggtctctgctgagtgactcactggtatgaggctgttttcttctttgccctcttgtgccattctgatgatgtttaatgtccatgagtctgttttggggaagcaccactcatcccaggtctcctgaaggacctccttggacacaaggttctggtgagagaagagaggtgctgcctgtctcttccgcttcatgggaagcctaggcctgagctctgggccttttaatccttctgctccgagaagtggggaaggagattagagacctacctatcccctctccagtcctcggaactgggtcaaggattccaagacatatgcagtgaaagccctttggaaccttagaatacggtgagaaattccaggagcacagaagtcagcgggcatctcctggagacaggcagacatttggtctcagcagccatgcccaaagtcatgaaggatgttgtgcaccccttggggggagaggagcctagcatggcgagagctgtggttcgcagcgtgggaggttttaccctgggcttgtctttagccacggcctacgggcttctggagctactggtggaaggccacagcccctggggttgcctggtgggcaccctcactttggctgccttccttagcctgggcatgggattctctcgccaggtccgagccactgtcctcctgctgctgcctcaggccttctccagtgagcttggcacccagggctagggggcaggtcctggggctggtgctggggcagaagagatgctggaggagaggcaggggttaagggaaatattctgaaggcttatgtaagggacttgctgccatgtttggggctggggtcttggttctaacaaagctgtcgcccccagggcagggccggacactactgttggtggctgcttttgggttggtgcttcaagggccttgtgccaacactctacgcaacttcacccgggccagcgaggctgtagcctgtggggcagagctggccctgaaccagaccgccgaagtgctacagagggccaagcaacctcttgtcagtaagtcccccacctctaccactgtctcccacgggcccccctcgcccccctcatcctgcatgttctacagtcctttggcctccttctctgctggtgctaatcgcggagcatctgggcctggaagggactctgggcacagctaaaccctctctccttgctctctggcctcctccactcccagattaacgatctcccaggccccagaatccaggcttcccgcctctggaaatggtggcctcctctctactccctgcttaaggggcaatggtgagaaccagcccctagaggagaagactccaaagtgcctctgtccctcacccatcaggtgccctgaacaagattaaagctattgcccggaagaccaaagaggtggctgaccgggtccgcaagttctttcggtcaatcatggatggtgtgaaacacataggtaagcacattagcatgtctatcccggggactcaaaatgcacccagtcctggccgggtgcggtggctcatgcctgtaatcccagcactttgcgaggccgaggtgggagaatcacttgagcccaggagtttgagaccagccttggcaacatggcgagaccctgtctctataaaaaataaaaaaatagaaaataaataaaactagccagatgtaatgacacatgtctgtagtcccagctactggggaggctatggtggaaggatctcttgaacccaggggtttgaggctgcagtgagctatgatcgtgccactgtactccaatccagcctgggtgacagtgtgagactccatctctaaagaaaaaaaaaagcgggggggccaggtgcggtggctcacacctgtaatcccagcactttgggaggctgaggcggtggatcaggaggtcaggagatcaagaccatcctggctgacatcgtgaaaccccgtctctactaaaaatacaaaaagttagccgggcgtggtggcacgcagctgtagtcccagctactcaggaggctgaggcaggagaatctcttgaacccaggaggcggaggttgcaatgagccgagatcactccactgcactctagcctgggcaacaagagcgaaactccatctcaaaacaaaacaaaacaaaacaaacaaacagaaacaaaaaaattcagtctcctcacctgtaccctgtccagggttttttgggccccttctgggcgctggctagtgttcactggacacagcacagccaggtccctgaccacaggcctctccagccctggatactgtggtattgttccccaaaaccctgagaagaggctgtaggattc

SEQ ID NO: 526 - DNA, 4001 bp, Homo sapiens
ctgcagggttggcacccagggctggaatcctacagcctcttctcagggttttggggaacaataccacagtatccagggctggagaggcctgtggtcagggacctggctgtgctgtgtccagtgaacactagccagcgcccagaaggggcccaaaaaaccctggacagggtacaggtgaggagactgaatttttttgtttctgtttgtttgttttgttttgttttgttttgagatggagtttcgctcttgttgcccaggctagagtgcagtggagtgatctcggctcattgcaacctccgcctcctgggttcaagagattctcctgcctcagcctcctgagtagctgggactacagctgcgtgccaccacgcccggctaactttttgtatttttagtagagacggggtttcacgatgtcagccaggatggtcttgatctcctgacctcctgatccaccgcctcagcctcccaaagtgctgggattacaggtgtgagccaccgcacctggcccccccgcttttttttttctttagagatggagtctcacactgtcacccaggctggattggagtacagtggcacgatcatagctcactgcagcctcaaacccctgggttcaagagatccttccaccatagcctccccagtagctgggactacagacatgtgtcattacatctggctagttttatttattttctatttttttattttttatagagacagggtctcgccatgttgccaaggctggtctcaaactcctgggctcaagtgattctcccacctcggcctcgcaaagtgctgggattacaggcatgagccaccgcacccggccaggactgggtgcattttgagtccccgggatagacatgctaatgtgcttacctatgtgtttcacaccatccatgattgaccgaaagaacttgcggacccggtcagccacctctttggtcttccgggcaatagctttaatcttgttcagggcacctgatgggtgagggacagaggcactttggagtcttctcctctaggggctggttctcaccattgccccttaagcagggagtagagaggaggccaccatttccagaggcgggaagcctggattctggggcctgggagatcgttaatctgggagtggaggaggccagagagcaaggagagagggtttagctgtgcccagagtcccttccaggcccagatgctccgcgattagcaccagcagagaaggaggccaaaggactgtagaacatgcaggatgaggggggcgaggggggcccgtgggagacagtggtagaggtgggggacttactgacaagaggttgcttggccctctgtagcacttcggcggtctggttcagggccagctctgccccacaggctacagcctcgctggcccgggtgaagttgcgtagagtgttggcacaaggcccttgaagcaccaacccaaaagcagccaccaacagtagtgtccggccctgccctgggggcgacagctttgttagaaccaagaccccagccccaaacatggcagcaagtcccttacataagccttcagaatatttcccttaacccctgcctctcctccagcatctcttctgccccagcaccagccccaggacctgccccctagccctgggtgccaagctcactggagaaggcctgaggcagcagcaggaggacagtggctcggacctggcgagagaatcccatgcccaggctaaggaaggcagccaaagtgagggtgcccaccaggcaaccccaggggctgtggccttccaccagtagctccagaagcccgtaggccgtggctaaagacaagcccagggtaaaacctcccacgctgcgaaccacagctctcgccatgctaggctcctctccccccaaggggtgcacaacatccttcatgactttgggcatggctgctgagaccaaatgtctgcctgtctccaggagatgcccgctgacttctgtgctcctggaatttctcaccgtattctaaggttccaaagggctttcactgcatatgtcttggaatccttgacccagttccgaggactggagaggggataggtaggtctctaatctccttccccacttctcggagcagaaggattaaaaggcccagagctcaggcctaggcttcccatgaagcggaagagacaggcagcacctctcttctctcaccagaaccttgtgtccaaggaggtccttcaggagacctgggatgagtggtgcttccccaaaacagactcatggacattaaacatcatcagaatggcacaagagggcaaagaagaaaacagcctcataccagtgagtcactcagcagagacccagtatcccttgacctccactctcatcccatctctcctcctggaactcctgcacactatcccccaactcggtgtccgcgcctccaccacctctctggtctagtgcctcccgcctcccagcccagcccttgcctttgctgtcccttacacccataccacttcctcaggctccctcatcctcctccagggtcccctaagttcctactgtttcacatgccaggtttccccagcctctatccacctgcaagccctgaatcctaatgagccccatcccaggcagaagagtgggctgttgagctaccctgtccccctcttagcggtgcagaggctcctgacctgggggctgccagtctcctgtagctggttcctgtggcgccagccgggcgagtttcctgtcactgctctcctgctgggggcaggcgctggggggctcctggccataggtgagtgtggaagcagaaagttcggggtgggcagaggctggaccagggctaggacccatcttttggcctttggcttgaccttgtgcccttaggtctctttcagctcctggtgaaccccatgaacatctacgaagaacagaagattatgttcttgtacagcttggtgggttagtgctgggcaaaagccaggaacactcaagcggcctgtggaacacagcgccgtcctgcatgcccaggaaggagtcgggacttgtttcttctgtacccatacatcccctgtggcttccgcctcctcctgggctttacggggaggtccagagggaagaggctgccaatttaagaaggaagacaccgtccttgccctgagggagtctctccattccgagggactccccatcacccacatgatatagtccaaccccataacccttcataactctcatctctcctgacctgtctgacctcgttttctgatcctcctaagaaattaaattcattcattcattcattcattcactcagcacttactgagaatctgctgaggatttagcagtaaacaaggatgacaagcatccagccgttttgctttggttttgtttgtatgtttttgttttcgttttgagacggagtctcgctctgttgcccaggctggagtgcagtggctcaatctcagctcactgcaacctccacctcccaggttcaagccattctcctgctcagcctcccaagtagctgggattacaggcacccatcaccatgcccagctaatttttgtatttttagtagagacggggtttctgtatgttggccaggcaggtctcgaacttctgacctcaaaagatctacctgcctcggcctcccaaagttctgggattacaggtgtaagccaccgtgcccagcccagtttggataatttaacagctcagtagcttcgagaaggactcaggttccttctgtcttttctctgccatcttcagtctattgaccacttctcttcaggtcacaagatagctgcagcaactctggcatcacatcttcatacaataatatcaaagatcagaaaaaaataaaaaaagaggaagaaacaggccaggcacaatggctcacgcctgtaatcccagcactttgggaggctgaggcgggtggatcacctgaggtcaggagtttgagaccagcctggccaacatggtgaaaccctgtctccactaaaaatacaaaaatt

SEQ ID NO: 527 - DNA, 4001 bp, Homo sapiens
agcctactgatggcagagccaggacttcctatccagggctccccacacgcggaacttctcgaggaggaagaggggaaggggtcgtgggaggccaggagaaaccgagagccagctttaccatgtgtcccttctggggataatggaatccaggcccttcggggcttttccccagagctggctacacgtcccgctctcgggtgcgcttggtgtccacgcaaacgccatcctccgaacatccccccgcccacacacacacatacacacacagccccacacccttgcgccggacgcaccctctacgtctggcacagcacggcaactcgctgccccgctgggaggactagtcaacaggggggcggacgggaaaagtgacacaactgggccgcggcgccctccgcgccagcctcccacgcagcgcagggcggacttcggccctcagaggggtgaggactggggccaaactgcccgggtctaccccgccgcccgcaacgctccggggtcccgcgcggagggaggcctgggcgcgggccgccgcggcgcacttttcaggaacgcggcggccgcaagcctgccaggccgggtcgcaggacagccgccgccgccgccaccgccaccgccaccgccccccgaagctagatgacggagtcttgaaagactttcaccaaatatgggccggggctggaaacgtcctgcgccgcgcgccgccggaaacctcgattcttggcaaccgcggtgactgtgggcgcgcgggcggggtggccggcagggggcggcggtagcagccgggcaggcgcgtccggatgcctcgcgtcccgcaccctctcgcggtgcggaccctctccgctccctccgcaggggtcccggagccgaccgccctctccgcgcgtcggccacccagttcctgccgcagccaccaggatcctggcttcctggggctctcctggctgtcaagccaaggggatgggggcggggaaatggtagaggagagaaatgggatggtacgggggcgccaccttaaagccggtcttttgcagacaccattaagttctgttcattaaggtggctttgaagagtggagttgtgaggttgggtgtgcagccgaggatctatgaagacacacacacacacccctactacaggcactccggtcgtccagggcagtggtgctcagggtgtgatctccggaccagcagcatcaacatcacctggggacttgttagaaatgtaactaatcagaaactctggggtgggaacccagagaaccattcattaactagccctccaggcgactcggatgcacgctagtctgagagccttcctagggctaggaaactggagtcgccagatttaccgttattattctcggttgccgccagacagtgagcccttcattaggtaacctaaaattccctggcagcagcggttgagagacgtccccatctctcagcccgaagccaggagctgcagaagacaagtagccccttctccgtggattgcaatccaaggcagcccaaggaaacaaggcagtccgttatttcctcctggggcacccgtatggggagggtgaaggagaaactagcaaaagagccatacagaattagcacccgaagcaacacttacccataaacatttgcacatttcgcctcctgtccgtcaacttggactgatctgcggctcccagcggaggcggcgagaaggcgacgggaggctggggtttctggacggtctttgggcaggacttgaggagccgctgtttctcttgcctaatgtcgtcgattactagcaggcgcaacagcacatggtatatggagaggctgtgcacataggttactctagtgtctcccgctcccacacctcctggccctgttgctccagcttcccacccccatcccacaacacaccccctgctttaaatgggcagctgacggtaaggttctctaaatttctcttctggggcaaactcatcctcaagattccccagttgaagtccagaaacaaacccacacacccttgttaaaaaaactttaatgtgattttaaaggaatctctggaatggcgtgtgtttgaacgcagtgcggcagactggatctctgccgtcccccatccccaacctccaattaaggtatatacggccagttggatgatccactgtgcttttattttaaatcatgatggacagattgcgtgaaaaacaaggaattccaaagaatttcctgctctgggaagagaagttaaatctatatttaacaacatttgaagctgtcaagaatgctttgtggttggataacagaggcagaaaaatgttaaaaacgcaggctactgctatacccaaatatggaaatattgttacgtctggtgtctgattcaccatctggaaatacttacaaccatgaagtcaaatagaaaagacgccacaacagaagccaggaaccctcctctccattctctctctagttcaaccagtactgtccctgcacccctcctcccccctcccgccccccgtcacttcattaagaaggaaacaataatgaaatgataaggcaggaaaaacagtgttttgtaaataataattgatgtattaacctgtgtacgtgttgggcccacactttcctcactgtatttgcataacacctgacaatccattgtcttgaaaagtctcccacccctaaccctctaacagagctttagagatcccactccctctagcaaatgctgcttccatttatgaaagggcactttggaatgaatgaaactgaactccttcctgcaagaattctcttcactggagtgtgttttcatcctgacagattctcattgtgcttatcaggaaagtcagcattagcactaagggccttttcaagcaagactgctaaattatgaagtctgaatagccttaaacattaaaaaggataagtagttatcctagagcatatgagtcttacatgataatttttattaaaattatgcaaaaagtttttgaaacttgcagggaaagtttatcaatcacactaatggtattggtgatgttcaagtaaattgtcttgtggtggggtcttctactgagtgtgttgcaagtagaacgggatcttaaaatctgctgacatttttactgcaaaatattacatcctaaatctcttttctgtacttggagagaagggcattgcaattcatttaaaatgggaggcttccagtggtccctaggaaaggagttaaaaaccccacaaaatgtccagcttgaaggagtctgcttttcccagagattcatagggcacaatggtcctggaatctggtttggccttgcggtctttgcaggtgatgatttcaggccactccacggtggtctcctgcacttctggctggctgcttggttagcatagcctcctgcccgcggagggaggcgggaagggcttaccccgtctcctgcatccgtgaggaagtataagtcagcctcccggagaactccccgcgttcgtttcctctcggacttccaacccaggcagtgggctggaactaaagtgggaacctccaaaaacaaacaagtacaacatacccaaaagagggaagggctggaggagtgggggagacctctgcctgggaatttgccagacgatgggcaagtttccccccgccccaccccccccccgccttttcattcataaatgccactgtgggtattaatttgcaattcactgaactttgctaataaacatcatgccaaagctttgggacttgttccgaacacgcctctttgaagtccacaaatattcctgactcagagacacactcctcttccccgttctactctttcaacagataacttgcctctcaccttcgctgtaaaaaagcaaacagctcactgccttcccgggtgagggcttcagtggctgcccggtcaactcgcatcaccaaacaaaacgacttttgttcctccctctcaggtcctcccacccacccagtccaggcaaagttctgaactggcccccctcgcccctcacgaccct

SEQ ID NO: 528 - DNA, 4001 bp, Homo sapiens
gcaggggaaaaagatcactgctcacttaggtatcagggaggccaaagcttggaagcttttattataggaataaaatgaaatgggtgaataaatatggtgacagtctcttgagaagaaattggactactctcatcaaaagagtgccattttgaaagggttttgaaatcgattttgctcttttaagttcaaaccatagctctgccatttggcctagaacgcattagaaagtattcaaatgggattacattccttatcagtttaaaagagtgggacatctcacagactcaaagatggagaggtgtggcaaagacatcaaagggctagcagagatctgttactcttttggttttctgttaatggagggtgaaataaaagctgattatctcgatgagaaattagtagaatatgcttattttctcagaccatgtggcattccatcaaccaagtagtggagcaggtgaggaataagcatattttatcataagctctatgaggcatttccaatgtgaagtgaatacagacaaaatagaaaaaaaattcttaaatctccagaaatgaaagaaaccactagcttcttgcaatgccactggatgccaatagcaacggagtcttgagcctgggctcttaactggcaatgagaagaatcccaggccagatggcattttaaaatccaatctcactctatttgtctctccccactaacctacattgcacttaaagcaatcagccatttcacaagctgcagtatttcaaagtagttacaacccttgagaacagaaaaactctcttaattgctgtgagtttaaaaatatagagaataaaaattatggaatttgtgaaacaaccatctctaattaaacacgctcgctagcacacacacccaacaccgcacagagtacagcttttcaaacctagcccattcatgcacacatttagcacagctcaccaacaaaacacttttccttccattcattcacttactagtcccgttctttgggactcactcgccaccactgaaaactaacttgagaagccccaggtctgtgggcaccgacaccccgttaattcatccagcttgtcctgctccgagcgccaggcaggacttgggggcttcggtgtcacgactggcgctgccccctggagggacgcccagcctccacccgccctaccggagcggcacccctcgcggccctcgctccctgggaaacactcagagttgcactgtcgtcgctgccgtttaattttcacaaataaaaatgcccgtgagacggaatcccccgcccacccacctgcccgagaccgtacaaccacattgaatcggatcctccagaaggctgccggcagccgggaggtgtgaacaatgaacttctctctgactctctgacacacacacacacacacacactcgccccccgacgggaagttgtgaactactagcccgagggccaatggcgcgactccccaggcaacacggcggccggcggcgggggagggcctggcgcgcgccccggccgcgcccctcgagtcggcagttacctccttcctccggctcggcgccccgggtcgggtgatgagggccgtctcctcgcacaccacggccacgtcctccacgaagacgcagtccggaaggctctcgtcggccggcagctccaccacctgcagccccagcttgctgcccagcacgcccacgtagagctggtgctgccgttccgcgcgggcgacgtccacctcctcgcccttggcgcttctcagcgcgtgctggccgagcgactcgggtagcgcccgcaccacggcgtgggtggcccggccgaaggcggcggggtggccgagcccggccatggcttcgggaggcttaggggcggcggcggcggcggaggcggccgggtcctgccgcgggcagcgcgcgctgagcctgcgagcgcccgtcggctcctcttggcagccgctgaatgtggtgcagaaggagcccagctcgcgcccggagccctgcccgcgcgactgagcatgcccagagctccgggcgccggcccgcgcgcatcccgcgcgcccactccggcgctcgcgggtctcgcgccagcccaggcgggagttgtagcggcgagcgccgggcgaggagtggggccaggagaggcggccggggaagcagcgagggcaagaagtatgcggaggcgggggacctcggcgaaaagccaccgctacccggacctggcggtacctgtgttctgtcgcaggtgcacacctcccatcgtccccagcgcggacttggagagccggcctcggtctggacagagcagctggagggcttcctggtctttacctgaacagtttaaaccttgcgtgcttacaaagtctagcccacttttgaagagctataatggtttacagattcttcatgttgagcttaaatcccacgggtcccagttctgttttctggccttacctaaagtacaagtttttcttgttttgtgtgtgttcgcgtgtgtgtgtgttttcacaaaacagcatttgcatatctgaaaacagttctaattatctatgctgcctaacaccatcctctaccccccaccctaaaccccctccagtcctggagcccaaaccactgaaaagtaactagtgatttggtttccaagtcccttcaacattctggtcagcttccttttgatacacaccaatttgcttgtatccttttaaaatcatagtatccggaaaataaacaattcttcctgtgtggtctgaccagcacagactacagcagcacccttgttccagatgctgggcctctatgaacactgcctaagcctgtattcacttttttggtggtctagggccaaggcccaggctacagccttcttgccagaactctgatcccagcttttaggaaactctggatttctaggagcaggtctctctgagcatcctagaatggttgccccaactgagcccagagatgtgatctgccttctctcccctcccacaagggtggtgtgaatttataaatgagcttcaaaattctcagcttcacatttgaggagttttttttgttttttgttgttgttttgttttgacggagtttcactcttgttgcccaggctggagtgcagtggcacgatctcggcttacttcaactgctgcctccccagttcaagcaattctcctgcctcagcctcctgagtagctgggactacaggtgcacgccaccactcgcggctaatttgtatttttagcagagacagggtttcaccatgttggctaggctggtctcgaactcctgacctcaggtgatccacccgcctccacctcccaaagtgctgggattacaggcatgagctaccacgccctgcccaaatttgaggagtctcaaggacagctctgacactgacattgggaagtgggaccaaaagtaaaataacaaacctttaagaccgactaggtagtacttctaaagcaaaattcttaggggatccaggcagccccattagccccagtttagcgtcagaaatcacttaatggtgtcctcagatggaggatttccatcaaagttacaggtgaaagttgatcttttaccttaagcttgccctggttaaatataaaatttatttatttttaaattagttcattatttattcttttttttttttttttttttttgagatggagtttcgctcttgtttcccaggctggagtgcaatggcgcgatctcagctcactgcaacctctgcaaccggggttcaagtgattctcctgcctcggcctcccgagtagctgggattataggcatgtgccaccacgcctggctaattttgtatttttagtagagacggagtttctccatgttggtcaggctagtctcaaactcctcaactgaggtgatccgcctgcctcggcctcccaacgtgctgggattacaggcgtgagccactgcacccagcctatttattcttattatatattgtttatttgtttagctcccgggttaaataaagtataggacttcattctgc

SEQ ID NO: 529 - DNA, 4001 bp, Homo sapiens
aaagaaaaagccactatcaaaaattgaagagttgtccgggaacggtggctcacacctgtaatcgcagcattttgggaggccgaggcgggcagatcactagaggtcaggagtttgaaatcagcctggtcaacatggtgaaaccccgtctctactaaaaaaaaattacaaaaattagccaggcgtggtggcgcgcgcccgtagtcccagttactcaggaggctgaggcaggagaatcgcttgaacccgggagactggggttgcagtgagtcgagaacgcaccactgcactccagcatgggcgacagagcaagactccgtctcaaaaacaaaaacaaaaaaagaaaaaaaattgaagagtttattttctctatttaaacagtcctttcctagttctccacatgaggcattcactgacagaactggttcctgagcttttgtggattaactttttaaattctttctgaacagctttatgccaaggttctaaagttcacattgtgtaaaggaatcatacttctgaacaaagtattgacacgtgtttaccataagacagcagaacaagctgcagttgggcaatcgttttgtaaactatttcataactgcagtagaaaatcaagatttacttgatggagacttgggagacctctataattttcttaatgtttagactatttcctccaggctaaatttattaagtcatgatctaagtgttttagtgtaaagtttacagcgttagtgtcaccgattctgtttgataaagactaggggcagccccaaagcattttgagaattactttgcttagttaaaatatgagaggctgaacttctttccagcaagctgagtagggaaatgaaaccaccaaacagcactgatactaggccgtttccaagcaaatatccttttaaagcattgagctttgaactgacccaaactctgaactgtgacctgaaagaaaaagggccttctggcttactaccagggtagaaccgaaacaaacaaacagcttgagttgaaccaataggtactgtttttcaaaagaatttaaccagaaacgcatgtggtgggtaaagagcatttccaaagaccccaaaatgaggtagtgcaagtcttaaactttttctttcaccggaagtgcaaatctgtgcatttaaaggtaaactgcgtatatttaagcagaaaccctctccagaaaaaaaaaaaaaaaaaagcagaggaacatctatctaccacagtgatccaaactggtatttctggtttgcaggatgtatgaatcctagcaaacccagggctgcttctgaggtccacaacgatatcctacactcgggattagaaacagggaagggccaaagagccaaaggtggggagggttagcgctgctcaacagtccacgcgcccctcacgctgcagtgggtgcgtctgcggtcaggttctccgctccctctcctcgtaccccaccccatgctcggagtgtgtgagggcagctactgatgccagctccccagctcctttccggatgcgggggtgacctgagaatggctatccttgctccccccagcccccaattcttcaccagtagcaaagggagggagtgaggccccgaggcggggagggcttagctccggggcaggcccggctcgctgcccggcgtacctggctctcggctgcggggatgccagactcgagctcgcacagcgcgcggaagttgtgcagctcgaagtcggcgtcgacctggagggaaaaggtcacctcggagaggtccctccgcacacagtacacggtgagcagcatggcccgggcccgacccggctcggctcggctcggcccggcctgggcgcggggcgcaggggaagaggcggcggcgtggcctggctggtgctgcgggaggacggcgccggctgctcgttcgctcgctcgctccctccctcacacacgctcagtgagtcactccctcccgccctcactagcaagcacggccgccgccacacgcctgcgagtccgtctgcctgccggcctgcctcccacggctgccgccaagcgcgccggccgcccggcgccccgccccgccgcaacgcggctgccgtaaagcccgcctcgccttccccgccttcgcaacgcagcggggggcggggccgggaagaggaggaggaagccaggagaggataggagggggaggagtgggaagggggcgtggaagaggagagggaggaagggcaagaaaaggggagggaaggaaaggaacgcggagaaggaaatctctgctgactggttgacttaatgacagaagtctgtggaggagtccccggtcttatttattcaccgaacaggcattgattaagcgcctaccatgtgtcgggcgctggcgatgcagaaatgaataaaaggataaatccttctccgtaactctcaatctagtacaggagttagtaataaaacatatttttcgaggtagaaattgaggctccgacagagtaattcacttcctgtcttagtgatttaggattgaaaccaaaatcattaccctccctagtctacagaagccagttggctgtggcccacgcctacctccccagccccttcttccgagctcttcccacattctctgccctcccagccacataggtcagttcctccaaggctccattcccctgtcttgtaaataattttctctctacttggactgtgtctgtttcctagccctagcaactcctaccacctagcgcagtgcctttttgggcacagcttagaatctactcaataaatatttgctactttaatggcctgtttttaaggcacacagctgatgagtggtagaggcccagaactaaggtgcggatgagtaagaaaaccaaaactgaaagatgaacttgtaatggatgccagattagcatctttccatttactcccactccccctccatggtagggagcccttttccattttaacaggagagaaggagcaaataagatggctgtgggtgcaggtaagtaggtagtaagtaggctgttggtggcaggaaagggagaattagcagctgaaggcttttacaaagagaaattagaggagctgggcgcggtggctcacgcctgtaatcccagcactttgggaggccaaggcgggcggatcacaaggtcaggagttcgagaccagcttggccaatatggtgaaaccccgtctctactaaaaatacaaaaattagccgggcatggtggcggacacctatagtcccagctactcgggaggctgaggcaggagggtcacttgaacgcgggaggcggaggttgtagtgagccgagatcaggtcactgcactctagcctgggagacagagcgagactctgtctcaaaaaaaaaaaaaaaaaagagaaagtagaggcacaggggagtgagaatgcttatatcccctaggagcaacagaaagcttgactatcagtggcttaaacaaacaagggtttgttttctcacaggagagaaggcctggaggtagcaacagcactggttgagtggctcactgaaatcagggccaatacttttgtaattgtcttgaccttttcctgagggttgcaatatatggctggctgcctccactgcacgcatcattttcctattcaaggaaaaagcttgcccagaagtccctgtgcacatttttgcttacatctcactggacagaattgtgtcacatagatgcaagagaggctaggaacgcaagtatttagctttgcctaaaggacataaatagggaaaaggggggctgggaatgggtattaggaaagatgtacacagtgccttctacagtgaatgtttgaaataaccattgcaaattgaagcaagtttagctgagaaatgttctaggattgcccagtggtggtatcaaggaatcagttgaggcttgaatcattgattaattgttatatttggtctagtggtgctcaggttcccaggtctggcagattttgttctccaaagatgaccatgacagtgcctcccatcgtctatgctcttcct

SEQ ID NO: 530 - DNA, 4001 bp, Homo sapiens
caaacacagcaaaaacttggcaaacaccagttactgcaccgaagcccagtcatcagaagatttcaacttctaccaatttggggtgacatccgcctaactaatcttgcctccaaaaagccaattccaaaagcacatgttgcaagggagttgggagtgacacagtaagtaacagaagcctagggaaagtacttgagggattcggtggaactgaatctcgcatgaactacagagaataaagaagccatgtcccagttattcaggaggctgaggagggaggatcacttgaacctgggaggtcgaggctgcagtaagccatgatagcaccactgcactcagcctgggggacaaagcaagaccctgtctcaaaaaaacaaacaaacaaaaaaggcaccaatgaagaacttcctaagcttcattaactgaagggaggaaggcagtcctgtcttacccagacagggacaacttgagtcttttaagaaaaagataaactgaagcaaataaagaagagaatgactaacatgctcaccaaaaaagtatggcaaaagagaaatagctaaggagctggggatgttcagtctggaggagaaacaaccgaataagctgtgattatgtgaaggctatgcctgcaaacaagataagcattctatctattctctaaggtgctggggagcataagaacaaaataaagcaggagacaatatttcttaatataagaacttcttaacagaattgttcagtggtggagtggattgcctcgtaaaacaagaatactcaagtatcaactggataatctggccaagatattcattctgttaaacgactagcccactgcaaggctgctggacatatttatccagcctcaaatgggaggaggggtggggtggtagataattgctaaggctcttttttcagcccgagactatgaatctatctgaattcttaagatcaactgccacaatgcacaatgcctctttatagcaatccatattaataacaggccatttcctctttccacccaggcaaacccaacccaggagctttccatctttttatcaggccctttacagagtaaactcccttctcagcagagcagcagggccctgggttccacggtctgcagcaacacttgactccacaatccttagctgtttcttttagaaagatgtaccctcctagggtcaggtcagaaatgagcattttccttatctccgtggtagcaccatccaggactggcaacccatcctgtgacccaggacatgcccaagaaccagaagaaagcaatccatcaagtcccgggtctcgaattccagtgctaggggcgacgcggaacccttaccttctaccgaaggggagaaaatgatgagattgtcatagaggaattccccatactttatgagagacaggctggggtcatcagcggtcttgaatgtgagctcaaagccccggtctggacaagaaaaaacaggtagttgaggaagacgggacgcgaagggaaacccctgctgcagacatcgcggacccgcacgccaagcggcaggccagacccgggcggcctgctccaggaaagggagagggaaggagagtggtcaatgccctcgatgctgtaccaaccccaggcccccacacgctaccccctcggaccccgctctcacccttcaggctccggaagaaaagcgaatgagtctcccgcacgttgaggttgtccagcagcactaaggtgcggggtccgctggcgcaaaccgcgccaagcaagggcagcagcaaccaaaagagggcccaagcccgggccgcggtgctgggctccatcttcctcctcctgccgaaggacccagcacgtgcacaccggaagtaccccatctacggtagcccaatcgcggctcgtgcccgtggagcactacccggaagtgatcgggatacgccgcggctgggcgtccagagccgcagctttggcgataaggcgcggagagcgccgccggaagtgccctggtgggaggtggattccttgaaccctattggtgggagtgaatcaaggccccgtccccctaaagaaaaggctcaatcctagagagacagctctgcagccgcggccaatcaacgaggccgagcgccctttgctccgcccaggccggcctcccgccccctagtctggagcccacttccctctggagcttgcggggtcctccccgggcttgaccgtcgcgtcctggacagggtgtttggccaccttcttgctggcggggtcttcactgggcctgggaaggctcgggaccaggaactaggccccacctccaccatttctagggaggaggagttggaagaataagatcagggtcagggcacttggagcctccttcctgccgctcacggctccaggggccatggcatggacgggcctgtgctgcccagctcggtggcccacgctggagactgtggatgggcagtagactggcctagcgatggttccatttccaagttgcatctctcactagccgttacccgggcattgcacttctctccaggacagtttccctggctgtaaataggactaaggacgaggtccagctccgctgtttatctgtgtgccttaggaacagccatttaattacctcatctctgggctcttgggaggaacatggcaggttttgaagcacttagcgccgggctagagtgaacatccattcaataatgtggctcccacctcttctaggttaatacagaggccacccggttcatctcagacctgcctttgtccaccaggggtttaagtaaaaactaccacaagcagcaagacttccaccgtcctctgggtcccaaccacaatcctgaggccaatggtgacggcaactgtagagacagaaggtagcagttcctttcggacacttgtccaccaacccaagaatggagcaaaaatcaaaacctccctccatacatcttcttaacggactctacttcctctccattcccactggctctgccccaagttaagcctctgcagagctcctggctcctgcaccctaactcctgcccttccaccctcgacacacagtaccacatccgcccgcctctaattcagagccaacagtgttaaactgttaagagtcggccacggcacagggacaccccaaggctctttgctctcaggtctccacctacactcatctcagcagcctcgtcccctctcagtccttgctcagggcttccatggaacaggaatggcccagcctttaacaccctgagttccacacctcctgccttttgctttgcagcgctctccgccaggagcgccctccttacacccccatcttaaacctcctgggatcttctccatcctttctgggagccccacccagcactgctcccttcagaaaggcactctttgttccccataaagacctgatatcgaccaggcgcggtggctcacacctgtaatcccagcactttggcaggccgaggtgggcagatcacttgaggtcaggagttcgtgaccagcctggccaacatggtgaaaccgcatctctaatacaaaaaatttagccgggcgtggtggtgggcgcctgtaatcccagctactcatgagtctgagacaggagaatcgcttgaacccaggaggtggaggcttcagtgagctgagattgcccgctgctgcactccagcctgggtgacagagcgagactcagtctcaaagaaaataaaaataatttttaaaagacctgatctcaccggctctgactcaggacgtactgctgcctgcctctggctggatatctctgtagttgtctaaacacccccaccccagcttctcaagagtgtgtgctccttggcccaggcatgtggcttgtggggcctgccatagaaattgatacaaaatagggaggaggaggactaacacagagcacctgctatgccccaggagctttacatactatctcatttaatcttcacattaaccctgtgaggtgggcgttatccccatttcacagatgaggctcagagtgaaatga

SEQ ID NO: 531 - DNA, 4001 bp, Homo sapiens
gcccttgatagccttcagcatgcatgcatgtccaatacctcttgcagcaatcacactgaaaggtactgcaattgttcccatataataaatacagaagtcaaggtgcagaaaggcaaagcaactttgctaagtagtaaaaggtagagccagaacttatcctgaatcttctgactctaagtcccaggctctttgcataacaaaggtaagtatataccaaagacccagaaatcaaccccacatctgatatccagacaaatgttcagccaagtgcagaagtggcctctgagagagaatccatactgctcccatagcctgacaccttcacctcctgatcagccagtgaaatatggaatttgaccccaaaagtaaccaaatgcaagggagatgaggggagtatcattgaatagtgattccaagcataggttttagagtcagatatacatgagtttcaaatgtattagctacctttccttgagcaactcatttcgcttctctaagcgttaatgtccttacatgtacgatagaaataatgccttacatagctgtgagagtcaatcaaattatgtatgaagagctctgagcatgaattatgtattattttgagcctgctgcatagaaaatactcagaatttagcttctttttattttacacacacacacaaatataaccatagacatcattagctgatgagccgccattggcgtcctctctattactgataattaacgtccttgtggtgacttgctcatcatactgcctctattgtctcagccagaataagccttaaaaaggaaatgaaagcagaggtatggagtggaaagaacactggactagcagtagagagaatctcaatttcattttcagctccactacagatgtgctgtgggacttgaacaggtcggtccccttcctatcattttttacatctgtggagcgaaggggttagatgagaggcctaaggcccttttcaggactcttaactctgtgttgtaggaagccaatgatcggcaaaatggtgctgaaccccctactggcttgaacagtacgaactcttgcctcaaatggctggtctgagagtttcagccactgggaacagttctctttccctttggatgggactcttgaacctaggccaggactcagaggtcccaaatgaaaacagccccagtcattccataacaaagggaaaggcacccagagccagcgaggagatgagtctgggaagctgtatttcactgtcacaactgaaaaatcttccatgcacccagcctccccctagccaccccaaatctcagggggaagccacccctcatccaaagttacccttctcacaagtaaatcagcaactcccctgaaaaacaaaaagtgcttggtctacactatctccaaaactcaggaccttctaacaccactactaaatgtctaaaaacttagctctcctgctctgccttcttcatcctgaaactaactctgcaatcggcctgtcttgcctgccaacaatttcaactctgctaacactgtttattgtatcttgcagctgctatagattcatttattttgcttcaggcttctttggttattactgctctttattcttcccttcatagcataaatccagacccccaaaaacatgggatctgatttctcgagtctgtggtgcctcattacgttcccttccttgtctgacttaaaacgcccttctgtttcctttttaaaacttttcctgaaacaccaaaagaagtatatgcggagctttcattttcaaaaaagaaaaaataataaagaaaaaagacccacataacttactttcatccaggggtgcacagttttggaaagaagaaaacagagctataatccactgcgtttccccaacccaaaaagaagaatttgttgtgaaacgcttctttttccactttgctggtgaaggagcccggtggtaggcatacatccacaggctgatgcaagatgcctttgagagaaacctcacattctgaggattcctgggaaagcgccagggatcccagcatccaatatattgcacatttggtttcaattaggaagggggttggggagggaagaaggaaagtcaccaatcagagctgttttctgtttggagactatttcttttgacccaagggactatgggcaaagctataatttacagcaaaacccattcatagaagaaaaaatatgtataaccataggacagacttaaagacaccgctcccttctgccttattcccacccatatccatctccacttccttcccctccatctaagacttgatccccttcctgtgatccccacccccccgccgcctaccccacacctcatttttcttacttgagctgaagctataagcaaaacttaaagtttggagttttccaattgaagcttccaggacagttggggcacacacgcggagctgacctttagtattttgaccatgaaagcctagagctgagctctcccccgaaagatttgatttaatcccttcccaccacggctccccccaccaagaaaacaactggaaactgccagaatccaggattcctatttttttccactcaattcccagttggctgctgcctctgagggtctgttgctgtcctggattcatgctgctaaatgaaaacacaagcatttataaggactttctaaattattttgtgaacttttttttccctcctttatcttctccccgcttccacagctatagtcagagatcatgtgaaaggggcgggtaggcaacaggggaggagccttcactccactctccaaacgataactaataaccctctccatccatccaggctccagccttaacccttcagagcctggatcattcctgaccaagcccacgctgggctgttctggaggtcctgattctccgtgagtatggagaatgcagggcaagcagggacccaggggcaggagatccaaagagagaggtagatggcaaaaggcaggtcaagaagaccgagcttacctttgagagccagacttcttgtaaagagacctcctttctctgagctctggagctatcaccagctcttctctgtttgtagttaatctgggattgcacagtctccaagatgagcaagaaaagaagtgagcaaacaggaaagggaggatggaaagagatcatggaggaacgttcccatagtaagttaggggcaggagatgtttcataaggggaatggaaaagcgcacacacacacacacacacacacacacacacacacacacacacaatgagggtggccatgaaactgagagctagtgttgagtcagtgttaagtccctaaaagtctcataagctcagcaccagtctgagggtcagaaagcagccgttaacatctgtgcctcacagctgttacagaaaaggacacggagaacatgggaatggttcagagggcagccatggaaatgattaaaggcagcaagcaagaccttagagaaaaaactagaactagggttagtttatgaagagaaaagacactgcagagatcaacttattaagaagactcttcaaataacttacagcatctgaagtcaggcctgagggtgactcaggccagacatgcagctcaactcaataaatatgtgttgggctcttatcaggcactttactgggtgcttgccagagacaactagaaatcctcctcaaatgtccatgcctgtagtagttcacctctttggcattactataaagaatgtaccaaaaatacaatctgtgatttcacagatttggtgatactataggtcaaatgtggaaaacagtaacaacttcataaaaccagactgagcctgataaaggacagggcctgtacatataggtatgtgttttcctttttcattttaaggtggttctactccataggtgagattgttttttctctgtgtatgtataattagaactcaagttgtagtcttaattgagccaggactgagccagtgatgtagactgcaaaacccagacacacctgggtttgtctg

SEQ ID NO: 532 - DNA, 4001 bp, Homo sapiens
taaggctatgagaatcacatctaattcatctttgaatccccaatgcctggcacactgtttatacgtaatacggactcaacaaacctttgttggagaaatgatccccaaactcaaatttcctgctaatttgggtaaggcaatcttagaaacactctaagacaacctggaagatgggagatcaatatgatacatttacagagctttaagaaccacctgcataccggctgtggtggctcatgcctgtaatcccagtactttgggaggcaaaggtgggaggattgcttgaacccaggagttcaaggctggtctgtgcaacactggagaccccatctctacaaaaaatacaagaactagccaggtgtggtggcacacacctgtagtcccaaatacttaggaagatgggtgggaggatcactggagcccagaagttcaaggttgcagtgagcaatgatccgccactgcactccagcctaggtgacaaagcgacaccgtctcaaaaaaaaaaaacaaactctgcagttaccaacaatagccagagcactacattaccatgaatcaagtcaaatgttaagtctcacattaatctagtcagtaagtaaaagaagaatccctgtctgtattaccaagtagtgacaaaattgacatatatggtagctttattctatttaaataaggtacgcatagaaaattccaaatttcgccaccaccaccacttaactcaatcattcatcaaattcacttccagctctgaggagctactggtatttcatctgacctgtggtaaagtccacaaaacacatcctcctctggtcctctcagctaactcacctgggtacttaagttttcaagaacaagagagtccaaagctatggtggagaacacacaggttttcccggtgccagatttagcttgaacaattaaatctgcgaaggaaaaaaacaattatcactagccagtactcactgaagcaacttaggggctaacatggaatcagagaactagaagggtctcctgagattcccctagttggcaccttcatttttagttgattctcaaaaacgtatgagaacacgcctagtccctgaacgtttaccgtttatcttctcaaacttagaaccatttgtcagtgcttaaaaaaaggtcttaactatcctcaagttcaatagtgcacgttagttttacaaataagttaactgagcgtagcgcctagcccccggcagggccctgctccgggggccgaccgagggctcttcctgagctgcggcgcgggcctggccgccgccgcccgtcggtcccccttctcccaccccaccccccgacctatcccgggcccccgctctcaccgagcccgcagcgccccaacgggatggccttgagctgcaccggcgagggcctctcgaagccggccgcccgcagcccctccagcaccggccgcgaaagcagcagtgactcgaagtcggccggctccgccaacagcacatcccccgtgcgggtccgcgggctgctgagatcctgagcggtccgcaggatcctcacaggcccgggtgttggctctggggccgggacctgcacggccacatgctcagccggcatagcagtcgccactgctgctaaggctcccgaggcttcaaatgccgccgccatggtagccgcgccgtcagatctcgcggtgcttaaggggaggcggggatcttgggagcgagaagaagaaaaactttattggcagttttcccgcgaagacactaacacgcccggcctggaagtggaagaaagggacgggagtcggaggctgagagactgcccagacacacaaaaaatgtggcctgaggaaagccccaagagggaggagaggaaagatgaggcaactggtgagtcgctgcctgtggcctgcagagggcgccgcgggcctgcggtgggggcaccgccccgcctctcggccctcttctgggcggagccgcccagccgtgcccccggcgccaccgccctctcgccgttctttgtgatgcgcccggtgcgtcacgcccccgtctcgtgcttccgttttccgttccgctggcctgtctcgcttcgcggccacctcttccccaacgctacccgctccgtaccctgactcgctgctcctctgtgctggcagagagcgcgcagaacgtagctggacccaagggtttatttaccacattggctggtgtgtccatctgctgtgcaaccacatttatctccggtgagataaaccccatttatctcctagcaagtccctggcgcacagtgagctctgataaaagtacgttgaattggaacctggaactggactaacagctcccaagttcgtatctccgcctcagatctccttttaaactctagacgtgtgcatccatctgcctccatgcatccgcctccatgcatccgcctccgcatccgcctccatgcatccgcctccgcagcacctcccttgggatgcctaatagactctcaaatgttacatgccttctgtattgctccttcccccatcatttcatgcgtaggcagctagcagtctctgccacttttccttgctgtggtcttctgctcaaatatcagcttttcaaagaggtcttgaacaccctaagacagctctgtcatcctctctgctccctggcctttcccagcactctcttgttttgctttattttttctttatgatacttatacctacctgaaattatatgtcttctgcctgtctcccacactctatgaggacaagaacctattctgtcttgttctcctctgcatccctagtgggaaaaacaatctgacacataggaaatgttcaatatttatcaaatgattgagctcctataacaaactcttagtcatcatgccaaatttaaatatttctggacctcagccatattcataattccaaatttagttgtgtggggtggctcgcacctgtgattccagcttcttgggaggctgaggcgggaggattgcttgaggccaggagttgccagcctgggcaacatgcagaaaccctgtctcaaattcttaaaaagtaaacaaatttttaaaaatacaaagaataccaaacttaaatatattctgcaaccaagcccaactttgtccatagattataatgctggtcattgtccctacccccttgacacacacacagtgatggtctagattccatatgatataggaggggctttgacatggtaatcccattggaaggtggtcctgaaggtttattttgcctggaaatgtacaaaacattgagaaaatgtcaactatccgtttgaaggaatggagactgatggtggagatggcactaaaggtcccagccttcctcttagtgccctcacctcttttatctgcctaatccccagaccacaaacctgggaattattcttgactcctttgccactttctaacaatttaccaagcacaagtaattttgcctccaaatatttcacccattcttcttcagtctccgtagaatctgccctatattttagatccctttatcatcctaactcgcaaaaacctcctgaatggtttctctggccagagtttcttctctatcccagccatgtaccccacaggtgctggagtgatctttcttaagtggatatcttaagctgtttgggtccagctccagatcctgctccttttgatcctgctccttttgatacccttttttattccccaccccagggtcccacatcacactataaataattccagtctggctcttatgttgtatttgcttggttacttgtatgtgcctcacattaaataaactgtgagcttctcaaggacagtaattttgtcatcctaggccctccaggccagcaccaagcacctggtagacccaataaacattgaatggctgacaccttcttgctcaaaaatctcttctgggtctccatgcacatagcagcggttctgtagaactcacaccaatcactgctgaagaaccacaggattatcccaagaaaagcaaaaagactacatttccagaa

SEQ ID NO: 533 - DNA, 4001 bp, Homo sapiens
tagaaattaagtggtttgggctgggcgcagtggctcacgcctgtaatcctagcactttgggaggccgaggcgggcggatcacgaggtcaggagatcaagaccatcctggctaacacggtgaaaccccgtctctattaaaacaaaacaaaacaaaaaaaattagccgggcgttggcggcaggcgcctgtagtcccagctactcgggaggctgaggcaggagaatggcgtgaacccgggaagcggagcttgcagtgagcccagatcgcgccactgcactccagcctgggcaacagagcaagactccgtctcaaaaaaaaaaaaaaagaaaagaaattaagtggtttgtccaagctcacacaattcttaagtgttacaaccctggcactgtggatccagagcacaagctctcaaccatacgaggactaagctctaattttttatcttacccaaattcctttctaaggggtctggagagtcatgccctacaaaccataaattctcatcagatgggttttatttaaccctgtatatcgtgacttactttccaatctgactctggcctaacaaggaagaaaataaaaatgttttaccccaaaatatatttccttgtcgtaccttaaaactcccctgcaaagtctcttgcaggaaaaatctgcatttggtgagaattcccatctccccttgttttccctccttccttcccagatccaggagataatcaactaagagccaggcacccttttaagtccaatataaaacaatttacaacctgctctctctaaagtctatctaagagcttcctctgcacaataaaacttggtctccacaatcctttatctctagcctgaacattcctttttatggatcccaggtctttagataacctcaaccagataacgtttacatttaccgattgagttgccccgcctttctaaactaaaccaatgtatttcttaaatgtatttgatgtctcacgccttcctaaaatagataaaaccaagctgtaccccaatttccttgggcacatgttctcaggacctcctgaggactgtcactggccatggtcacttgaatctggctcaaaataaatctcttcaaatatttttcagagtttgattcttttcatcaacccatatctatacctttttacaccaaaaacatgtctttgcaaaattacagttattgggaataaggcttttaacctaatctggggactatcaaatatactaataaatatttttcttaaaaaaattctttgtttaaactgccagattccaacttccagaaaaattccaacagaaatgcaaccgagggtctagaattactatcctaaatctccgaaaatgtacagggggtggcgggcggggcagggacggctctaggtgagcaggaaaaagcttggaactcagtcttccaatggcgaaagggaacgtgctcctgctgggcgggacggcggacggctggcggcggcgcggcctccaattctcgccaacgcgccccgcacccccgtgcactggcgggccctcccctcgggcgttgcctcccacccacgcccggcggcaccgcaccccgaggcgcttcacgtcacggagctgctaggagacgggcggggctccggttccgggtagaggcctgggacacggggaactgtaaggatgggaggaaggccgcgcaggggcaccagttctgccgccgcggcctagcgccccaggtcccggagaaggggcaccagggcggccaggggcccaagcttccggggcacgctcacccgcgcaggactgaggccgcgtccgctcccgctcccgctcgggccgtctcccccttccaggctccaggccaggcttccgcccgacaagccctgacccgctcgtcaggactgcggcccggggttggtggtgcggagcggagcggagcggagcgtagagtagaatccacttccccgggttttgggagggggccgcagcccgctttccgggcggcggggaggcggggccaccgcgggggcggagctcggctgggagccggcagtggcttgggagggagggagggagaaggagaggggcgggaaggctcctcgcgttttccacgcccccgcccagctctgggctggtggtaaatctcggaactggtccgggctgggcgagttctggacggaggggcacgtttgggaatcctcttggaagaatttacgtaatcgaatgggctgggactggtggaaaagagttggaccgtccggaaagaagcaggagggcggcgcgggggcctggcacccttagaaagtgggaagtgtgagtgtaaaagggaggggcacttctgcccgttgggcccaaaaacccttttctggctttagctagtagagccactcaaaatttaaacggagtcagcttgatgtggcatatatgataagctggataatatttcctgcaccaccgcacccctccccccaccccaacaccaacaagaaaataacacaagtcacggttcttgttccttgtgggctgacatttccctgttttgccaacctctggagccacgtgtcccaagcagcttgtagttgagaagtgatgggggagaggagacagcacgggagaggaaggagggaagccagcttatattcaggtgccttaagtatttaaaaatattttcagtgtaatagtcgatgcattcaaaagagcatatttaccaaatatgtaaaatttaaagtatgctaatgaaactatcactccaccacgttatcagtatttagcatgtatctatgcatctccaggattctactcctggcctcttagctcaccaccactatcttcagttttgtccctctttgccatttttagtggttttatcatatttggatgcattcctgtgtattggtgtatttttcttctttttgagctttataaaaatacatatagcctggaattcgctttttatcactcaacatttgtttttttggttcatccaagttgttacgtgtagtaacagaacatttatttcttactgcctagtcaaaaggaagttttctcctgtcaggaatgtattcaatactgtagcggataggattataaatgcactttaagtattttctttattgatgggaaccacacagactaaatgtatcagacttcccaagttcgtaggtcacatacctataacagaactcttttcctgggttttgtgacatttctaattgttgtaatttcttttgccattataaaaattagtcacttttgaacctaatttgtattcatcattctgaatctttttctttaaaagcctcctcttttccaattatataagctcataccccataaaacctgaatctgcccctagtaattactaataaggctagtaggagcattcttgttcaccttctgtgcatgcgctggactctaatttgaacctaggattagcactgcggcatcagaggctatgggggctgttcagctttcaaagataaagcagaaatgttttcaaagtggttgtaccaatctatactgccaccagtaccgaccacaattctctctaaatcctcgttattttcacacttcttactttttgctagtctacccagaataaataccatgtttttgtcttaatttgcattccgtaattactgataaggctgagcactttgaaatatgttattcattcatgttttctcttcctcttctaaggatgtgtgtgtgtgtacatatataaatgtatatataatgtatatatgtatatataatgaaacattcttttgttaattgtaggtgttgcagatatcttctccctgtttatagtgtgttttcaaataaaaaaattttttgacttattttgaaaaaatcaaccttatcaaaaagtttcagaattaatgaactcctgtatacccttcacataagttcacagtttgctatatttgctatattagtgtgtaggagagattatatatataaaatatgtatactatagatatatatttttttctgaaccatttaggagtaagttgtagcatgtgt

SEQ ID NO: 534 - DNA, 4001 bp, Homo sapiens
ggatgaatgataactcattttccctggcattctcctcctcattaatggacccaacctcaaaataactcccatgctatttccattcccttccattgtttgaaaacaataaaaaagttccagacttacctccgcaagaaacttaatttcccaggtctcttcctagcacaagtttcacagccagcagcaaaacaaaaacaaataaggaggggaaaataattaattttcaagttttactttgaaacctcagaggcccatagaattagacaatctcgttgcaaaagtacacagacaagcctaaaaccatttagagaactcacccccaacaagtctccaggcttccctaactctctattagtcaatttacaaaaacaataccaactccaagaatttccagtctcaatggcttgcggcaagacagctcccaaatttaagaacttctgggaaaaccaattaccctctggcagcttctcatcttcctccacaattccttattcctattttgttacaatattaacgttaactttcacctttagaaaaaactgggaggaaagtggttacagcagaccagcactatcctccaaattctacatttggccctttcccttaactagcacacaatgagaacaaaatatctaatggcgcagcatccactcatacgtctatgtttcaccagggaaaagtttttctacatacagtatccatgttaccccctcccttccagacttaaaacagcaaaagggtctggaaactacagcactcatttaattaacctgtctagatgccactctatcttttctctttccctcctcagacttccagagcctccaccttagcatatagggttccaatatagccatgtctgctcccccactcttgtattgctaatgctaaaaactagaaaagtcctttgctcctccacacttgggcgacaccggcttccccattttcccaagcaggaaaaacaagggaacagtaagctagggagtcttttggaaaacaaacccagttgaattctcatccaaccccaattctgcaaacccacatgaccattcccttctgcccttcccaccctcttaaaagctaagggcctggcaattagaattggctgcaactgatgctgcttaactctgttctctcctcctctccaccggggaaagggaaacccccgaacctctatcacccgtgcagctccactgtcctatctcccattccactccccttcctcccaaactttcttcctcccagtctctcactttctccattacctcctcccaccgacactctctccattccccaagcctccgttctctccttttccacccaaattctcccctaggcccttccccctcccacctccaatttaacactttcgaagccccccagaaacgtcttaactccaattctgacctttacccacctcctcgcaacacccctcatcagagtccagtcctccctccaaccacatgccacagcccccttccccttcacaccctcagcctctccctcctgctcctacccccttcaatacgagcggatcgcagccccactccccacctcggcctctctaatacccctggctgggcccagtctcagcccttgtttacgcccctccccatgccctcactcctccgtctcgacccctgccctctcccgcagttgccatctcccctgcacgcccccctcggcagctcccctcccccacctctcagcgtcccgtcacctccctctcttgaggttctcaggctggacgtcgccaccgcctccccctccactttccttccccaagccctttgcggccccgcccggccccgccccgtcccgctcgactccctctccccactccggccgcccctccgcctcactctcggctcaggctcggcgccgccatgttggatccatccgcgccgctctcccgggcctgcctcacggcgccgcatccgggctccagcagccgccgccgccgccgccgccgcggccgtgggggaggggacaggcgggcgggggtggctgcatcctgaacggcgcctcccggaacccggccggttagtggcggcttcgaggccatagtgagacatgagccggagtagccatagtaagtgagggcagcctggcagcggcattaatcggggagtggatagcttcacttcgggaggagagatagagattggcagccatcttgctttggggcaagctggcaacgccggtttgtcttgacggctgcttagggcggtaataagggatcgaagaggatagcattcttgaatgggaaacattggtggcgccacagctggctggtggcgacttcaagacccactggaaggctgggattggcagccatgactcataagggcggaataccacggggatcggtttgtctggcgaacttgagtgaagggtcaagatctggatttcacctttcctctgagcttcctgataacccggacgttccgtaaacccggatccggagccgaaagtggtgcccagatcccgtctcggaattcatttgttcagcatttaccttttgaacgccggtttcctgtaggaagtgtcgcctagctgatccgtgtagggctgttgggaattgggggtggggaggatggtgcgggtacgttctggtgtggcttaagaaagtggtaatagataggggaagaccagattatgcgaagccttgtaaattaattgatttttatccttaaggcaatgaaaagtctttgaagaatctcagcagaggtgtgaacaatttcatttgcattttagatcgctgcgtgcagtgtgaaggatgaatgaattgaggagaatcaaggagagcagttgtgaggctcttttccaggcaaggatgatgatggtctgcctgtggaagggagagtgcggatggggagatacagattggtttaagaggtacgaatgttgtgacttggacaactggggaataatgataccagtttctttctcgtttaggggggagataatgagttttaggtgcccctgggatattagctaatgtgggttgggaactcaaaagaaaggtttgaggtgtgtgtgcgtgtgcatatagatagctgttgaagccatgaagtgggctggagaggatacctgcatttgcgggataggatgagggaagccgaaaagaacactgagaaggggcaaaccgaaaggaaagaagaaaaccatagagaactatcaaggaaactggtgaaagcgtttagtgtaacagagatatagtaaaatgctaactaaaatatatacatcagggccgggcatggtgactcacacctgtaatcctagctttgggaggccgaggcgggtggatcacttgaggccaggagttcgagaccagcctgaccaacatggtgaaaccctgtctcttctaaaaatacaaaaaaaattagatgggtgtggttgcacatgccggtaatcccagctacttgggaggctgaagcatgagaattgcttgaacccaggaggcagaggttgcagtgagccgagatcgcgccactgcatttcagcctgggcaccagagcaagaccctgtctcaaaaaaaatgaaataaataggccgggtgctgtggctcactcctgtaatcccagcactttgggaggccatggcgggcagatcacctgatgtcaggagctggagaccagcctggtcaacatggtgaaaccccgtctctactaaaaatacaaaaatcagccaggcatggcagtgcgcgcctgtagtcccagctactggggaggctgaggcacaagaatcgcttgaacccaggaggcagaggttgcagtgagctgaggtcgtgccactgcactccagcctgggtgacagagtgagactctgtctccaaaaaaataaaataaagtaaataaaatgtatctatcagatattgcaacaagggccaggcacagtggctcacacctgtaatcccagcactttgggaagcctaggcaggtgaatcacttaagaccaggagctggagaccagtgtggtcaacatggcaagaccccatc

SEQ ID NO: 535 - DNA, 4001 bp, Homo sapiens
tgtcccagcaaccctccaagggcaacatttagtagacaatgtactagaatacagccttccatatgttaaaaaaaaaaaatgtttcagagctgaccaagaagactagacaataacaaaccaaagctgggggattgtcccaagacatctaaatctccttctctttcacctcctatctccaattaactaaagacagtgattacaacagatctcatgcactcagatggatgaatgataactcattttccctggcattctcctcctcattaatggacccaacctcaaaataactcccatgctatttccattcccttccattgtttgaaaacaataaaaaagttccagacttacctccgcaagaaacttaatttcccaggtctcttcctagcacaagtttcacagccagcagcaaaacaaaaacaaataaggaggggaaaataattaattttcaagttttactttgaaacctcagaggcccatagaattagacaatctcgttgcaaaagtacacagacaagcctaaaaccatttagagaactcacccccaacaagtctccaggcttccctaactctctattagtcaatttacaaaaacaataccaactccaagaatttccagtctcaatggcttgcggcaagacagctcccaaatttaagaacttctgggaaaaccaattaccctctggcagcttctcatcttcctccacaattccttattcctattttgttacaatattaacgttaactttcacctttagaaaaaactgggaggaaagtggttacagcagaccagcactatcctccaaattctacatttggccctttcccttaactagcacacaatgagaacaaaatatctaatggcgcagcatccactcatacgtctatgtttcaccagggaaaagtttttctacatacagtatccatgttaccccctcccttccagacttaaaacagcaaaagggtctggaaactacagcactcatttaattaacctgtctagatgccactctatcttttctctttccctcctcagacttccagagcctccaccttagcatatagggttccaatatagccatgtctgctcccccactcttgtattgctaatgctaaaaactagaaaagtcctttgctcctccacacttgggcgacaccggcttccccattttcccaagcaggaaaaacaagggaacagtaagctagggagtcttttggaaaacaaacccagttgaattctcatccaaccccaattctgcaaacccacatgaccattcccttctgcccttcccaccctcttaaaagctaagggcctggcaattagaattggctgcaactgatgctgcttaactctgttctctcctcctctccaccggggaaagggaaacccccgaacctctatcacccgtgcagctccactgtcctatctcccattccactccccttcctcccaaactttcttcctcccagtctctcactttctccattacctcctcccaccgacactctctccattccccaagcctccgttctctccttttccacccaaattctcccctaggcccttccccctcccacctccaatttaacactttcgaagccccccagaaacgtcttaactccaattctgacctttacccacctcctcgcaacacccctcatcagagtccagtcctccctccaaccacatgccacagcccccttccccttcacaccctcagcctctccctcctgctcctacccccttcaatacgagcggatcgcagccccactccccacctcggcctctctaatacccctggctgggcccagtctcagcccttgtttacgcccctccccatgccctcactcctccgtctcgacccctgccctctcccgcagttgccatctcccctgcacgcccccctcggcagctcccctcccccacctctcagcgtcccgtcacctccctctcttgaggttctcaggctggacgtcgccaccgcctccccctccactttccttccccaagccctttgcggccccgcccggccccgccccgtcccgctcgactccctctccccactccggccgcccctccgcctcactctcggctcaggctcggcgccgccatgttggatccatccgcgccgctctcccgggcctgcctcacggcgccgcatccgggctccagcagccgccgccgccgccgccgccgcggccgtgggggaggggacaggcgggcgggggtggctgcatcctgaacggcgcctcccggaacccggccggttagtggcggcttcgaggccatagtgagacatgagccggagtagccatagtaagtgagggcagcctggcagcggcattaatcggggagtggatagcttcacttcgggaggagagatagagattggcagccatcttgctttggggcaagctggcaacgccggtttgtcttgacggctgcttagggcggtaataagggatcgaagaggatagcattcttgaatgggaaacattggtggcgccacagctggctggtggcgacttcaagacccactggaaggctgggattggcagccatgactcataagggcggaataccacggggatcggtttgtctggcgaacttgagtgaagggtcaagatctggatttcacctttcctctgagcttcctgataacccggacgttccgtaaacccggatccggagccgaaagtggtgcccagatcccgtctcggaattcatttgttcagcatttaccttttgaacgccggtttcctgtaggaagtgtcgcctagctgatccgtgtagggctgttgggaattgggggtggggaggatggtgcgggtacgttctggtgtggcttaagaaagtggtaatagataggggaagaccagattatgcgaagccttgtaaattaattgatttttatccttaaggcaatgaaaagtctttgaagaatctcagcagaggtgtgaacaatttcatttgcattttagatcgctgcgtgcagtgtgaaggatgaatgaattgaggagaatcaaggagagcagttgtgaggctcttttccaggcaaggatgatgatggtctgcctgtggaagggagagtgcggatggggagatacagattggtttaagaggtacgaatgttgtgacttggacaactggggaataatgataccagtttctttctcgtttaggggggagataatgagttttaggtgcccctgggatattagctaatgtgggttgggaactcaaaagaaaggtttgaggtgtgtgtgcgtgtgcatatagatagctgttgaagccatgaagtgggctggagaggatacctgcatttgcgggataggatgagggaagccgaaaagaacactgagaaggggcaaaccgaaaggaaagaagaaaaccatagagaactatcaaggaaactggtgaaagcgtttagtgtaacagagatatagtaaaatgctaactaaaatatatacatcagggccgggcatggtgactcacacctgtaatcctagctttgggaggccgaggcgggtggatcacttgaggccaggagttcgagaccagcctgaccaacatggtgaaaccctgtctcttctaaaaatacaaaaaaaattagatgggtgtggttgcacatgccggtaatcccagctacttgggaggctgaagcatgagaattgcttgaacccaggaggcagaggttgcagtgagccgagatcgcgccactgcatttcagcctgggcaccagagcaagaccctgtctcaaaaaaaatgaaataaataggccgggtgctgtggctcactcctgtaatcccagcactttgggaggccatggcgggcagatcacctgatgtcaggagctggagaccagcctggtcaacatggtgaaaccccgtctctactaaaaatacaaaaatcagccaggcatggcagtgcgcgcctgtagtcccagctactggggaggctgaggcacaagaatcgcttgaacccaggaggcagaggttgcagt

SEQ ID NO: 536 - DNA, 4001 bp, Homo sapiens
gaccagcctgggcaacacggagaaacccatctctacaaaaaatagaaaaatcaaccaggcatggtggtgtgcgcttgtggtcccagctacttgctttttcttttcactgggcaaatgaatgttgagaagaaaaactaaggaaatactatatataaggaataattgctcatgttcaactcaccgtttcctcaatttaaaaaaagtgtgtgtgtgtgtgtgtgtgtgtgtgtgtgtgtgtaaacggggggctctcactatgttactcaggatggtctcaaacttctgggctgaagcgatcctcccgcctcagcctcccgaagtgctaggattacaggcctgagctaccgtgaccggtccccgtttcctcaacagaggttaaaaagctcgtgctctggccgggcacggtggttcacgcctgtaatcccaaaacttcgggaggccaaggcgggcggatcacctgaggtcaggagttcgagataagcctggccaacatggtgaaaccccgtctctaactaaaaaagatacaaacattagccaggcgtagtggtgggaacctgtaatcccagctactcgggaggctgagacagaagaatcgcttgaacccaggaggcagaggttgcagcgagtggagatcgcgccactgcactccagcatgagcaacagagtgagactcagtctcaaaaaacaaacaaacaaacaaacaaaaaacaaacacgtgcagtctcaaaaaacaaacaaacaaaaaacaaacacgtgctctggaagaggcaaccgaatgcgcattagaatccccctagcatttagtcacgcgttcttatttcattttttaaaacagcgataataccaaccaagtagaattaccaagaggatgaaattgggtaatgtttgtaaagcattccacacaatccctagcatattaggagtagcctgggagagatgagcattctctatgtaacacagaaggcccgaatcctctggagagttaaggcctctcaattagctgtcaggggaccagcaggccacgccacatattttccttatttggcaagtcttccattttcagtcttttcatccacaaaaccgagatggatgaaaaatgcctacgaatccgccgttcttacgtcccaggcttgtcgtgaggatcaatgggacaagcggcgtgaaccgaccagggcccatcaagtccgagaagccccggggggcatatggagggacgccggcccccttaacgggcccaaggccgggactgcggccgcccccgccagtactgcccgccggcgcccgacaccctgagcagggctcgctggtaggcccaaggatgcccaggaccacaccctgcctagcactcaggcagccccaaggccggcacccgctcacctcggcccgctccggaggagagggagtggtgagaggaaagggcgcccacctgagggcacaggaatcttctagcgaaaagatctactcaaggctggcacagccggggacacccttcgccccaaccggccggcgtgggcctggcggggactcccgcgctcggggacgcgcctgcgcctcttcgcggaagggtcggagctgcgcggctccgaggacccgtccctccccccgctcctcgcccagcctctcccgcgctgacccgcgggctggcggcccgagcggcgacgggacgcgacggggagcaggctgctaacgggcctccggcgcccacgaccgcgcagggcccgcgaggggagagcgcgccccggcgccgggaggccacgcacgcacataacggggcgcccgctggccctcacccaggatctcccggcgccggtcggcgtgcggctggtcggtgtagacccactcgaagtcttcccgcgagacgcggctccccatggcgacagcggtggcttgcagactagctgtcggctctcgctcccagccggctgctcagaggtggcggcggcggcggcggctccccggctggtgtggtgtcggccggctgtggcggagcgcggaggagacggaggcgtgggcggagtcccgaggccccgccccccccggcccgcccgcctgcctctctgggtggagggcgcgtggcgctcccaggcccccgtgcggggccggctctcagcgattctgggacgcggggttctgagcttcggtgactcggccaccatccaggatgccgcgttcttgcgagtgcccgcccctgcggcctgctgcgccggagcccggagaagatgaaaaaggaaggaatggtctcaagtgagataaacctgccgccctaacgcctccgcgaggggagcaccgggcacggctacggtcacaccgagtctggaggccccggagcccttcttaaatggcagctggcctaagttttgtttaatttttaaaaagcaaattagccattgagtcatatttcgctgccttctggaaataatacctcagggaaaaaatgcagagtgcgtgacaattaaaagctaatcaagtaaaaagaaaacaccattattaagagggggtgatgatgtgggatttgttgttgtgcttgaattattctagtgtgaccacttctgttaagagatgattgctcaaccttgcatctacctgtcgcagaagtaatcaaccacaacctcttcctgaaagaaaggttttgaaacgaaactaattttgtttcaacattagttaccacgtctacatcaaagagcaacttaaagattacaaaaagaagataaccaaagcaggtgtgcctcctagtcaaagaacatgctgtgcacgcgcacacggcacacacacacacacaaatctgatcgagcccctagatctgactgttaatttatagaaaatagaaaggacatttggccgggtgcggtggctcacgtctgtaatccttgcactctgtgaggcagaggcgggtccatcacctgaggtcgggagttcgagaccagcctgatcaggatggtgaaacccccgtctctactaaaaatataaaaaaattagctgggcgtagtggcaggcgcctgtaatcccagctactcaggaggctgaggcaggggaatcgctcgaactgggaggcagaggttgcagtgagctgagacggagccactgcactccagcctgggggacagacggagactccctctcaagaaaaaaaaaagaaaatagaaaggacagaggaatgtgttaaactaggccgtggggatgaaactagcaagatccaactctgggagactatatgggacaatgtctgggttctctaataaatgaaactcaaggcaaaaaaagagaaacctgtagattaaaaggagtttaaaagacataccaaccaattgcaacgtgttgacctcatttagattctgattgaaatagtttaaaaacattgacatgaaataattgaactcagatatcaattggatatgtgatgatattaaggaattatgaatttcttaagtgtgataatagtattatggttatagtgggttttgttttttttgagacagagtcctgctctgttgcccaggctggagtgcagtggtggcctcatgtctcacttcagtcttgacctgagcttaagccatcctcccaccccagtctcccgaggagctgggatcacaggcgtgcaccaccatgcttggctacttttttgaatttttgatagagatggggcctcaccttgttgcccaggctggtctcaaacgcttgggctcaagtgatctcaaagtattgggatcacaggcatgagctactacatccgaccccaggagcattattaataagtccctaagaccctctcagtacattcacttctgaaatagagagggccagcacggctgagacatctagcagagaaggctgtgagagcagaggggagacagaacagtgacacctggagtggaggcctgaaggctgatcagagcccagcgagggtcatgtctgcagggcatgctagcaaatgcgtggctgggtcagcctccagagggtcccagtctcgaaaaaggagtgggatttgatgatggatagataca

SEQ ID NO: 537 - DNA, 4001 bp, Homo sapiens
ttcttaaaatgtatttactgtacttatgcatatttaaagtagcaaactattcatagctctaaggctagcaacataaaaagccttctttttatccattatctttggagaaaccagccatctgcttccatgttagattttcccactagaaactgtaagtttactttgcttaattcagaagttattgacttttttactaacttgccatatttgcaaaatttcaaagcaacattggttaaatttcaaaaagtgaactgaaatatactgagacactttttcttcataacattgctgtttaaatctctcgttccatcataaggtaaaagattaagtctgttaccacaacggccaatgtgttaatatctcagttattcctgctaacaagaccttagtgcctttgtacattggctgtatttaatatgtacttccttcaagaaacgaatgccagctctgactttaaaaaaaagcatttctttttttggaagcttttcttataagatatgaatctggaaacataggaagtgacaagacatataaattaacatgcaaatatacatttttttagcctttccgctattaacttgtttcaatgggaataatctgggctcagatgacttcctccctcttaaaacaattaatgtcaagaagcatactatttttactcacttaccctgcccaccatgatgtcaaacacactgaagaaaataattctattacataatttccctctttccctaatattctttagaatttctcttaggtgtaaaagttaaatattgactcagttttacttctgtgaaattcaaacggcctttcacaataatacaaatatacatggcattattttaaactttttgagaaggagatagtaaagggtgggtaagcgaagtaaaaaggaattctttccaaagttaagtttcagaagaaaaatataaaactcatgcctctaagatacctagaaacaaaatcaccaccgttattaaaattgctttttacctaatctcctgagcaaagtagtcgttgataaatactttagcacacacataaaagtaccctctaattggataccgttttgcaagaaccatgcatctacagttgctgcataaagaaacaccagagaccaatctaattttataagcagaatcataagaaaacatccaagacaaaagtaacaaacggacttaagaaaacaccggttatatttaatgctcagagagcactcggaataataacctcttaacctcaacgctgactccctcccggacaccacacgcacacaggcagccccaggagagtcacatctgacacactcgggggaagcacgagaacccctcagcggcggtgtcaggggccgcccggcctcccctgtcccccgaaaggcgggcgtcgacaaggcgctagtggcctctccgggaggagccgcgccaaccacggagggccggggacgcagggcgggcaggctttgcggcctagcgccgtcccgccggccggccagaggcttgggggccggaccgcacccccagcccgcccggccaacctcggccgcccggggagccggttgagcgcggaggcgcggaggagccgagctggcctgggaggggccgccgagggacgcccgcccccgacgcgcccgggcccccccactcacttggtcctgcagtccatggttacatgtcggtgtggggctgtccgtccggcccccgcgcgctggcctggaagcccgcagcccggccgcgcgagggtcgcgccgtccccgcccacgccggcggccacacagggaaagaggctgctcacagcagccgtggcggcgggcccatgtcggctgcgcccccggcacttccccgcctcccaccccacccaccagagcctttctgtgacagcagcggtggcgtggccgccgcccccgtctccgccggtagccgccaccaaagctgaggcctctcagttcctgcgaccggggccgcccgctgcggctcctgcaccttcttgcaaatcaggaagtcgccgggagggggaaggggcgcgcggggacgcgcccagcggcttcacctgggccgtgcggctcgcaagtcggagactgtggaggaggcgggggccaggtccccgcgcccgggcggccagagggtgcagggggagcgctagtgcctgctgggatggcccacgtaccgctttgccacctagccagaaaggcaaggtgccccctgtgtcctcagcatgaaccaaaccggcttcctttctgggtccagtccagattccagggcgtcggggctgcaaccccacaaagggcgaagtacctggaaaagtacctcgacctgcagtgttttccacacacatacacacggacttgggttcctttcatttcatactacaaattcagagctcaagttgatgcccctggctcttgcgtcactccagctgtggcctgcttacagctctctgaaatccagagctaccccctcctgattcaggaatgttcagacatgtgcacctgctaaatagccctgtcaagtagccaaatggtagtgccccacttgtctgcgcatgtgggaggcagacattcctataccacagactgcagtgataaccaaggactaacttttgaacacatgtacatagtcgcaggcctcatagtctggcagtttaggcgagttcagagagggcaccactgaataagcgtgggagggactgatttacacagccctaaagcacatgtgaagcaggttatgtgcactctcacccagtacttgtcataggtgtgtgatagatactttcatcagcattttacagatgaagaaaccagggagtaatggcaaagctggagttcacaccaggtctatctgatgctgattatttacttctacctcatattgcctgtctccctcctctgctgtctcatatttaggatctactgagaagacaggtagaaaagtcttatgatggacattcaaatgactgtggaaggccaggctcttacacagagatcttctgggaaaggccttctcccagctaacactgccacccttgacacatagccacagtgtttcttccaaaaggtggttacttcagactttattcatgcagaagttaagatgatgagaggaaaccaaatgtggtatgaatgtagtgtgagtcataagacataaaagtcagaaaaggagtcttaagaattaaaaaactcaagagtcagagaacctgaagttgcactcagttatataaccttaaactttcttgccaaaattgggtactacttggtcaacaggatcagaaatattgtatagccatgggcctgttagtaaaaaatgaggacgggccataactgggaaacaaacaaacaaaaaaaaaatgtgtttatcataaagtgttgtcatagcttgactcggggtgagacacttcagtttctcggttcctacatttgtaaaatgggaattattacttgtacatcacatgagcagtgtgatgttcaagtaaaacaggtgctacaaatttgtattatcttttgagaaattattctgtgaatttcagtttcacaattaggcaaactatactacataagttttcttttcccaaataaagatttttctgcataagtgaccatactccaaagccttgaaaaaaaaaattcgtaagctaaaagccacttctgccccaactgttactgaatttctcaaacttctcctttcattataattaattatttccaaagaaaggaaccctacttggggtgaccatattgaggactttttaatttggtgtgaggagataataatacaattgttttcctcatccattgttgggattttattttaaatgacagtcatacccttgaacagtataaaattgttcttcattccatttatgttaagtacatcgagggaaatactacacattcgcatcccaaagcaaatctttttaagtgagcttttaggctgaccataatgaagagatttatctgttctgttattactgaaataaaagggataggaacataggtgtacatgatctac

SEQ ID NO: 538 - DNA, 4001 bp, Homo sapiens
gcctattgtgtagtaggccctcaaaaaacaatgtgaatgtaaggtttcagacctccaagatcaagaaattgtaaatcacagaaaaatttatacatggagtacgtttaaaactcatgttttaaagtagcttcaaaagacccatcctccactgaattgctgaaacatgtttaagtaaaacttctaaagcaacacacacaaaaattacattcactagtaactttccctctactacttcatttaatttgatcttggtatccagtggtctaaaattcttgcctataacttaagactcactacagaccatttaaaagtaatataatttccagctttagaaaactgcttattgtcattaagaaaaataaatattcttcctttattgctgcatttaaaaaacgtactgccacattcaacacacacacacacacacacacacacacacacaccccaactaatgaaagaccaagacacataattactacatttcctggtttctgcctggcaaactcagaacaggcctacaagtatccccagcaaaagcctacaggttacaaaactgccattttcttttttatttcccatctccccgctaaaatccctcgcacacatatccatagtaaagaacaaaaacgtctataataaaggctgtatgaaaaaatatggctatatattaacaatattttggaagatttaaatcttcctataagcagcccgtcaattcacaaaaacaaattaaagtcttgatttggaacaatattcccagcttactttagcaggtatcttaaactacaactatttagctaagacaaagaagtagattatttgattgctacagacttcgcggtaaatgattcagcaacagtgtatagataacaccactgtgctattctagaaaatttcatcaatcatttaaaaataggacacactcaaacaatgggggtcactttgtgggaaaagtttaaacaacttatttacacagtaagcaaggatctatcactttatctaaaacactgcagaagaatcactagctttagggtaaacgtttgtaaagtgcctactatgtaccaggcaagtagtagttgcttcacagaatatacacgctccacacgcacgttcaaatatctgacatttgtagaatactgtcactcatctgatttgaccctgagaatacccataggcatgaacttgccagtttcacagttacggaaagagaggcccaggaagttaatttggccgaggtatcacatctggttccgcgggttctggccctagacttgagccttttgactcataatctaatcatcagctgctatacagctctagttactcaaaagctcttaggtgttccactgtcagacttttaaattaaaattctacttgacaactttcggtattgtgcgtattagatgctgttaagaatcaaaacaccaaaaaaagcaaaatattgtttggaagtgcatcgtcccagcatgtcgaagttcaagctcactggctaattttggagaaagcccgcgtttccccaggctgccgggcgctccctccctcttccccagcagagagcggcgcccagcctaggggtccccaagcccctgaggtagcgaggaggtcttcagccaggctccgccacaacccgtgcggccacgagaggacgtcccaaagctgggcccaacaaccggttgctcctccggacggaggaggtgccgagacagcggggcgcggagacaccacctccgccagctcggctcgcaccgtccgaggactacgccgcggcgccacagccccgcacccgacgcccagaagggtgatgccgacagccccgagagtccgaagcccctgcggcttaaaaccccgcgccgaatcaccccgactcttacctgtctgtacctcaacgttgtctcctgtggccaagctagtctcccgggtatcactcgggtccgctccgtcccgcccccgcaggccctgccgaaggccccgtcccggctgcagccccaccccctagccccgccctccctggcaaggctcagttcttattggctcctattcccacccctcacgctatgcccgcctccgacaccgccccggccggcggtgaggggaaccaccacgcctcaagtccgctgtatggccagaaccttgccaggacctcggtcactgcagttccagcaggcgggcgaccagtgtcaccgtcgtccggccaagccctcgagccagagctccatcgccttcgcctgccgtcgcatcggccccacggagacggccctatgcttcatgtgaaggtttactcttcacaactactcaacaagataaagcctggcttaatcagggaatccaagcactgtttcctaggctgacctcagtgagcaaacaattgcactacggtgccaacttgaaacgtcaagagaagcaaataactctcgcggcacctcaggcttggaatctcagaacgggggtgccttgatactcccagtgcgtgaggtcagcccccacgccctgttgagacacacatgcctaagcgctccgcctgcaacacgctcttgcttaggtatgtgcgtggtgttgtgcctactgcaagctgtaacccagtttcaccgaggctgcgggacaaggatcagttgagcctgtttcccaggcactcgctaaccaccccaccccgcctcgccccgccccaccccaccccaccccacccagccagagcctcttgggtctggtgaccaaactcttcctacatttgttcacacagaggtaccaaaatagaagactaccagaaagagaggtgtttagttacgtatcacggatgactgtcacaagcaaacttaacccaaacaataaaggtagcatatcccaaaccgttgtgaaactatcacctgtagacagtaaaacagaaattacattctatgatgggggaaaaaaaagtaatgacatacttaaaaaaaatcatgtcccaatgaggaaataaatgtggatattgtttgtagtaaattttgcacactgatcattatgggcttcccccaccaaaaaaaaaaaaattcttatataatgtgtctatctatttatttattgagacagggtctctttgtgtcactcacactggagtgcggtggcccaatcatagctcacttgaagtctcaacttcctaggctcaaagaatcgtcccacctcggcctcccaagcagctagtattataagcatgcaccaccacccccggctaatatttttatttttatttttttgtagagacagggtctcgctatgttgcccaggctggtctccaactcccgagctcaagcagtcctcctgcctcagcctcccaaagtgctgggattacagacatgagccactgcacccagcccagaaatgtattttttgacccctgcattcaggaagattatttggcaaaataaggcaggttgaattccaagtatcacgtatgaaaccaaatttatagattaataaatgaattcacatgtatgtattctactgccctctcatgggtaagatggagatatacataatggtagttaatgccctttgaagtctgagaatacagtgtttaatgtagcaatttgtactattttgatgatgaggaggccaaggtaaaataaaatctggttctttaaagggttcacaaatactcaacaaacaaaacttcaacttcagaaatcaggaagagattcttacaccagagctagtacaaacatgccatcagggttacacctatgcttatggctgcatgtgtagaatatagaaacgtgcagaaatttgctttcaattttttttccatttgaaagttcaggctgggcacagtggctcacgcctgtaatcccagtactttgggaggccaaggcacatggatcgcttgagcataggagtttgagaccagctggggtgacatggtgaaaccgcgtctctacaaaaggttcaaaaaagtagctgggtgtggtggcatgtgcctgtagtcctggctactcggaagtctgaggtaagaggatcacctgagcctggga

SEQ ID NO: 539 - DNA, 4001 bp, Homo sapiens
aaagcctctcccacacacacctgactgaagtcccagatctgtctagaacataggtgaggggaccttctggaaccttgatctgggaagctggcccatcccttccagctcagctgctctcaacccaggaccaccaccacatcactccttgtcaccaggatacacacacacacacacacacacacacacactccctcctaatacacaactgtcctggggccagaaaggcaaaggaggaagggggagaatccccaggcaagtggaggatggtatggaagatgaagagggcatatgctcctggccctacaagtgttaggcctcagttcttacagttcctcagtatcaggaagctcctccaggcacaatcaggaagtgcctggtgttggggcaggggtgggtgggaacaactggaatgtctcctctgggctgcagggggcagaccccttccattcacacagatgtcccagggtctgggaagaccaggacagaccaggccagtgctctccagagaagagagaatgtcagcctcatcctgccttctgctcccaccactgcacggtcccaggcctctgccccaaactgtggtctctgacctctccctgatggtgcagatggaatggccagatattggagatctgtgtctagagaggacactacaaagagggaaggagcagggtgtggcaggaggaatggcaacaggaggaagagcagatcactcagaggtcactgcagttcaaagaagggtgcactgacctcactccctgaggtccccccaactctggggcttgggctaagagaggggctcacttggcctcctggcgtgccaatgttggaaagggcaggttgtctgggaatggcccctgctctttgctcctcagacagtaggacctctgggcaaagtatctaagggtcacggctgttcagccataggactggctagtggtaagccacacaaatatttgccgagtgaatgaataaatgaatgaatttctaactgccctccttccaaccccagggctctgctaagaaagaaaagaaggtgcttctttaacttagaagttgacttctaatttaatccccataatcctggacgggggaattatgtccatttcactgttgcggggctgagggaaagggaaggggtgccctgtctgggcgacacgctggaaagcagcagctgcgcaggttctaccgccgctccgctggaggccacactctgaagggcacctggccgagggtgggtgggggtggtaacgtcatcggggagacctgtgtttgtggccggtggctatctgctgggcaggggcaggggcgctggctccgaggaactgggcaaagaccacggaggactcccagggcggcgaggtggggcggggcggcgggcacgccgggagctgaggcagtgcctctgggaggacaccacaaccggggcgctttcaggcacactgcggttgcaccacaagcttcctggatggaaggacacgtggccccggggccccacaacggcttcctgtgtcccgccgcctccccctcgccccctcaggcctggcctcgccgtccccgcccccacctgaccctcttcccctctccgcgcgctccttcccgctcacctgcccccgcgcagcctcctgagtccccttccaactgctcccggatctcgacgccccgtgccgccctccaccgggccccagccgccagccctagccccggctccccggtgcccacgccgtccccccgcgctctccccggccggcactaacccccatggccgcgcttcagtctcaggctggctcgaaggcggcggccgagcccatccatggcccctggagtgcccggctcccgctcccagctccgcgctggccccgcccccctatccttgacctccgcgggtccgacactttcactttcacgcggggggaggcctaggggacaggttcggggcggcgcggcgcaccttccggactccggcccaacccccgggcgcacctgggcgggcccgctctgccctcgccctgggcagggcagcgtggggtggaagagggcgctcgacgcgcgtccgggactgggcggcgccacctcgttcccaccctccgtggggctcccggggaggcttgacttagcgaacaccctgcagtccgcaaaagcgcatgtcctggctgaaatcaccgtcttccaggtggccccaaacgaatcccaaaaggggcagagttttcagtcctcacacctctccaacccctccacctctccctttgcaactgctttagcccttcgaccatctccaggtctcttgccctacttgtcctctcactctcggagttcctgaggaggaactggagatgcggattagggacctgtcgctgccttccattcaaacttggccttgagcagaccagcaaaatgggggtaacccctgccattccacagaaatgtgaaagttcaggaatagaaaactctttgtaggttgttacataatacaaatttaagggactgttattgtcataattgttgcagctgtcccctctccccttctaatcctgaatttcaatgcagcctttccgctcctcccttttcacatcttcattgacttccaaatacgtccaggctgtaaacttcaggtatcaaccatgacattgtgggtctgctcagcccacttcctcctgggagatctgccctagttccccgctccctctcaggacattatctgtagggctgggaagtgcagagtccatctggggttgcttggtttacaaggttttagggtccttttcaggagaggtaggcagagggaagaagggactctggcagaaatacgtctggaatctgttggcctgactcccagacctacagccctctttccatggcctccaggtgactctccagtcaccatgggagagccggaattgggaatccagccctagtattaactgtctggtcttagcccagaggttctaaaagttgactttactccggccgtatgcaattttgcacttaattacagtctgtttctgttccctattctttgtgtattccctcacacaagtacacttcccttccccaagtaccttttctgggctgaacccatgtcttatgcatctctgtgtaagaacagtcgttgctcatgataaacttgtccaattgattgaatattattgtgccttaacttccccgatctattttgtggtattcccaaccaaactaacttcctttctttaaaaacagatgaggaaaactgtgtacatgtgcaccaaaaagataagtacaagaatgttcaagggagtcttatttgaaacagactcacgctggaaataacctcaaatgtctattaatagtaaagtgagtaaatcgcagtatattcacataatgaagtactacatagcagtaaaaataaataaaccactgctgcatgcaataacatggctacattgcacaaacatcatgttgagaaaaggaagccagacacaaaagagtacattatgtaagagtccatttgtataaagtttaaaacaggtgaaattaatctatggtatgagaggtcagaatggtgttacctttagggaggaaggaggaaataatgattgggagaataccatagtgtttctaggatgctgataatgtcctgtttcttaaccaggtgatagatacatggatgtattcactatgtgatcgttctttgcagtgaacacttaagcacttctctatatgtatatgagactttaaaaagatttttaaagtattcgttaggatgttagggtgacattaatgaaggtaatgaaacaggaagaagttagttcagaataaaactagaaattattgggatgggaggaagtggagctaactaagtataatctgcatttttgagaagtgtggataataataggaacaagttaattgatccatagtggaaaatttgggtttaaagtgatgggttaagatggcgaagatgagagcatattatgggtatagcaatgagaattagcaagggtagacatttaaagtataagaaa

SEQ ID NO: 540 - DNA, 4001 bp, Homo sapiens
ctcctcctcctcctgctgaccccgaagcaggttctcccgctataaggcaaaggaaaagacaagtggatgtgaagctgggggcagagatagcaggagacagcttcagagctggtgggcttcctttgaggctctaaagcagtctagggttaagcttctccactagcataggggcgaagggtgcctttgcccatgactctgcacagtttgcattctgggtccagttggaacaactccaaagctgaaacagcccctcctgggtcaactctacataagcttgagttcgacctcagtatcgagatctacatagaaaggggacagggccatgttgaatatagaaaggccctgaaatggcccaggcccctgggaggacaacatcagagaggtaccacatcagagaagagaagcggccagctcagttggcacacctgctaatgagaaggcttcccaaccctctacctggtgaaggatcagacaaggagtctaatgcttgggctcgggcagagggctgtgcctgcccaccagttacaaggctgccccactctttccttcccacacatcccagagaggggattcattctaggagttctggcagaaggtaagcttctctgcagagaagggtgactgaaaatgggatttggaagacctatcaggtcccctaaaaggcaaaatgtctagcctagtttccctgctaggaagcctaggtcagtccctcacaaagaagttagacctagattctgtgggtgataacagagaactggggctgtgctaagaaggaaatggagagcagtgagctcagagctcagggcagctccaggctcaagccccggtagggtagggagaaggaggtggaacccccacccctaccaccttccaaacaccccagtcctctggctggccctgcccctccttcagtccttaccttgggaaattggtaggtgattataggctcgtaatcatcctctgaacgcttctttttgagagaaaccacaagaaggtattcaaagaagtgctgccccccagcaaagttgggcaaagagtgctcctgggccctttctggttcctttaaagcttcccctgaattgtcctggggtggtcctgaaatcaagccagagcccatttagtataatctcattgatccattcctggagtggagtctgtgagaatccgggtgacctccacacctcaaggccgccttgccaatgctgagatacctggatactggccagaaccaccagtcactcaggatcagggccaaatgggcagtttccacacctgccctggtagacttgaaaccatggggagccaagcagaggaaagaaaccactgacacagaagccacggaaatgtgctggagaggccacatggaggccaaggccccagggtaccacagagactgcctaacctgtcgggtgcttctggcagtcctggaacaatatggcctgagagtttagttcatactaagtgaataagaacaggctcaaagggcatgtgactgtgaccacactagccccagagagggcatgaccagctcttaaaaaccagcagaggaagcctcctgacccagtcacatggggaaccatgtggaggccgagatataaaggaagaggaggaaggagcatttcaaggaagaaacagtcccgcctaagagggtcaccctaaaaacaaggaagtaggcagtccagtcctgacctgctcggagttgaagcagtcggcgttggaagagcctgaacacccggcctaccacttgtccttccatctctgggccttcaggacagagcggactcccctctcccctaacacagacagactggtgacagtaagcctgagaaaggggctgcttcggtctccagccacaactctgtgaagccaagccacgcgctgtcttccagagagggaatagaagtttccatcctgtgcacccagtggttgagcaagaaggatgtgacgggacccaggaaggcagcagaagccagcaccaacagagtcagcatcctggcactgcagcgcagatctcagctcctcccaagagccccagggtgtggcgagagaaaaggtcatgagcaaacacctctggctgaaagtagccggaaaggcctggctacttatgggctaagggttttgaatctgggctgcagattgtgcagagagttaatttacaaccttagaacagtggacaatgcttgatagtgtcagactgtgggcactggaaaccggctggtctcaggatagggatcctatacctccaacacttggattgctgacctttcacttctcaacttggtcaacggaagtcaaaaaccccagcaaggccacctgctgaattctagaacttccaggacttcccgacctagagcacatggccaaacactttctgcagccaggatgtcactgccctcccctgattaagataaatagacttggcctaataattatccaaatagattaattcttccaacaaaagaaagagttctggaagtcaatacccaatagccttctttcctgatggtgcagtagagagcaaaatccatctctaagcccagagttcgtgatattttggaaatagctacaatggtgaatttcaccccctggagagttctgtcactggcacttgttccagggttccagcagagtccctcttctcaaataggaagcactggctcagaagactgtccccagcataaggtaggggactgattgcaccagcagcctgagggtgattccatggcagtggaaaacatctgggtgatctccacccaacccccacgcctgctcagccttcctccgggtcaggccaggtcagctgttctgcccaagctacaggcacagctgctagcccactgctgtgtctggagactaggtaagagagaaggaatagcaaaaaaatcaccttggattctcacagaaacccctgaatgagtaaatacagggaaggcttttaccaggaagctgcctcaaagggaaagcagggggcaaaagggtttgacgccagtgtttgccactcctgctaagaataagcacccctctggaagagagtggggtgctaggatagggaaaacagctgctttgctcctaagagctctagacctggcttctgtgggactagaaaaagccaggactcacggccaaactcatgtacagtaaagaaagatgttcaaatgctgtaatgggtgagaagagcgaactagaacacttggagctggcaccacaccttacttgcaagctgcacagacttgttgcacaagccttaccacctgtttgaggaacaagcatcttcctgatacagatggggaaactgaggcataaagtaattcaaaggctattaaaattgacaggatttgttgggaatggggattaggaaagctccaaatccatgctcctgccttctggatgcatttgacatcaaataccccacagaggttttcaaaggacattgagaaacagaatcttatcactgatcattccagattctaatgaaattatgcctttccctaaatcctttgggctgcgttttcagatcattttcttctgctttatcaagcaagccaagagaatagcaaaattaataaatcattgacaaaagaaagtaattagacttttgggatgaggcccaagaaatgcagcaaaagactgttttctcccctctttcaaaaggtgttatccacaggagagaaaagcgtaagagaaaactaacctccatcaaactcatgtttcatataaggcatctcatttaatctccagtgccctagaaaggaattattattcagagttttagttgaggagggagccaccctttctagggaagtcaggaatctggttacacttgttcctccaccagaaagcctctcccacacacacctgactgaagtcccagatctgtctagaacataggtgaggggaccttctggaaccttgatctgggaagctggcccatcccttccagctcagctgctctcaacccaggaccaccaccacatcactccttgtcaccaggatacacacac

SEQ ID NO: 541 - DNA, 4001 bp, Homo sapiens
cccttttaaaggctcaccagttataacatcacagagatcacaatcttttttgtaatagccttccatgacatcattcatgctggccatgacatcataccaaccttacagtcttttcaagggtttctgaccttcctactctagttatgacaccataagaaccttgtgatcctgccaatgttcttaaagagcccactcctaggtttttaagaggaccccatgggtttctgagaaagcccacaaaacccaagctttaagagtcttttcaacgaacccaagtgtcctttctcctagcttaactccaccaatctggcccaaaatccagtgttctcacacctccaggatccttaggtagctcgttagatccaaagcagttgtgagagacaagtcccggccatcccacaccctccaccatggagcccagagacagaaacaggcccacaacagcctagttctcacctgcctccatggcccaaccccggggagtaggagccccaagggtcctgaggcgccccagggtgcagaagctgggaaaaagcctggtgggtagctcgcagcaggggcccagaagcgtggggggtgcttcagaggggaagggaggttacttcctgaaacagtggaggggaagctgcaactcagaggaagtcagcctatgggtgtgtgtggtggcggtggcggtggtggggttaccattgaaggtgccagcacagcattacgccaagttggaatctcagactataggatcctgagcaaggcagaggaggctcagaatggttccaggatgtgcagtcctgctaacctcctgctgttcccccagagaacagggaataaggaatctcatagagccaggctggctttcttcatcacctggcctctggacacacacacacacacacacacgcacacacacacgcacacacgtacacacaccaaccccagctaaatttagactccacttctgggaggtaaagccaggagtcagcgtcagcctcttgatttaattctggggcacagacctgtccctcatccactgagggcgaatgggagccctatgcccaaggcagcaggcagaggccattaggtgggaccttctgaggggcaagtgggtggcacccatccgcaggacctgcgcaccggggcctcccctcaccaagccagggaagagtcctgcagaaagcagccctttctccctagggaagacaacgggcacagggcccactccgggtccccacgcccgcgtgccgggtgacgggaagttcgggttggggcagagggcgcgccgagggggaggaggctgaggaaggagcaggagggcagagaagcaggcgcgccggcggccgaggacgtgacggcagcagcgccggccgccgcgtgacccaagcgggagggagggcggctccgactccggcacccacgggagcagaagggggtgcaggaggccgggcacggcgagctaattgcgggaggtgccctcccctccactttcacttccccaggagagaggaaccggaaccagatgtgcagtgagggacagcagctgggggccatcccccaccccgcctgccgcccgcgctccctcctgcccgtccccgcctgccgcccagcccggtccagcccctacctgcctgtcccgcgcttcccggccggccggcccgctggcgggtggctcggagggcgagctggcgggccggcgggcggcggggctacccggccccagacatggcgcacccgacttgggcgccgctcccgcccgggcagtgagtgaaggaagaagaggcggccgaggaccgcagagcgcggggcgcagtggaaggagatccgggcggtccccgcgtccccgccgcgctgcgccacgcggggactgtgctgccgcgctgctcgctcggccggctcggtcctcccagctcccgcggcgccggggacccagcgttcctccgcgcgccccgctttctctactcccccaacccccgctccgggccgcgggcgccgccgctacccccacccctcctcctcggccggcggccgtgaccctggcaagcgtctgcccaaagcccagccgcctgcagcccgacccctggcggctgggagggccccctgcacccaggtagcttcccaccatccagcccgtgcctcaggacactgaccccaggcgacccagagggccgcggcgcgctcccttcccgcctgggtcctgcagtcagatgtggcaagcatgatgtgggcgcaggtgaagtcccgaaggtctagtctacggggacccaggtggctccccctacttccaggtttagggcacagggcattccctttggaccagaaccagaagctctcagttctcttttttgaaaatgacaagagctttggaaagaggaagagaggccaggactgcagggtgtggaatagagcagtggaggtgggggtaaggtaactgcggggctctacttttctcactatgcgggttgggggagtgaggggtgcagaggcccacacggctggtccaagggctggcaacccaatccagaaagagaaaaccttcagaacatgcatggcactgaaggatctgtttaattaaaactaaaatgaatgagtggtgaagagtggagagggtgaagtgaatgcatgcatagtgagggagtgaggatgaaggcttgcttccctgagacctaggagcacttcagacctgtgggctcagccagcaatcacctccttacccgactcactgccagacctagggttgaggaagaggaataacttgtctgatcagtcaaagcccccatctgatgctgcagcagggccctggacagacaggagggcacatgaagtgatttcctgctgccgtggaagcctacatccagctgggtacaaattccgaggctgtggggcccttccacaaagcacagtggtgctaagaagatgcaaaaagcctaatagataaaaagacccatggccctataactccctagatccccagccatgccccaaataactaaccacaccaagggtttgatatgatttttttattaacatataataatatatttaataaaaaatagtatccactctggctctctcctccactgcaaggggaagagtggtgaggaggggctggcactgcccacccctaggcatccggaaaagccctgcttccagggctcccctctacccctgctttccaacaggctctgacctccagacagacggttcaaagttacaagtgctttaggccctcccttgagttcccccaggcccatcccttgcgcagaattcaggggccacctggacaaaccccttgctttttctcattcttggcatccttcattcatgctagaaagaggatctggggacagagagtagagtctctacctgccagggggaagggaggaaaggaatggtggtgggggatggggccaagaagagggatggtgatgaggtgccctcattggagccggtcactgcggaatgactcctccacagcaggatcaggcagcagggcacaggggtcactcagcatgtttagcccttccaggcccagtggctccatgcgcagctcatcttctagcccaagccctagctccaatccagctgctgacacctcaaagccaggcactccggccagggctgctgcaatctccttagagaaacctggagaggagtcccctgtgggtagaagagacaggtgaggaccccatgtcctgtaaacttttccaagacccctcaatctcctactcattagtgaatgtgtcacttcctccttccatttcccatcaccacccacccccattcacctgtgaggatgatgttaggccctgagccatggcgggaacagtgggtcaagttctggtggttgaaggtgtggggatcctgggggccacccattggcccctcaccccctaaaaatccaggcccttcagaaaagccagggggatccagcaccaggctggctgatgggctctccatgctgaactgctccagctatagacatacagacaaatctttaggaagtagga

SEQ ID NO: 542 - DNA, 4001 bp, Homo sapiens
ttttattagaagaacttcattggctgatctaagatccttatttaagatcctgagcttatttaagaaatctggaaataaggaagaactacaatcaatagagaaaacattcatccctgttttttacctcaattaatattaatgttggtagcactgtgcttcacattcattatttcactttaattaccccaattctatgaataggtactattaatttctcatttttcacataaggaaaataaagcagagagattaataaaatgaccaaggtcacacagctaagtgatgaacctaggcattcaaacccaggtgtgattgactctagaaactgatattgagctgctcactctgtactggcctgaggacacagtaataaaaatgacagaaagggactctgtactaagggagattacagaacggctttcctgagatgcagtacagggtagtggctttaagaacaggctctggagttagactagtagggctggtttcccagctctagctctgccactattgtttatgactttttgggcctatcttcaatctctatgcctcaatctccttaaccacaaaacagggacaaaaggacctaacgaatgggcttattggaatgataaaatgatgtaatatatgtgaagtactagtaagcattcagtgcatgttttctttttcagcgtgcttatactactttcatctaatgggttttaaataatgtggcaggactactgattgaggttccttcctgtcctaaattctatccttcatattggtaaatatagccaataacttactaagtagcagaatccatgtaagatcgccataccaggaagatctgaattctagctctgccacttgctgttgatgtgactctagagggcatttaacgtctgtgagcctcagtgtgcacctgataaagtagggctaataatacatgctcgtctgaagggcattcctaagaggaaaatgcttgttattctgcagatcacaacacactttaaaaaacagcatcctcctgggaaaccccttaaggcaagcatgtattagtaacctttaccaatgtggaaacaggctcacagaaggtaggggactcacctaacgtcacataaccagcaccacagtatcctatagaaccgaagacccaactgcacaaaacgcgttaggagtgctgtacgtgcaattcagggaccaccagcagtggttactgatgggtactcagaaataccgttttgaaacaggcagctgttatcctagtgctattcggccgatacatcctgcgttaaattctatgggttcaataaacaaaattgccacattcgggcttgccccccacctaaccctacaaagctttggacctcattcccaattgttccctaattctgaggcgggtagaaaatcaggcgaggtgagcggccaaatcggaatattctaagacgcccccacgggacgccggccacaccaggcacaggagtcgctcctcatagcgagtctggtgcggcctacgcgcggcgcttcctttcggacctgaggcccagaccctcaaaatagagggagcggtgagtctggcaagggttgcatacccgctacttctcctcgccagccttttcactgaacctagggatcctgggactcatccctccgaccgaggtaaaactgcgaacggtcgaggtaaaactgcgaacagtggtgactgccgtcagcccgctgaccggtcccgtctatccgagctgtcttaccagcttggtggcccgataaggcccgggaggcacaccctgactctccataggtctgtcagcgcccggtggcgtccatggcggcgaaggcgacactcaggcccagcggccgcggcagtggcgagtctcggcacaaccgttggccccgccgccgatttgaatagcatagagggctgcgcggattggccgcgccgcgggtcacgtgacgccacagccaggctcgggaaggagtcggcgagggccgctcggctgcgtcctggggctccagtagctggcgcgggctggggtgggctgggctggcctgggaccgcctcgatgggacaggctcgggtttccctggcgctgtttctccctcctgcggtctacggcgaggcggagtcacagagtcctgttttcgtgctcagaggggatgagctctttagttccaaacgaaattatttggagtccagcctttggtttaagggaatttgaaatttgaaaagacaagaaaatacggtttttctgcctggccctacaggatcttcagcagttagcttagaaggcaaagcaacctgatggatatgtgtcgcagtttctctctctgctgcctatcctctctctcagcaggtgccatgattctctgaagtgctaaaatctaggttcagaaccccctaattgtgcagtaaaatggatcattcagaaccccccagttgggtaataaaatggattataggtagtctttcttaagtacatacaatgtggggcttgggaaaggttgtgtacaacttgtcaaattgcttcccttaaactctaccactgtataagaatgttggttatgtttggatcgtgattatacacttaaaatttcactaggatcttagaaaataaatcttcaacagaagtcaattttcaaatgacaaaaactacattccgagagttgaagagacttactcagtcttaggtctccttggcaaagcacagacttcatgcttttaataaataccctgtcaccagtctgaaactatctgatgctaagaatcccttagtaaagtgggagattgcttgagtgatttgaagctgtggaagaattcacttggaaattaaatagcagtttaagaggataggatgcagtaaaaagaagagataaagaaaaatgttcagggagtggtagtgtaggtctgtggagttttccttaatttgggcagaagcacatctattttctaccaggaccagtgggtaggaattttcaaaaacatacttggtaaacaggaacaatctactcaattttccacttatgttaaggaaaagtaaaatgattgatgttacaaaataatgttaactgtttcttacctggctttatgatacattgtcccaggattttcgtttttcttttctttttcctttcagaaggaaatggagatgagactgtggaagccaaaatttatttttgcccagctccccaagttgaaaatcatctcacatacagcctttgatataggtagccacagcttaatagtaccttaataatccactgtggctgtggattcactctgcaccatccactttcacatttatagtgtctttagatgataaaatatttaaaagttaggtttttgttaaatgtgagtggtctgagtttctttaaggtaactttacatacctttgctcttaacaattattcattgattgcatagtttaaatcttggaagtcattttatttcctctcattaccaattctgcgagagtcactttatcatccttttcctaattctcctacattagaatttctcagagtgggttaaaaactacatgttttagaatttcctgcaatacctgttaaaatgctgattcctgggattccccaaatcctgattggggtgtatgtatatatgtgtatgtatgtgtgtgtgtgtgtgtttgtcatgggagggagagtacagggtaaatgtgtagggttggaggaggctgtatctctgaagactgtgcagctgagatgctgtaatgcccatgaactgcctagctgtggacttatatatgaaagaaatatgagcctctgttaatttactcttctagctgaacctaacctaatctactcattgtgatacaatgagtatcacaaaagaaaatgagctctcttcttttgtctgccaccatgtgagatgtgcctttcaccttctgccatgatcgtgaggcgtcccaagccacacagaacttaattcaggtagctggagagataatggtggatgggaggcaggactagattgcagctcccacttggatggaaagagcagaatg

SEQ ID NO: 543 - DNA, 4001 bp, Homo sapiens
aaagaagcccactatatgccaaaacatgcattttcgttttcatataaaaggtaaaactctcttcctctattctcacaaattcttttaggctctgaaaccatggcttctggccactgtatactcctaatttaaatacgggtttgtttaataatctaggagaaaaggcacactgtgatctcaagagcagaatatattctgaaagacagtaatagccctcatgaataaaaaacaaaccaaattcagattagggggatgtgcacagagaaagtaaaagggcagttaagagtcttgaaagataaaggtgttcagctgaacacaaaaagtttaaatccagagaattatttctcaaccagtgacacaggccacagaacttacaaagtgccatggttttctaggatcttttgtttggcttattctcctcttcaactttttctgtcctgttccacttttctcagcatgttaactcatctcctttcatctccaggctcacatcagaattcaacagaggactcatctcaagtggcaggcagttcctacacccttctgacacaattcccagatatggcatgagaaatcccactctacccaagatataataacactgtaaatttagaaacttataaataatacaagggaatacaaagtttagaactgtataagactcttggcctgtagtatttctgctctcctgcatctttaagccaacaaaaataacgacgggcaatttttcatttgtcagtcaacttacaaggaattttaagcactgcagtcagaggtactaatccagtctacagaacaaaaacccattctacagaacaaagcaagcaaacacacccaaacatgcatctaactgcaacgacaattctctaccgggtgcttttttctgggggcatttcactgcaaaaatcaggcaaaccagttcttggactcgattctgcgtgcttgccatactccaaagttagatgatacaataaacaacttcttcccttccctctcccgtggtcacgtcacctgttgcatcacctggaaagtggtcttcagagtgtaggaaaggagcaccaccaggatctctaaataattcagctgggctattttcttgagaaatgttagcctcattcatattttaacgaggttgcctttaacacacaaggaaagggtgtgttggctcctgttcacctttgaagagattctagcacaggcacccgaaagctgtgaccttctggacttagaggggcttgggagtttctgaagacgtagccatggagagagacggacagttcggcagaagcagaggagctgggagcgcaggcggtcgggacgggggtcccggggcagccccgggggccggcaagtggggttggaaacgcaacggaagctttgccgaaaggacactgcacgtcggccaaggggtcgggcccagagccggggtcgggtccaagctgagcggatgggagaggttcaagcccacccgagctttggccaaaaccctcgggctgactgggttcaccggagcgtcgacgagtgcgaggattaaaaaataacaatactccctccttcacccccggcttcccccgagaactaggctggaggcggagacgccaggcaggaagcgcctggggccggggtccgagccccacgggcgagaggaagccggcctgggccagggctcggggccgccaggggccgcactcaccatgtcgtacacgttgagcaccactaactggttagcccccatcctcctccccgcggccgccgcctcgtcctcaagccgctccgtctccgcggggccggaggccgctctcacccccgcgggcgcttcagggggcctgagccgggcactaagcgtacagcccggcccgcggcagccggggcggaagcatcgggcagccgagccgctcccgggcgccgccgacaggagcgtctgtgcggacggggccggaccgttggcggcccgctccggatgaggcacctcccctaggcggcagacacgtggggaaaggcggggcttgagcaaggggcgggcgccaggcgccccgggggcggggccggcccggcgccaggactgagcccgcctgcgctctggttctcggccggcgcacctcgggacctaaaatggcggcaactccggcgcctccgcgtcctggaggaacggggacccaggaagactacagttcccagcatgcagtgaggattcccccttgctactataagtgcagaggcggagtctcaacagcccttcgactacaactccctgcatgccgcgggggccccggtcctaccagaccaggcctccccgggagactacaactcccagcatgcagtgctttagagctgcggcagatcccttgccgcccgcgggcggtgaaatctcctaccttcattcaccctctcatctcaggtgctgctgctgttagtagttcatgttgcgttgagctcgatgaagccagcgaaatgtggcaaaagaccagagtgatgaccctaagttttccaaatgcttcctcaccttttatttggcaaggggagtggtggggaaatagaggaagacgagttactggtgtgggatgaggtgtaacgtgcatccaattaatcctcaatgtggaatttacattttgtgaaactatcctgctgagatgggaagggtacagtaaccgtagcttagcacaatcctgggacgtagtatgcagctctgcattaattcaacaaatgtttgttatgtgcttcctatgtgccaggcagtgttgtaggccctcgggaatgccgtgataaacaggaacagggacatacaaaatatcactggtatgtgctttgcagaaaatttaagtaaggtgaagtcattcttaaattggctgcacggggaagatcgctgtaatgagttttaagctgaaatgtgaatgacaaagccagccccgcagatatgagggggaggagtatttcagtcaaagggaacaaatgcaaagatctgaagcatgaaggagttttctgtattcaaggaaacaaaagatcactcttgctgggacacagtaggcaaggagtcgacggtactagatgagctgggcaggtaggcagaggccagatcccggaaggattttaaaattcataacaggggttgtattttaaacgaagccataagtttggaccagggagtgaaatgagtgtgcgtgtgtttaaaaatgattacttgggttgctgtgtggaaaatggatttcagagaggcaaaggaggtggaaatagggagatgagtgtggcagattgtgaaaatagccacaaattatttccagtctcccaaattatactctttggtggtgtctacccccactgactgcactggactgtgacttgctgtggacgtgggacattaacatcgtgcaagcagaggcttaaaaaacacttgtgagttggggcttgccctcttgctgaacttgggagtcctgtgaccaccattttaggaatgagtgtgggctagcctgatggatgatgagggacacgtggtcaagtcacggcccacatccagctgacaaccaaccaactgcgaacatgtgaagctctcccggactatccttccctggccacaaccacatggatcggacgaactgaccagccaacccacagaatgtgagaaataatgttttaagtcacaaagttttgggggtggttatgtggcaaaagttaatcaagtccaccaattggatgctgttccagaagtgcatgccagcaagtggcttcgttgtggctgatagtggtggagaccgaaataattagagtttaaatattttggagtaaagtctgtggaacttgctaatgggttagatgttgagttggttagggagagaggattcgagaataacttctagatttttgacttggggaactgagtggatagtcctggcacttctaagatgtgaaacattttggggaggagcaggctgggggtagggaaatcaagagctatggtttggtcatgctaagtttgagatgccttttagacatccatgactgccaag

SEQ ID NO: 544 - DNA, 4001 bp, Homo sapiens
tgggattacaggcgcccaccaccacgcccggctaatttttttgtatttttagtagagacggggtttcaccgtgttagccaggatggtctcgatctcctgacctcgtgatccgcccacctcggcctcccaaagtgctgggattacaggtgtgagccaccggacccggccctcaggtgtcctcttaaattctcctatgtgtaaaaatgtcaaaaaatacaccaaaaaggccaggcacggtggctcacgtctgtaatcccagcactttgggaggccgaggcgggtggatcacaaagcaggcaatcgagaccatcctggctaacatggtgaaaaaccgtctctgctaaaaaatacaaaaaattagatgggcgtggtggtgggcgcctgtagtcccagctactcgggaggctgaagcaggagaatggagtgaacccgggaggcggagcttgcagtgagccgagatagcgccactgcactccagcctgggtgacagagtgacactccgtctcaaaaaaaaaaaaaaaaaaagaaaatgctttttgttctttacagtatcttccttagcagcttcttttctaacctatgggaaagtataaaagaagtggaagcttctatcagtagcttttcatatcattatcattggcggagaggctttctccaggacaggtctgtactattccatttagtgatagcaatgcttcaaatactaacgggactggagtgatcagaaatagccaagagactacaaatatccttcagcggtgttgtctaccacccaatagaacagcaaggcatgtatgcgctggactgcagagaacaccagcctctgtgccacgcacatccagccacggcactgaaggggaattagaagtaaagtaatctaatgtcaggaaaaaaaatacataaatgcttatatgcaaaatccatgttaccaaagcatttataatgctttggctgttcatgggtctctgaaaatttccatatgatttctgttggtgactgagaggaagcaactgtgccctctgacacacactgtgactacatgcctggggctggctcacacatgtaacctgtaaaacttctttgggtaagcgatttgttgctactggctaataagacttgtaagtcacttaaatatatcatcttatttgagagaaccaacaaccctttgaagcagggctataaatattatacccaatttgctgatgagaaaactgagggttgagagctggttaagtgcaaggccaagcagctggtaaaggtatggggccgggctcggaacttccgtcggctccgtcacttacaactcacgttccttgtctggacctccagaaatggtcagtagcagctccctctttcctgcataggttcctgccagagcggacggtggaaacccctccccacaccgccgtgggctcagctgggggttcttgtaccatctgagtgtggcggagtggcaggaacccagtggggtccgtttggtccaacatcgaagtgatttcaggcaagagacctaagccgagtctggcttaatttgcacattgcttcctggctgtcttcccaccaccgtggagtctcacacgagattaattacgctcaagcgccttaaatctgtaaatcgctatgcccactcggaccgtttctgtcccaagcctccacccgagatacaagaatccccaagtcgcctctcctgaccccgcctcgcccccgccggacgtcctcacccggccctggctcccccacaccctcgcccggggtcccgagccaacccttgctcctcaggtcttcgaggcaggaggcggccacgccgtgctgttcgcggctgtagttgcggcgcagcagacacggctttagagtccggatctcgccagattctggtaccccggcgtccccggtcacctccatcctccacaaggtgggacctgcccaccttcgagaagtcgcgggaggccggagcggcggtccttctactcgacccccttccgcagcctgccgggagatgtagttcgttccgcagcaaatcacacgtgagaccagggcacgccgggaaatgtagttctagttgccgctaatcacgtgtggcgtcgaagcatgccggaaactgtagtctctgggtttaaagccgctttcgttctatcgcgcgattcagcctaggagttgtttttaacttttaggagctgcattcgcgcgttcaaatataaggccaatagagacttattttgcatgacgatgcacacgcatgtatactgtattgaatttttagagcattcctattcgcatatgagatgcataatgctaatacagacacccgcatgtttccacccattctatttcctgcttcaactgtgcaaattagtttggggtctcagaacaaaacgcttaaataaatatagtaagcattaaagtctcaaatgcatcggagaggaaaggggaaatgcgactcggcactgttggagattgttcagatgcctcttgacaacatattcatctttgttttaatactgctactatggaaaagtttgtttttttcctcctgaaaaataaacatctaagattaaaagaatagtaataaaaatgatcaaaaagttcctctcttaaaagagggcattttatgtaaactagaagtaattatctgctcatatttattcattcgggggacactttccttccttgtttcttttttctttttttgagacagcgtttcgctctgtctcccaggctggagtgcagtggcgcgatgatggctcactgcagttttgatctcctgggctcaagcaatcctcccacctcatattttgtttataaaaacgtgggcaagggccccgggggcggtggctcacccctgtaatctcagcactttaggaggccgaggcggacagatgatctgaggtcagtagtttgagaccagcctggccagcatggtgaaaccctatctctactaaaaatacaaaaattagccgggcgtgatggcgcacgcctgtagtcccagctcttgggaggctgaggcaggtgaatcgcttgaacccgggaggcggaggttgcagtcggcccagatcgcaccattgcactccagcctgggcgtcaggagcaagacttcgtctcaagcaaaaacaaaaacaaaagcaaaaacaaacaaaaaaaacgtgggagaggaaattggatattatctcaagaaaagtttagacatttaaaacagcgtttagtaggaggaattattcattaagtcatcccttttaagcagtctatattgatcaaaacacaactataataggagctggcggttaactctaatgtatgtatcctttttcatataatttcattttttattttcttatcttatttttagacaaggtctcgctctgtcgcccaggctggagtgcagtggcataatcatagttcactgcagcctcaacctcctgggctcaagggatcctcctgccttggcctcctaaagtgttgggattacaggtgtgagccactgctcccgtccaatatttaatttaaaatctaacaattaaaaaaatctaacaattcaaccagtgtaaaataatgacgttttgtagaagcctcttctcttcaaaatgcccccttttatgttctcccaatagacctgcacacttatccgagtcctatccccataatactgtaattgtaagtgtgtttggcctgggcgtgggagtagggattgagtcttgaatgtttttatttcaaggcctaccaaagtccctagcatatagtaggcactcaatgaatggaactgaactgatgtctaaaaattaatttccaagtttcttcgcattcatccattggcaagtccctaaatgtgcccatggcactgtggggatgggcagagattaactcaataagaataatatgggccgggcgctgtggctcacttctgtaatcccaacactttgggaggccgaggcgggcagatcacctgaggtcgggagttcgagagcagcctgaccaacatggagaaactccatctctactaaaaatac

SEQ ID NO: 545 - DNA, 4001 bp, Homo sapiens
caatgtgagagcatcccacgaaccaccacctcgtccttccagaagggtgctcagcccagcagaacagaacagcatctcttcctggctccaccttccccatgaaactgtgcaggccccaaccccaaagccctccctctgctcttgggaattgctaggacacctcaaatgaacgcaaataaaattaaaagattttttgaagaaaaagacgaccaattgaacagctgggttcatgaacgagaggactgaggactctgccacctaagcgacgctgaccagttctgcctccagagggcttcctccttgagacccgagagttcacagtaagggggactcttccccaccctgatgggcacctggagctaagcccccaggacctcggagagtgccagcttcccgcccacctccaaagtccttgccactcacagccctgccaggcctggcccaaggtgagcagcaccagctcggcgttgtcgggaacactggggaagtaatcttccgtcagctccgtgccatcctcgtacaggcacagccgggaaccgcgctcagggagctgcagggacgggagaagcaacaggaggaggaagggtctcaagacgagggctttgcatctgcaggcctcacaaacgaccggaatgagctgtgcttaaagaagcaggctcaggctgccgcctgtatgccacagtcgctccaacgcccaggcaaggatgagggagcgggagcaagggcgcctgactgcgggccgttctaaaatacgaagagtcaggaaaaacatacatcagggggtgactgctggctctgcaggattcaccctttttaaatgagctcctgagggcgcttcaaatagagcctgtctttgacagcgccgcctccctgctgccaggagctgaacaccaccatccccagcacacagccgccagagcggtgctggcacacgaaggagaacggttggttgcctctgtgcacaagtgtgaccggcacgtggcactgttaatttgttggagtccggttccctgttactctgcactggtcagttttaggcattttatggctactcccaccccacccgcaccgaccccggcaatgcacacctggtaaccctagtactggtctaaaaagaaaaccaacctagaataaggtgacgattgcaatccccagctgcgagggctggaaggggcctgcagagcccacctagccaagcctttcatgttactcaaggggaagctgaggccggacaggcagagcagccgtgaccccgcgtgccagtacctggcactctacccgggtctcctagctctgatgcagggctgtcctgcccgagaggtgggaagagggaaggggtgatccaggtcgtcccccaacccccctgcgttctgaagccacgctcaggaaccccaggctgcgggggcccggggtcctagcggctgaggcgaacgaaaactacccgccccgggcgccgcctgcaccctccgttttggaagaggaaaagcggcacctcctattctccccacacgcctccccgacgggccgtccccgcctagcccagcgggcacctggaagcggagacagcccttgcgcagcacctcctggcagctccggccagccacgccgaacttcctcgggctgcgcagggcccgcagcttcacgctcttgggcttctggagcattgcagatgtcctcaagccctctgggtcccacaggcggtggcacctgctgcccagctgctcagatccgtcctcgccctggccgcaggggtctgcacctggtgagctctgcaagctggcacaggccgggtgccgatcccggaaactacattacccagaaggcctgggaaaagtgaggcccgacgcggtcttgtgcgcaggcgtcgccccacggacaccacattaccttactcagaaggctcaggaaagcaaaggcgcgacgccacctggtgtgcccaggtgccgtggccccggaaactacacaaccctgagggccagagtagcggagccctccccttgtgcgcaggcgcggcctggggtggggcggggtcgcgcacgcgcagaggccctggcccagggctgggcttggttgtcatgagagtggaggctgcggccggggctatgggcagaggtggccgggtctgcttcttccctgtcactgccgcagcagcttggggtgcaaggcggcctggggcggcggaaggggcgccccccgagttccgtctgaggaagcggcggctgccgaggaagtccacgagagccgggtcccgcacgcccctggggtccgggtgctgaggcgccgcctggccgcctccccgggccgcggcaccgctccgacccagccgccctctccaccggggccgcggcagcgccagtcggggcccttccctctaagcaggtaccttccgggccgctgcggcgccggcccagggccggagtggggagcggggcgcggggcgcggggcgcgggcgccgcgggggcgcggtccccacctgggagctgggtacgaagcctgggtgcgcggtgcaagcgcggacggtgtggagttagatgccggccttgctgtcgccgaagagccggcgcggccccgtcgtgccgtatgccggggagctcagcacgggtgctgggaccgcctgccccggccgggacggcccatttagcgtggaatattgttttcagatccggcttttcctcttctggatgcgtagcacatagggggccagtttcagatgtgttctgctgagcaaaagtttgaggaaaattgctctgtccctatagagattaaagtctgatggttggttgttttttgttttggagtttgttttgttttgtttgcacttaagttcagatttctctgaagccctttcagtcgctaagatgacttgatcagaaacccataagcctttgagacggtctcgctctgtcgcccaggctggagtgcaatggcacgatctcagctcactgcagcctccgcctcccgggttcaagcgattctcctgcctcagcctcccgagtagcccgactaatttttttatttttagtagagacggggtttcaccatgttggccaggctggtctcgaactcctgacctcaagtaatacgccctcctcggcctcccgaagtgctgggattacaggcatgagccaccgcgcgcagtcacacttaaaagtcttcttaaaaagaaaatcagagacaagttttgtttcctagtcttgtaacaaaatggaagttgctacactgagtttccgtttaatttatagttaattgccttttaccatgccagcactaggaaaagtgtagtgagggatgagaccgccatggagtcatcgctgcctggggagagatgtactctggcatttgtcgggatgtcgatggctgcccctgggacaacagggatccctcatgcctctggtgaggaagaccagccaataactggatgttcaacagagctttgcttcttcccaaattgttaatggtgatttttatagagcctaaaagtggcatccttcagtgacattccaagtatcttatgtaacacttgaaggtttacacagaggggaccctagggtacaactggaaggtctttgggagggggtagactaaaaaaggaatccttttcaaataccagactgaggtaatagcattgcctccacagtccctgtgcatttctcttagctggttcttaaatgccagtactttgttttagatttgttgggggcagtatagcatactggaaacacccttctgtttgactgaaaaggtcctatatttatgtcttcgagccgtaacagagagtgttggttaggttcagagactagccaggctcggcggctcacgcctgtaatcccaacactttgggacactaaggtgggaggagttcaagaccagcctagacaacacagtgaaaccccatccctacaaaaaaaaaaaaaaaaagtagctgtgcatggtggcatgtgcctgtagtcctagctgctcaggaggctgagacaagaggatcatttgagcccgagagttc

SEQ ID NO: 546 - DNA, 4001 bp, Homo sapiens
aaccaggtctcgtccctgcctgaatctgcagccacggagtttgacacaagcccagagatgggagggagtgattaggggtgctgcactgaagctggaggccaaacagagagcccagaaaaaagggcaactaggtcagacagctattacaagccaggtgtgaggcaactgaaccagacctataggggggaagggaaagcctgggaaagaagaaatgtcagagttcaggctctgaaatcgagctaacctaggttctagccccatttactgactagtcttcctgagcacatgactcacactctgaaactcaattttccctgtttgtaagataggcacaagatctaccagggttgctgtgaggatggcaatggcacatggcaggtctggggtagaggctagtccagctgggcccctgttttcctgctcacagtgaatcttgtggcttagccaagattaataggcactcgctaggctgttttgagccaggccctatgggccacaggcgagtcacataacagtccctgcattctaggagctcacagtctgacaggggagacaagcaggtaaatggagaatttgaactcgagaaaagagctaggaaacagggtgcaggtggggagggaggacacgcagaggctctggagccatgactgtgaccagcaaaatccagagctacagggcaaagcacttccagacactgcgttctcccaccaggccccaggtcttatgcctcatgggaacgtctctccgcatccatcttcatgctcttgcctgaagcacccagcgcggagcaagcagaatatggaggctgctacacctacggaagggtggcagcaggaaacagaagctctctgcaacctgatgccaacaagagaggaacataaagagaagcagagggagtcaagaaactgcccaagtccctggatgcagaggaggctccactgtgagccacagcaggtcacaggctccgtgggtgcctgaggaactgagagatggaccgactgcctttgtcaaggagtgagccctccgtcagcagaggctgtgaggttcttccctcccgcttctgggctgggttctaccttcttgctttagtcttctatcctaaacccaatcaaaagcgtcttgctgtacaaaataaagtccaaactcggccttggcatcaaggcccctctccagcctagcaccaaacggacttttccgacgttctcccgcccctgccctgcacttgtcggcttcccagcatttgctcacaccagtccctccacccacacaccttcccccaatcatttcccatacttcccaatctctagacccagctccacctcccggaagcctttccttctctgaaatgcttgggccgggtgagagttacctgagtgcttcgcacctccccctcttccccttcttcatctccctccaggtacccgcatatgccctgcacacagtgggcactttgcctgttctgttcccccgcccccatcacatttttgtttcgttccaacccctctccaacgccagctccccacccccccaggaagtcctggccgcccccgcaccgcagctcccgtcgccacctcgcgtcccgctatccccgcgcacgccgcctccggccctgagtcccggccgcacccggcgccgctcacctgcttctggatgtcccgcacgcgctgctcgtgcaggcgcggagcgctgctgagcttgaacaccacccaggcgcgcacgtagtagtagatatcgaagataagcgagagcggcaggaggaagaggcacacgaacacccagcgctggtggatgagcacgaactccagccccttcaggcgcacccacagcaggaagagcagcgcgcacacggccagcgacacggcgggctccatggtgcggcgccgcgcggtaagcgctgcgggttcgcgcctcctgtcactgccgccagctccgcgcctggcccgctctgcgcctgtagcccacagcccggggagcccgggatcgcccgccgcctcgcgattggctcgggtcgccgaggttcggtgggccgagacccgggcggcgaccaatggcgagccgcgccggggatcggaccaggaacccgcagctttcattggctgcgggagtcggaccgctccacccttttctccccgccgccgcgcgaggcgggggtgccagggactgggtgccggtggggtccgctgcgaatactgggggtgggcagttgggactcagggccccaggccctcggggctgcggggccgcctcttccaaacgcgccttaagcggttttgcagtggctttccgccggagggctgggaggcgccccggccctgagtcagtcaccctttggccggacaggcggttcccgggcgcggaggatggaaacctggcggtaacctctgcaggtcgtgccactcggtgtgcgcaaggtctccagaggcatcttttcatttttagggggcactttccacgaattcatttgagctacacagcagtcctgggcagtggggagtggtgagctccattgtgtacacttggaagcagcccagaaaggtgaagacctgttcgtgaactccagaggccattggaagcatggaaggctatggctggcactcttcctctttttccagttcactgaggcagatgggaggcccggaggagaaagaatgaaggaaggcatttcagcccgagtaaactccccaggcccgctctgtgccaggcagtgttgcaagcctcgggtagggtggtgagcaaagcagatggccctgccctcactcagcaaccagtgtaggggagctgccacggttaccagcaaaagctgaaatccagcgccatttgcatttcatatggaattttaggaagttttcgagatgttttagtttagaagctaaacatgacataccaggttcttctctgtctggccttgcatacctatccagttccctctccattcatctctgccctgacatgcactcaggaggctccctgggcctcagcattcctcatttgcgcgcctctggtcaagctagtacctctgaatgccctttcccatccccttctcagagttcacctcacacattccgaagccagctcagggccacctctgaaacatttagagcactcccctgcccatccagatgctcattaaatagtgtgcatctctgtcaccgttctttcatgttattttataattgtctctttatgtgtctctcacccccacagactgagccttagggcaaacaatgtcttgttcacttttgtccttccagcttctagcacggtgctttgtgcacagtaaacactccagcggctgttgaccaatgaatgaatgaagattgtaggctcaaatattcaagttatcaaagtgcaaagaatgagaggttgtttgcactggacttcaaaaataaatagcctggacctgtactgtcttacacaacagctatgagctactggtatgtggctagtccaaactgaaatgccctttaagagtaaaacacacactggatttcaaagacttagtacaaagaaaaaatgcaaaatagctcattagtaatttttatgttaatgacatgttgaaataacattttgatatattaagtaaaatatagtattagaattaatttcacctgttttatttacttttttaaggtggctactagaaaatttaaaattacagatttgtcttgtattacatctctagaagctccaaccaacagggggacagtgaagtatgaagaggaaagccaatgtgaaaaatgcctctccccgattctgtctgactctgttaaagagggctttgctttagaagcttaaccattctgattattttgggggtgtgaggtaatctggaaagtaaaatttacctaaaaattaactgaagagtgttgtgtaggagaaacagtggaaattactggttaatcagaatagttttatacttgggaagagaaggatggagtcccagaaagtagatacaactgatctttaggaaacaactcccaaaaaaggaaaggaataaaaaa

SEQ ID NO: 547 - DNA, 4001 bp, Homo sapiens
gactggccccaatctcaaacctgtcttaggcagatataatattgctgtgattcctagagaaaaagctgagggaagatttggggaagataggagataatagtcttcaaatgtctgaaagacaatcctaataataattaagaactgctagacattatgctaactgctttatattaatgtctcataaattctcatgataattctacagttgttaaagtcacatgattactaaatgatagaactggactttcaggccaggtgcagtggctcagtcctataatcccagcactttgggaggctgagataggtggatcacctgaggtcaggagttcgagaccagcctggccaatatgagaatcccatctctactaaaaatataaaaattagccatgtgtggtagcatatgcctgtaaccccagctacttgggaggctaaggcaagagaattgcttgaacttggcagatgaaggttgcagtaagccaagattgcgccattgcactccagcctgggcgacagagcgagactccatctcaaaataaaaaaaagaacaggaatttcacccatgtttgtctgcgtctagagcccaaactctttttttttttttttttttgagacagagtcttgttctgaactcttttttttgagacagtcccgttctgtcacccaggctggagtgtggtggcacaatcatgactcactgcagctttgacctgggctcaagaaattctcccacttcagccttccgagtagctgggactacaggtgcacaccaccaagccctgctatttttttaattttttggagaatcggggttttgccatgttgcccaggctggtctcaactcctgagctcaaacaatctgcccacctcagcctcccaaattgctgggattacaggcgtgagtgaccgggcccagctctactgacagatcaaagaatatatcaaagattaacctatttaaatcaagaagacagtacatggaacaatggatcaatgttccagggaaacaaatttcagttctctataaagaatacttagcagtctaggctgcccagtgacattaagaggcctgggcttccagaaaatatcagagttaggacaaaagtctaccagaaatgtagacctggaagttaccattctaagactctttggtttccttgctaaattccacttaacatcatgaattgcacttaacatcatcaactttaataacaggtttttatataagattatccaactgaccagaaggccaaccggtgctctgggccattgctcacctttatgatgttggcacagaaccgctcccaaagtgacagctctccttccttgatccatgacatagttcttttccagtcagaagatcactccagaacaagcaaacaccagccaggtaatcttggataaacaagaaagaaaataagaagtcaccaaggtttgcgaagagctataactgacttctggggaatcagatggactatggagagcagccagcattagaatccaaagacactggtctaagcctataatcttttaccacccagagttttataacgcaatgtgacctctggaggcaaaagcctttcctcggttctcctggctttgcagacttcttcccattcccatttcctccgtatctgcactgacttcttctgaacatctaagtcggtttcctgccacatcatggtgcccacatcttgatcattccccgtttcttccttctccatcttcccctaagctgtttccaactctgtgctcccagttactaactccttcagttatcgcacgcctagtacttcacgcctcagtggtctcctgattattccctcagtcgtccctttgcttctcccgcagctgctccccgcccagtcaccctcttctcctctagttcaccccttcagttcagtggcacctgattagctccgctgggcgcgtccccacggcttcagtgggccggcacttcctcatgacgtggcgctggcagaacacgtcatctttgggcgctgcgacacgccccttccgtcacccaaactgaggggaccctgccctgcgcctgcgcctgcgagctagtgggagggcggttctcagtcccgcggggtgtggaagccggcgcgggtgagagccaggctcacgtgaccgagcggggcgggaggctgggctccaggccacgtgctgggagaccagctggggaagacagggttgagcccagcgttgggagcggaggcgtctggaaaacgcgccagggaaatgagccaggggcaagaatcgaggcgcttctcggccgtcgaaggcagcttaggactgctgagagactgggtaaggcagcgtccttaccttggaatgccgcagaaccgggcttcattagagcactggtgcatactcttaaaaattatctcgttaccgtttcgtattttatttagtggatttaatcgtctgggaaggagtttctagccgcagccaatcttacagacgcgcagaatattaatctattttgtgccgacttaaggcacgcatattttaggatttgtggattcccaagacctatcccaacgaactcaagagaaggggtaaggccagaaagatttctgccataagaatgacttctaggccaggcgcggtggctcacgcctgtaatcccagcactttgggaggccgaggcgaacggatcacctgaggtcaggagtttgagaccagcctgaccaacatcgtgaaaccccgtctgtactaaaaatacagaaaatgagccgggcgtggtggcgggcgcctgttatcccagttactcgggagggtgaggcaagagaatcgcttgaacccgggaggcggaggttgcggtgagccaagatcaggccactgcactccagcctgggcaacaggagcgaaactctgtctgaaaaaagaaaaaaaaaaaaagcatgacttctaaaataacagaaaggtgctcgctttggcagtacataaatgaaaataacagaaattaaccctggtagaaaagttaagggcattagctctactgaacctttacgaaaaaaagggttgcaagaattctaggctcacaaaacaaatttgtagttcaattttctcaaaattgaaagaggaggaaaaaattctttacagattcttatacaaccagtattatttttatttatttatttatttatttatttatttagagacggagtctggctatgtcgcccaggctggagtgcagtggcgcgatctcggctcactgcagcctccgcctcccgggttcaagcgtttctcctgcttcatcctcctgagtagctgggactacaggcgcgtgccaccaagcctggctaatttttgtatttttagtagagacagggtttcaccattttggccaggatggttttgatctcttgacctcgttatctgcctgcctagaccttccaaagtgctggaattacaggcgtgagccaccgcgcccggccacaaccagtatttcttgcaaagcataatacaactttatgtagtattatgttttgagtggaataaaaattcacaattgtcaaagaacctttttgtcgcatttcattttacaatattattaaagaaatgaggcaaggaagagatgttttattggcactttctaattgattatgtcttccactctttctaatgaaaggggttattttaacacagcaacatgatgaaagaaagccctagagatgagtagaaatgaatagtgttgagcttttccatccttcctgctttgcagcctggggagtaaatttcagtccaagttacttcattttgcagcaagacaatttaatgaagtccactagtagtttgctgcttcatgaggttctactgtcagctttgacttttggtacaattaaggagccacaaagtccctggagtagattatgaaacttcttacccttactcttataatgtcaggcttgaggatttaaaccagtttccctgtttccttgcacggtgttaatatacttggtttgcctccaatcaagttttttttttttcctttt

SEQ ID NO: 548 - DNA, 4001 bp, Homo sapiens
tccccttcacaaagagcttcaggagcccttttatggggcatcgcctcaaggaaatgaaactgctgagaacaactctgacttccccttattcgttgtgtccaagggttaaaaacgcttcccaactccccctccaaatgcaaggtcaagcggctgtccaaaccacccaaggagaagagggagtcctggacagccagacccctgctagcttggccaccacaggctccggccagcccggctagggaagagttaatcggatcggctttggctgatagttcaggctccaaagttcagtcccagtcagagccaccccggaggaattgtaaatctcagggcagtatttaacaaaacaaaagcaacctggaattacatgcaggtttggttttctacagtacatatttacttaatccccaaggtatgcggctccatgtcagatcagctggctttgcggccctttcacccccctagttcacaacagtttaagtttcaaactaattccctgttttcgctcttcctcttcacagggctggctggagacagcctggcctgcctccctctcctgatggctctggtcaccgcgtgagtcagcctggcctgggctgggagttgggtgacagcctgcccactctccccactctggcaccaggtctccaaaacctggagcaaggggtgccaggaccaccaaaaagttaaaggccgtgtttggtgggcaggaccctccttgcagcaccaccttccagctaaatggggagggatccctggggggtgtactgggggggaggggacagggttgaaggtgagaacaagggctctttatcagtagctgcttaccctggcctcctctttcctgctttccaaacacctgggcctctcagtgtcggtccggccagactactgcatacaagaccgctcttcccttttcaaacccaaaccaagtaccctctctcgtgtcttcagagctgcagccgcccaggttggggctgggtagcgggttgccaaggaaaatacgaggcgccagctagcaggcggctcccagctctacccaggagtgcgcacaccctgcactcaccagggtggcggcaagaaaaaggggggaaggcgggggaggggggcacaacaccttcctttgggaggcaggaatgtgggaaatggtgggtctcttaggtttcagggtgggggtgaatagccagtcagccagccaccgatcccaaaggagcggatcaactctgaacctgccaaaaaagacagtccggtgcccgggaaatttacaaggtgaaaccgactagctcagcactcgtgggtggcgcggagaagtggggtggccggcgactctcagctcccgggcgcgggatcccgcagcggcagcaggtgggcttacccccgcccctgcggccccccactccctggagtcgcagtgcctggtacctttctggcgccgcgctccgcgaactcgcgggcgagctgacgcccgatgcctctcccgccgccggtgatgaggacgttctcccgcgacaggtcccgcagcttggcgggcagcaccagtccgacggctgctttcaccaccagatagatcatctgtagagggaacatcaccagcgcgcccagccgtttccacaccatcctccgcgccgcggagccgggcagggggcgaaactccccgggccgagcaatacaggaattaaaaaacaccccgaacaataaatagtaaaccgaataaggaggagagaggcgtcccacctggccactcttgaaatcacctcttcccaaatgcaaagcaccgggtgagaaaaagaaaaaaaaaaaaaaaaaaaagataaattctcctctgggggagaaaaagcgtctcctaaggttgggacggtaaaagaggtggagggggaagccggaggtggaaagttctaacaagaagtttcttgccccagcagccgtttcggctggggaattctcaggtaatgtttacagactgacagaggagtttagggaggggaagaaaaaaaaaaaaaggcaccaaccacacgcgcgcaccctgcctcggtcccgcggtttcaaagtgcaagattaaaaaaaaaaaaaaaaaaaaaaaaaaagctgattccaaattgtagcgcccccacccccaccccgtctccagaaaaaaaaaaaaaaaaaaagtggggggaaaaagtgcttggagctcccaatttcagcccgcgaaagtctcccgactcattgctattcttgggctcaggaaattgcttaaacgcgatctgattgccagcaacgtgcaggagaagtggggggtccgggtgtcagtttctttacgtgcagcgctcgccctcgcgcgcgctcgctcgctccggctccctccctccctctctgttccagcagaggctgggagttgccgctcgatccagctccccttctctccctttttagcatttattgccttctttttgtcctttccaacttggagagggtccgggtgtggagcgcgcgtggatcggacgccttggtctgcgcggccctattcattcgctccccgggcagccgcgtcgcggagagggcggcccctttttcccccattttttcaataccccattaagtctgattgacagttaaagttgttgggaggcttcactaccgttcctctgagtggctgctgcggcctcccctccccctgcgccgtcgcggggagcgcgcataaggcgcgcactcgggctcgccgggactcgcgctctcccgggactggctcccctctctgcaagccgggacttgccgccggtgtccctgagggctcgcagctgtaactcgaacacgctggaaccgactccggcgagccggctgccttctcgagacgttcctccttgcccgggccgcccgcgggccaggtgatcaccccgagtgtggagcaggcccgggggagcttgcgtatgccttgatccaaccaggtcacccagggttttatttcaggtcatttggtcatcctcggcctccaggtaggatcaggaagccactcctcacctttgcccggacctcttctgtgttcacgtagagtggacttttaaaagcctgacccaagtgcctcacgatgcttagggggaagccgctggggagcaggactttgctttgaggggagggagtagtcaaggtaaaggaacctctgctccgagtgccaataaaatccccacaagattagctgggagcatatttattgctcatctgagctagaattaccttgactgacaccaatttccttaataacaaaagcctgtaaacaaaacgtcctattcgtgcgcccctgtgctgtgcagccagcgtctcctgtccttgggtctccctggactgccctggcggggcacccaccttctaacctcctgcccttcccgaccggaatgtctcccctgctggagggtgggaccgagctatttagagttgtctgttgcaggaagtctgggaggtgagtcactaaaaagcagccccagttcaaagtgctgatgggacttgcctcccgcccccctgcacgttcccggggccggaggagcgagagcgaagcagggagctgccctgtaatctggggcagccgtttccagcccgcgacttgttcagacggcgattcctgggcctcacccccagagattctgattcagcagggctgggtgcgctgggatcggtactttcaatgctccgcctggtgagaaagtcacttcgaaaaacgctgatctgcggggaggggaggctgggattacctcgtcacctgcaaagacctagttctggggagaggttctgcaggggaggatcttccttctgggtgaaaagccactggaagagcaaaaggcaggagaggcttaggatgagcaactgtcctgcactgagggcctatattctgacacagtccttcccctgaccttgcaatcgggggactgttatcccatcgtccaggttacccagccaggaagtgcaggaggggggatcccaatccaaacctcttcccactctgaccagacgggaggagagaagtggaggat

SEQ ID NO: 549 - DNA, 4001 bp, Homo sapiens
ctctttttttttttgagacggagtctcgttctgtcgctcaggctggagtgcaggggcgagatcttggctcactgcaacctccgcctcccaggttcaagcgattctcctgcctcagcctcccgagtagctgggacaacaggcgcccgccaccacgcccagctaattttttgtatttttagtagacacggggtttcaccgtgttggccaggatggtcttgatctcctgacctcttgatcggcccgcctcaacctcccgaagtgctggattacaggcgtcagccaccgcgcccgcccgtcgtttctctttaaagtccaaaattaagttcatccaactgtggcactaactcacccatttgcatgctaacttggcatctcagtcaaaacagaattttaaatttcccctcaaatctgttccaacaccctacccctacatttcggtttccataaacggtacgacatccaccaagttactcctggcacaagttgagagtcgtccactcccttaagattctccatagctatcccttgtagaacccttaatgtgtgtcaaacaatatccataatagatcatctaaatggaactattttacttaatccttagtaaccttgtacaggtaagatcactatccctttagagaaggggaaactgagacaaagaatatcttgcttcaggaagacagagctcctaattataagagcaagaattcgggcgggcgcggaggctcacgcctgtaatcccagcactttggtaggccaaggcaggcggatcacgaggtcgagagatcgagaccatcctggccaacatgatgaaaccccgtctctactaaaaatacaaaaattagctgggcgtggtggcgcgcgcctgtagtcccagctactccggaggctgaggcaggagaatcacttgaacccgggagaccgacgttgctgtgagccgccatcgcgccactgcactccagtctggcgacagagcgagactcttgcaaaaaaaaaaaaaaaaaaaaaggcgcaagaattccagaaaacgtagcctgactccagatctactaccttccaccactacgcatttctgcttcaaaatacgtcccctatccattcgtttctccccatctctcctgccaccactactgcacacccgggctagtgaaatattgtcctacacggtttttgtttccactcttgccaccctaaaacccattctcctttgaaggccttctcgccacactccagtcacatggcctgctttcagctcccgcccagtttctgcccttaagcgataactaatcccttccgcttctgcaggctctgcttttccttcgcgttggccgaggttatcagctcaaagcctccctccttcgagacgccttacctcgctatactagccaaaggcgctctccctttacattcttcaattttttttcctctacccacaaggcctgcacgacggcgccagttattcgtggcttgaatgaatgaagagccctaggccagtggcgccccggcggcaaccaccacaggcgaagcacccccttccctcagccgccgcggtgccccggcgtacgcaggccagaggaggaagcgcgctttgcctgctagaggcagcagcgggaaacgctgggcggaggagaggggagggggccacaggctgcccggacggcgcaagcgcatcgcggcgaggcgcgcacgcaacccgcaatccggggacccgcgggcggctcgtcccttcccccacccccagccgccgccgccgcccgcgcttcgcaacaaagccggctgcggagccatggtccacggcgcccgcccgcgaccccgccgccccgcatggtagccggaacgtctctcccttaccagccttcgcttcctggtgcccagctcttaggaccgtgtgtgactctggccttctaccgagacaacagagaaacgcacagcaactcgcatggaggaatcggcgaaatggctccgaccgcggcgctagggggcggggccagcgagcgtacgcatgcgcagagcgcgtgccagggcgggggatggcgagggcgcgccaatggagggggcggggctcagcaacctcgcggcgcggaagggtttcgttgctagggagatgggctgagccgggcgggcatcgcgccagacctgctactctggataatccactctcctggataatccactaccctggataatcggctgcccgcttttgcgcatgttagggagttgacggcctgtagcattctgatgcagcaaaatatttcgcagggtctgtcatagggatctccggtgagaggaggttcccttcgaaggcagaactggaaaccttgctgctaacttggtagggttgttgagataattacatgagatggcatatgaagggcggcttagttcaatacctggcatgtagtaggtgttcagtgggcgtagttaccggattgattcagatagtctgaacgccagtgtctcttgaaagaaataaactggccgggcgtggtgactgtaatcccagcactttgggaggccgaggtgggcgaatcacttggggtcaggagtttgagaccagcctggccagcgtggtgaaaccccgtttctactaaaaaaaaaaaaaaaaatacaaaaattagccgggcatgggggcgggcgcctgcaatcccagctgcttgggtggctgggcgggctcctgcaatcccagctactcgggaggctgaggcaggagaatcgcttgaaccccggggtcgggggcggaggcggaggttgcagtgggccgagatcacgccattttctgggcgagagagcgagactccgtctcaaaaaaaaaaaaaaaaaccatgaaagaaataagctcagtgaaggcgggcattctgcctggctaacgcaggtcgctccttgccgtgcctggaacattactgtaagtgctcagcaaactactttaaggtaggaataaaatctgcaaggttgcttttgtttaaattggataaccttttgtgttccaagtctttggagtaattttgtgttccaagtctttggaataattgtgtccttaattattatactagtcactgttaaattttgaaactccagtgcgtcccatgaaggtaatgatacaaaacatttccagctgggattgttccagggaatccagactaatcaattatctgggctcattatatctatggatctttatttttcacctctttccttatgtttttcttaatccttctagctgatagtgatcactccctttaaaactgtcattcttaaaatcagaacaacatagtttatcatttacttattattttcttcatgtgattgttctccttaattaagaataaaatcattgaaggaaagaccttaatttttttttttttgtacccttcagggtgttgaaagcagcaggggcctagaagacattaaaccgataccacagaaatacaaaggatcattagagactattatgaacaactatatgccaacaaattggaaaccaaatggaaatggataaattcctgaacagatacaacttaccaaaattggaccaagaagaaatagaaaacctgaaaagaccaactatgagtaatgagattaaatcagtaatatagagtctcccatcaaagaaaagtccaggccctgatggcttcactgctgaattctactgaacagttaaagaagaactcataccagttctcaaactcatcctgtgagggcagcattaccctgataccaaaactagatatggacacaagaaaaaaaatctataggccagtatccctgatgaacatagatgcaagaatcctcaacaagaccaggtgtggtggttcatgcctgtaatcccagcactttgggaggccaaggcaggtggatcacctgaggtcaggaatttgagaccagcctggccaacatggcaaaaccctgtctgtactaaaaatacaaaaattagccgggcaaggtggcgtgtgcctgtaatcctagctacttgggaggctgaggcaggagaattgcttgaacctgga

SEQ ID NO: 550 - DNA, 4001 bp, Homo sapiens
cacttgggcagggctggcaagaatatggttaataactgacaaatgaaaagtttaaggaggtcacatgacaaaccctagagtcacacaaggctctcatccaaaagaaggatacaacttggctaaataaaagatttcggggttcatgtttttctagcaaatttcttaattagaatgtccctctaagctgggagcggtggctcatatctggaatcccagcactttaggaggccaaggtgggagaatcacttgagcccaggagtttgagaccaacctgggtaacatacggagaccctgtctctacaaaaaaataagaaaaattagcccggagttgtgttgtgcacctgtagtctcggctactgggaaggctgaggcaggaggaccgcttgagcccaggaggtggtggctgcagtgagccaggattgcagcactggattccaacctgggcaacgaagtgagaccctgcctcaaaaaaaagaaaaaagaaaagaaaagaaaaaaagaatgtccctaactgatgacaaagcagcccaaagtagtgggatgagcattgagatcataactgcacctagacatttctagagaaaccacaactactaatacacttagttccttatcgtaattgcaaagatcaatgatgtcccaacaaattctttaaaaacacacacaacatatgatgtgactataactaacaatttattgtatattttcaaatggctagaagagcggattttcaatgttcccaacgcaaagaattgatgtttgagatgatgaatatgctaattacccggatttgatcattacacattgggtacatgtattgttatcaaaatatcacactgtatcccacaaatatgtacaatcattttatgtaagttaaaaataattataaaaacaggccaagcgcggtggttcacgcctgtaattccagcactttgggaggccaaggcgggcagatcacccgaggtcagtagttcgagaccaccctagctaacatggtgaaaccccgtctcaactaaaaatacaaaaaattgatcgggtgtgatggcgggcgcctgtaatcccagctacacgggaagctgaggcaggagaatcgcttaagcccgggagacggaggttgcagtgagctgagatcgcgccactgcactccagcctgggcgacaaagcgagactctgtcttaaaaaaaaaaaattatatatatacatatatatatgtgtgtctacaaaaaattcctagatctctgaccacacaaaaatccgcccccatagctgggcgcggtggctcacgcctgtaatcccagcactttgggaggccgaggtgggtggatcacctgaggtcaggagttcaagaccagcctggccaacatggtgaaaccccatctctactaaaaatacaaaaaatcagccgggcttggtggcgggcgcctgtaatcccagctacacgggaggctgaggcaggagcatcgcttgaacccgggaggagacagaggttgcagtgagccaagatcgcgccattgcactccagcctgggcgacagagcgaaacaccgtcttaaaaaaaaaaaaaaaatcctcccccacacaacgggcgtgcctcttagcaggaaattacaggctcaacaaaaaggcccgtgaagcactccatctcccggcgggatggcgccagaatctccccggccgagcacagcgggagccagggaatagtgggaaaaggccggagcagcactatctgggagaccagaggaccaaactcgaggatacatctctggcgactggggagccctgccacgccccttcagacctgtcatagaagggatgctcctcgccgaaatctcgaagatgtttcttctgctttttagttagggtgttgagtagctggctctggctccggctcccgcgtttgcccatagcgaaaacgtcaagtttgcccacttgcaagagtcgcggttttccaccaggaagttgtccagtcaacacaagcacgtgggctcgctgactgcgctttacggcgaaagcaaggtgccataaagcagatccgctttacgtcgcgctcgtacgacaggcttagaacatccggttcccggttctgccccctaccgcagctctttgaaagcacgggagttcgttcactagtgttctcagagccctagaacgtgggcagctgggcttcccgggttgcgtgagtcgggggcatgagctttgtgcttgtgttttggttatggaaatcagtctgcgtaaatgtgtagtagcggagatagtcgaatgcagtgactttacagtatactgcaataaaaatatcaaccaacatttaagggtgcctgaacatctcacttcatcaccacaacagtgtacagataggtcttgttaataagcctggtgttgcagataaggaaactgatgcttagaaaagataacacgctagcggccgggcgcggtggctcacgcctgtaatctcaacactttgggaggccgagatgggcggatcacctgaggtcaggagttcgagaccagcatggccaaacatggtgaaaccccgtctctactaaaagtacaaaaatcagccgggcgtggtagcgggcgcctgtaatcccagctactcaggaggtgaggcaggagaatcgctggaacccgggaggtggaggttgcaatgagccgagatcactccactgcactccagcctactccagcctgggcgacaaaagctagactccatctcgaaaaaaaaaaaaaagaagaaaagaaaagaaaagataacacgctagcaagagaagagagaaaaaccttaactgatgcaaccacatgcttttacccattagggtctgccgcctgtgtgtgttatatcaatcatggggcccacaagtctgagattcccaccctcaccctattctcgcattttctgaaagtattggaagagtccccgcaaacaaatctgttccagcattccccatttaacaacagcagaaacacatctagagaggtaaagtgactttactgaaatcaccccagtcaatgctagaaaaggctgtgaaacccaatccagtgtctcataactgaactcggacaaaaggggatggaaaagcttttgaaggtaaaggaaccatcttacattttgatcatgctagtagttacaccttgtatacataagaaaagttaaactgtacagttaaaatgggtgaattttaatgtatttaaataacacctaaataaacaggaaaaagcaaaaatataaaagtagactcagtattctagggatttgcaagtgtgcagggctgcttgagaccacaggataaagatggtgagatccttttcctaatagtaacttatgctaccatgttctatagaaacagagtgcttaaatcataagccgcagaattcacttgaatatttacggtaaaacaggagcgtccaaaatgagagaaatgagaagcaaaataatagctctgctattggagtgctactgtgggaaatttgggttttccctgatactgtgtcacaccatagaagttgtaataaaaccattagaatgcgattcttgtcagttctagtgaccatctactattcctaattagattcggagaggctggggtggggatgggaggacagggccggagaatatgaggaacacatgcaaacagagcgggtggtgcccagcagctgggccagccaaggaacccataaatagccatttgtcttctatgtaatttcaagataaaaggtacagtcacttaggtcaacaaaagcctgtttgcaagatgtcatcatatattttaaggtgctgaccacagtataacttggctatagcaataaagagccatcctttttccccctcccaacatatcccaagtgccccagtttccctccccagaggcagccactttcttggtgttcttccagagatcttctatgaaagctatattctcaagcacttgaggtgactcttactctcccggtttccacacccttgtggtcttgtgtacaggtctagacggttctcaggttcaggta

SEQ ID NO: 551 - DNA, 4001 bp, Homo sapiens
acacggaataaaccaactgcctcaggtgccttctctacctgctgcatctaggccctgggccgagcatgctgaggaatccagagataaatcagacacacaccctctcctgaggctctccactgggcagggaaataagacttgtgcttaggtaccaggtgctgagcaggaagcagcagtgtccaaggagaggtgcagacagagagccatgagccgaagggagagagcacatgcctagctgtaggaagctgaggtggcttcatggaggacaaggtgtcaggagagctggacccacatgaatgagggggatatagacgacgatggagaggggaagggcattcttgaccagccgatgtcagcaaaggcaaagacaagggaaagtacaagagatgtacaaggcccaacagtttgtccgaaagaaatgagtgtggcggggagctcagaggtagaattgagaagaaaagctagagcctgaccagggaggacctggaatccaaggctgagcctgggcttcatcctaaatgcagaggggagctgctgaaagtggttgagctggtatgtactcagagaagagcaatctggcagccattcacaagctgggctggctgagtgggcaagtcggggagaaggaagttctggcaggaagagaagctgggaggacaaaaaagagaaaactggaacggtcaagaactcaagtcgacgaaactggttttcctggactggggagtggatggagttagagagagaaaactgagacttttttaaatttgtgacagcgtctcactctgttgcccaggctggaatgcagtggcacaatcttgactcactgcaatctccgccaccggggttcaagagattcttctgcctcagcctcccgagtagctgggattacaggtgcacaccaccacgcctggctaatttttgtatttttagtagagacggggtttcatcatgttggccaggatggtctcgaactcctgacctcatgatctgccagcctcaatctcccaaagtgccgggattacaggcgtgaaccatcacgcccagccgagagctctttaacaagtatttactgagcagctaccatgtgccaccatcaggcatgggtgtaatagtgggtgagagcaatggtctcgacctgcattgagtttgcagactagtgagggaagcagacatgaatcctagccagccgtacataattacaaaccgcgacaggtgtaataaagaaaagtttaggatgttaagcaggcagatgagagagggtagcctagtatgggagagttgggcttggcttctcgaaagaagcgtcattgagcaacagtctgaagattgaacaagagttaaccaggcagagaggtgggcaaagagcagcccaggcagatcagcctgtacagtaagagcagtgttccaggggctgaaatgccagactggatggtttgtgatttgagtgcctgggaaggtggtgatgttacttagagaaacaatccacaagaagttctagtttcaggaagcaggaagaggacaagaaggtccaaaaggagcagcaaaagtagtaggagaattcaggactttccaacccatctcttcatccccctctaccactgctatttcaagcacccctcaagtgtgtggcagcctcctgaccttgcataaactcccaaatgttgcacctctgtcctgagaggcggaccaccgggcagtttggggccagaccccctagctcagtcgtgtcctctagtcgctgccaacggaccttcaagacgaaccagaaatactgggtgctgaaaaaggttggtatccagttgtcgtggctgaaatgggggttcctggtcatacccgtcttctcgcccatggccaggatgttccgcttgactctgtctggaaacaatatcagaagcactttacccacgaccacatgcacagccacctccaagagcacccagagcctcttcagccacagccctggctggggcagccccatctcggcaaagccagagtaagctctgagttctatgggcagagaggctgcagccaggcaacactgggcggagctgaatgaaggtgcagggtaggagcagccaaccccgggtcaggggaaggagtcaggtcagaagatgtttgcctttctgtcatgagatagaaaattcctaaccaggtgcacaaaggtctgttttaatcattatcatttccaattctttgcctgagcttttgagagattcttggattggtagattccacatcttaaattctccctctgattaattttttaaaaaacaagtacttaaaaagaccacacttaaagagaacctgttagatgctctctcacaagtcagtagatttggctattagttattctttatacacaaactcttcttttactaatgaaagatgtttttcccaacaaagatctttgttttcccaacaaacatccatggttttttgttgttgttgctggagatggagtctcgctctgtcgcccaggctggagtgcagtggcacgatcttggctcactgcaacctctgcctcccaggttcaagcagttatcctgcctcaacctcctgagtagctgggattacaggcgcctgccaccacgcctggctaatttttgtatttttagtagagacagggtttcaccgtgttggtcaggctggtcttgaactcctgacctcagatgacctacccgccttggcctccaaaagtgctgggattacaggctcgagccaccgcacccggcccccaatcatggcttctagctggtggttgactatttctgtagtcagagccctccccaggggatatggatctcaaacctcccagggcagagacagaaatgggaccatttctaacaaaacctggggcctgcaactccccttagcactgggcatagagtgacaaataaaacaccctcttctctcaaggaagtcatggtctagtgcggggaatagacaagtaaacaaaaaactaccatttcctaaatgaagtccagaggcggagggtgtgcgtgggctacgagagcagggagaaggggaagctaattctggttagagaagtcaagaggacttcactgaggaagtgatttctatgctgaaaccagaaagacggcaagcagtcagctggctaaagtggggatagtgtcctggtggaaggaaccacatggccaaaggcccagaagccagagacagcatggctcattggagaaactgaaagaagaatcatagagctcagagttgggaagtgttttaaaatacacccaagacctttttttttttaaataattgagacggggtttccttcctctgtcaccaggctggagggcagtggtgtgatcatagctcactgcagcctcaaactcctggctcaagccatcctctcacctcagccagagtagttaggactacaggagtgccacccaaacccggcaaattttgtgactgttatagcttctccttatgttgcccaggctggtcttgaactcttgacctcaaacaatcctccttccttgatctctcaaaatgctgggattatgggaatgagccaccatgcccagcccccaacttcttaaagtaatcagggctgattttccccaccatgtgtcactctttatttatttatttttgagacagagcctcgctctgttgtccaggctggagtgtagtggcacaatctcggctcactgcaacctccgcctcccaggttcaagcaattctcctgcctcagcctcccaagtagctgggattacaggcgtgtgccaccatgcccagctaatttttgtgttttcagtagagatgggtttcgccatgttggccaggttggtctcgaattcctgacctcaggtgatccgcccaccttggcctccgaaagtgctgggattacaggcgtgagacaccgcgcccagccggcactcttttctttacctgctggtgcagtggtatgagaagccaaaaatgcctaagtggtagttacagcttccaattcagtggaactgtaactggaatggaagtgt

SEQ ID NO: 552 - DNA, 4001 bp, Homo sapiens
ccctcaggttggagtgcagtcatgcgatcatgactcactgcagcctcaacctcctgggatcaatcaatcctctcacctcagcctcccgagtagctgggactacaggcatgtgacaccatgcccagctaattttcttattttttgtagggacagggttttgctatgttgtccaggctggtcttgaactcctgtgttcaagtgatcctcctgcatcagcctcccaaagtgttgggattacaggtgtgacacaacatacccaccccatattagagttttcatttgaaaaaaaaaaatgttgttgctggttgttatatcttcagacttaacttgcttctaattctagtctggcttctttaagatagtgtgattctaagagtgttctaaacttaagtggcaaaatttaagtagatgattttatattcttgattaaagggggccagggaggttaatacagtaaatatttgaaattgatataaaataaatacatacatatatctaaaccattcatttttgcagctttcaggtaaaatctagcactttattccagtctatgagatgtggttagttgatatcatctaatattaagtaatgacatcagctatccaaatcctgggcacaattcctttagcaatgatgacctttaatagaatttagcttaaaaaactaggagatttctgctacagtgatgcaatctttcacatcttatttattaacaaaaatcaacaatccagctttccttaggtcttcacgcactaagagttctctagtcacagaaatcctagccttgtctgcactctccacaactattataaactccatgttagtatcaagagttccagtaaagaccaaatatctcttggccaccaacatcccacattaggaaatgtgcattactaattattctgttttacattacttcctgctctaggggatgtatgtacaaattcattcatagaaaattggtaaagcagccgggcgcattggctcatgcctgtaattccagcactttgggaagtcaaggtgggaggatcgcttaagcacaggagttcaagactagcctgggtaacatagggagaccgccgtctctatcaaaaagaaaataaaagaaaaaaaattggtaaaggacacacgtgataactgaagtttccagatgtgaagagaattctcattctcaggcagtggacccccccccccactcccctccacactccttccaccttcccaggccacctggcctcaggctgagggggaggtgaaagtttccaggaaccagagggcgtccaaacccagcggccgtgcggagctcaaggtcccgccgctgctgttgcggcaccagcctggctcatggacatcaccacgcacctgcaaggtcaggtttctctctggtggctgtggcggctgctaccctcctcgcccatttcaatcttactttcacactacatgactccactattacttcctgaacactagctacctacgcagctgtaatagtggacactgtgtcaacctttaagctcgcacacttatcaaacctcgttcttctatattaaaaagtgctagcttcccaacgggactatccaaagtgcagttgcaggacctgccaggagcccgcagggctgcgggtggttcttgcgtaatcgcgccaagaaagacctggttccagtttcagggacaactcgcccataaacttctactgcgcaacagcatctgctgctttgtctgacacttgttgttttcaagtacccctaaaaaagcgaaagaaagacttacctttctcggaggcacgaaccaagcagcctagaagacaaatgcgctgctcggagagactgccgcggcaaccaactggacaccccaagagctcactcctccgcggttttatattccgacttgcgcacaggagcggggtgcgggggcgcagggagtgtgggtaacaggcatagattccgcttgcgcaatacgtggtaagaaaccagctgtgaggggctggcccaacgcagagcggcgcgaggtccgcttggcatctacaacaatcgaggggctagtccagaagttcaaggcggggttacaggttggggaggaactgttaaactgtggactttttctcacctgttggaataagcttcaggcaaaactttgccaacaaaaaccggtccaactgattttagacgaaagtccaaaagcagtttaatgcaggacagataatcttttccacaaatgatactgaaaagacaggacatctatagattcccccccgccaaaaataacccttacataaaaattaagtggctagatataactgtgacgagtaaaattacaaaacggttttaaaaaacaacaaactattgtctaaggctaggcaaaaggttcttaaattgacattagtggcaagaccggtaaaaagaaatgttgatgaattagactccataaatttaaaacttttgctttgtgaaagaccctgtaacgatactgaaaaggtttacctaggagaaaatatttacaagccatatatctggcatacaaccagtatctagaatatgtaaataactcaaaaatcaattatttttaaaaatccaattagaaaatagtcagaagacataaacagacacttcactgaagatatgcagatggcaaataaccatatgaaaacctttaatgtcattagccattagagaaatgggaatacgaggctttcgttgttcttcgcctcccactagggcgggttgagggtctggctccagtagccccgggtgcctctcactccttgggcgcaatgctactatcctggcagaaccctcgccgaaccctcgcaggacgccccatcgggtccgccagcggctaggaagcccgattgtgtcgttcctttttccctctgcgcctcccaccgccagtcccttttccaaatgcgcctgcgtctgccctccacatctccgagctccgtctggcttctttctcccttgcctgtgagcgcctggcggcggatgcattgaaagctgcgcaccaccgcctaccgagcgttttggggagtgtgtggaagttgttggcagcaggttttgacagcagtaccctatgggcctagtcgttgacggtagcacctggttttgtgtgccccagccagctgaggccagggtgtgtggtgtgggccactggtactgctcttctgccactataatccctccccctaccaggtacctggtgcgtagaagtctaaagacctgtgaggtctagcctggcgcctgtaatcctagagaataaggaggttgaggccaggagttagagaccagcctgggcaacatggggagaacttgtctctactttaaaaaaatttagcccagtgtggtggtggccgcctgtagtcccagctatttgggaggctgatgtgggaggatcacttgagcctcccacatcaaggagatcgaggctgcagtgagccgtgatcacagccactgtactccaatctgagcaacaaagtgagaacctgtctcaaaacaaattccaacctgattctggtatagcatcacatgacaggtagcagccctaagggcgatcaaagtattttaccccaaaatatatttctgacatattttggaatggtcctgtgcaaagctatcttttgcgagggaaatttgtgttctgtggacaatctccttccctttccaggtctttctctgatccgggagagatttaactaagagtctgacaccgtttaaggtcatttaccttttgaggtacatatgccatctattctttctgaagcatattacaggcttcacatatgtaacaagaaccctggcttccacaacctccctcctgccaccactggccaaacccctcctcctccaaaatgtaccggctttccaggtcaaaccaatgtataccttacatatattgactgatgtttttgcctgtatcttctgtcttcctaaaatgtataaaagaaaactatagtccaaacaccttggacacatgttctcaggacctcctgatgctgtgtcacaggccgt

SEQ ID NO: 553 - DNA, 4001 bp, Homo sapiens
gagccatgattgtgccactgcactccatcctgggtgacagagcaagactctgtctcctaaagaaaaaaaaattacctaaattctaatataggtctgttctgaatcacagctccactctataagttcagtttggcaagcggccaagaacacagttgtgagtggcacccacaccagggttctaatcctggctttacacttaagagctctgtgagcttgggaaccaagcagggtgaccctgaacctcagctttgtcatagggaaatgaggactgtaatcccagtcccataaagatgcagggaggatttcatcaaaggaattcataataaaatgtctggcacattgtaagttctaaaaacctgcagatgttaccattccctcctagtactatcatgtcttatatgtgcatagtgactcatactccacaaggtgctttcagatcttttgcctcatttaatcctcaggcaatgcgatcagtacaaaaggcagtaattactacccccatttttcttttatcttttttgtaaacagatgagaaaacaggctcaaagtcaaagagcccgaaaagcgggtatcttgtccacggttctttttgctctgtggcacagaactgaacctcagaggacttcatgtaccatgccgagcacaggagaactacatgtgtttttaaatgccctactattcctgcattaatcaaatcaaactggtattctcacattactcccaattatttagattttgcctaggaaaaatagcaactaaggttttttgagagtgcactgggtatttcaggcattgggcgaggtgcttcacttccaccatcacagttaaaccgcataacaaccctatgaagcaggtactgtcatagtctcctgcatgtccaggattgacatgcaggcagactgtctccaaaccccagttcctatggtcctagtgctgtccaattcaaatttgtccagttgatgataacactttgcaaattgatttcccatacaacaaacctaacgacacatggaggccaggctatgagtgttctcctttacatttcaggagactgaggctctgagaggttaagcgactgacccagccctgtcctcacccagcaagaacacaaggcagcactccctaactccaaatctcactgtctttggaaaacctcacattttaagagtgagaaggtagaagtcctgtcattgttgaaaaacaaccatccacaatcatcactaagagttgacagcgagacccgcgctccaggcggtggaaaccgagcagtctccggcttgggccatccccgttactgtagccaagtaggaagtgggcggtgacactgatttcagagcagcccctagggaaggcacaggcaccagttcctggtcccgctcccagcctcctccctccaggtccccgaaggggtggaacccgagatccagctgggtcttggggttaaggcgggcgggacgtcccctgtcccgagggggcgcaggctggggcgcaccgcaacgagagtgcaggcggcgcaggtgtcccaggacggggacggatccaaaccccaagcacgcctctgcaacctttcccggtcacctggacacgcagcgggggcgcgggtcagactcctacagtttcgcaaactgcgggtcccggggatcgctgcacagtcctgggtcagggacctggcccggctcggcgctggtgccgggctggcagcccaagactcgctcttctctcaacctcgcacgcctcgcgtcctgcctcagtttccctcacctcgaaaggggttgttaacagaggcacgccctgacctacgcgacttcctgggggccagagcgcgccctccttgccaggacccccccaggacgtgctaggactctgtggcagctcccctacctgcgcggtggctcacgccgccgccgccggcggcggctggggcgccctgaggacccccgcctggcatgcgccccgctgccagctcctcccgctccgcctgggctgcctcctgctccttccccgaggccagaggcggggggaagggagcagcgcgctggacgggaagtggggagggggctggcgacgaagggggcggctcctttcttctcctcagcgagtccgctgtttcctttccagcattggcccctgacgcgcgcgcgcgcgcgcacacacacacacacagacatacacacacacgctgctggagcgggcggggccagcggccctcacagcctgtctccgggatctcaggacctcagaaagtttgctttcactctgactcatttctggaagaaacaagaggggaagtgcaggaagcctccaggatggggtacaggagggcgccttccagacgcatgatttaagaagtgaccacacagtgatggagaagatggagggatgtgaggggctcatttatacaaagtgggggcgggggggaggagtggggataactgatgaccctggaaagagatgagtgggagcagatgtttagaaatgagataggattccaacttctagcatcttccagcagctccgggctggttccaggacacagaagtccatgcaagctcctaggcaactgactccccccttcaccccttctctttggttcattcaaggaagctactggagcaccccctaggtagcacctgctataggacaatgggtacaaggaagggctacacatgagctctttgcccttaagcagctcacctccaggctagaaggagagcacgtgcatagaaaacgaaatcacaacatgagatagaatgtgccatgtgccagaggcttggcacaaaacctcttgcaatggttcagggataggagggagaactgtgaagaagaagggttggggagacgttctgcaggaatgggaaggatctccttagaacgagaggagttagaactagaggaaggctgaggtccttcaaaagctgaagatcttaagactgaaagcacacagttgtacttaaaatcagtgtgtttgcccggcatggtagtgcactcctgtagtcccagctactcggcaggcttaggtgggaggattgcttgagtccaggagttcaaggcttcagtgagctatgatggggccactgcactccagcccaggtgacagagagagaccccccacacccccaccacatctctaaaaataaataaatgtatgaatatctaaggccaggcactttgggaggccaaggtggaagttcacttgagtccagaagtttgagatcagcctgggcaacataataagaacctcttttttttttttaacttttaagttcagtttgttacataggtaaacttgtgtcatgggtgtttgttgtacagagtattttgtcacccaggtattaagcctagtgctcattagttgtttttcttgatcctcgcccttctcctaccctccgccctccaaaaggcaccagtgtgtgctgttcccctctatgcgtccatgtgttctcatcatttatctcccacttataagtgagaacatgcagtgtttggttttctgttcttgtgttagtttgctaagaataatggcctccagctccatccatgtccctgcaaaagacatgatctcattcttttttatggctgcatagtattctatggtatatatgtaccatatttttttatccagcctatcattgatgggcatttagattgattccatatatttgccgttgtgaatagtgctgcagtgaacatgtgtgtgcatgtgtctttataatagaattatttatattcctttgggtgtatacccagtcatacgattgttgggtcaaacaatatttctgtctttgggtctttgaggaatcaccacactgtcttccacaatagctgaactaatttacactcccaccaacagtgtaaaagtgttcctttttctccacaacttctccagcatctgttattttttgactttttagtaatacccattctgaccggtgttaggtggtatttcattgtggttttgatttgcatttatctgataatcagtgatgttgagctttttttat

SEQ ID NO: 554 - DNA, 4001 bp, Homo sapiens
caacctcaacataccattcatatatatagctagcccaacttgcccaagagggcaagtgctcttgtgtttcaacaacgagcacttcctccaaccatgaactaatgtctaaagacttgcatgctttctcaagtgctttatttctcaaaaaccatgggaaaaggcggaagaaaaataaaatcaagtcttatcagataaacaatattgtctacttaaacaaataagattaaattgagacatatacagaaattaacatggcagttaattcaattactttagagatcagtgttatctcttcattttgtaatttgaaaacttattcaatatgctcatttacatgttaaggcactgtttatgtttaggccttgctttacacttgtaaatatcagcagtcctcctaaacataaggacgttataactgtgtatttcactcaagcacagatattcaaggccatcaagaatttataagctagcaagatatcgcagtaccaataaatataaaatgttctagttttcctgaattagttcaagtcagaccaccaaatcagatctaaaagttacctgtactaatacagtaatttttaaaacaaaaacttctaacatttgaaatgtgaaacacctgaaacaagcaaagcaatcatcagatctcaccctccatcagtgacagtgttatgattcttcctagctaccttgctcactttgtggcaaaaatccaattcacttactacctacttaaaagctaggagaatctttgtaattacactgagtgaaacactatattatgtagattaggaagcacatattaatcacatccaataaaacataaatgcaaggtaaataataactaaatcaataattacctttggtaataataatgagcccacataccaaacactggccactggggaaaactaaatgtgctaatgtgcgtgtaacaacagatcttgggttatcaatatttttaaaaaacactgacaatggcaaatatttatatatatatatatatatatatatatatatttccttacagcagaaataaaaaggaacagtaaaatcttaagaactgctagtaatttgctgcaccctgatgtaaaattgcctttattggttaaactaaaagactaaacccaacaaaatagcttttagaaaaaatgtgttagaaagttggacagaaaaacaatgagttgaaactgcaaacattgacagcactggctttccatgtgattatcaccataattctgaacgcatttagttcatcccatgacaagggaaataagacaagctaaactctgcagggtagagaagagtccaaaaggaaaactttggttgtcttccttgggtgaagagaactctcaactactatcagtttgacaaagacacgcagaatctgggtgaagcaagaattcgagcggtccctaggaatatacaatattttcccgaaatccacacgcgcggagcgggatatatttctaaaaacaaaaaacaaactgcatgaattgcaaatgaagcaataggagttcagcatccaataggtggctggtcatctttctggttcgttaggtcaagacgtccttctcacctacgaccctcagagaaggactgactccctcctctgtaacctctccctggaagccaacctttgccatctcctgccatcctctcagtcaatccgccaggacccgggacacgcccccacgaatgactactttcctccgagatgcaactctgccccgtgtcatccgcaacctccagtctcagggcctctttggcctcagggtccccggtgcctccctcctcagtccctaaaggctgcccttagggctctcctggttccccgttctcagtcctggcccttctctcaagcctggggtcccggatttccctccacacgcgcgggagatgccgactctcccgtccctacccggtctcccagtcccgcggcgccgggcggcggcgcgccgaaaggcatccactgaggaaacaagtgcctgcaacgttccggctgcgaactcacctccagtccgggctctcggatgctggcccggagccgggcttccgcctggcgcggtccgcgtcgcgagcgggaccggaagtcccgcccctcgcccgctcccggcccgctcccggcccgctggcctcgcttgactaccgctccccgggagagggatcgccggcggcgggcgacgggcggctggcaaggggcagagggcagaggggcttggcttgaaagggcgaggcaggcgccaaaaaaattccctctcgcgctcctgctctttctagtgtatccatcgaccagtgtgcaaatgcttgaccaagcgtctattctgcccaagcccagtgaggcacaagatgactcagacactgacctctgtcctcacaatctagttaaaagttgacataagtaaaaacagaagtaaatcacgccacaagacagtgtttcttctttcattattcagattattatcacctgctatataggcctgtgaacaaccaggcactgctgtaggggctggggatagagcgaacagaggacagccccactctcgtgaggcttacactcagggcgaggaactagctatagaataaatcgaacagcggcggctccctcgggaggcttatgcacagaaacaaaaatatataagcaatgaaaccatcaagtgttagaggcactctggtggtgctgtagggaacggtgcaatgtagagagctgggcggagaaggctttctagaaataatgactcttcaattgagactgaaataaatgatgaataagagttaaaggacaggcacagtggagaagggcatgcagagaagaaggacgttatggagtgagagcttggcttgtaccggtagctggccaggagttaagcaaagtgtcagatggcagatgcaagagcaagcataatgagaagagacaaggccaaatcatgaagaacgttgtgccctatgcttaaaaattttggacttcagagactccgtgcaacggaatccgtggggtcatctaagggaatagacaaaacagtgagtcatggggttgactagggggattgtcctagtcatcaaagaaaaataatacatcatgaatagcatgttttatccttgagggtgctttcttgaactgccatacccagatgtaaaggcaatagacggctaccacaaccctataaaggcaggaccacaagggatcatacccctcaggttgctgcattgagcaaatcaccccaaccaactgagatgctaactgaagtcacagggaactatggaatgggcccagaagaaagaagcttcaacaccagctacagtaatgaggactgttgcattttttgtttgttttctttgctaccagtgtttaataaatactctcttgcacaccaagccctttctttgcctttttaaaaaggaatggtataatacatacatttttctttttttctccttttgccagcaaaaggccatacattgcaatatatggagataggattacagtagaagaaaatgaggaatggatatcgtgtagaaagtctgtacttagagggcataacatcaactctaagtgaagtaaaaggtcacgcgtttgggttttctcccattgggaaggttagtagtccatttgtggtgatacttgaaataactgattcacatagcggcaaggtgtatttttgaaaggatggaaagaagagagtgtgtatgtggtgtgatgtggggggtgtgtgtgtgtgtgtgtgtgtgtgtgtgtgtgcccacgctgggtgccaagaagtagaatgtaatagacactctgtgaaatgtttccttatagcttctcacaattcctttttttgtaggaatggctgaaatacatagaggcagtccttttatgggccacatatgcacaagcgaccatgtcctagtgtgaccagctactctggtttgctaaagacagggggataccaggatgctggactttcggtgcttaaactgggatagttttgcgaaaactgagacaagttggttgcgctaccatg

SEQ ID NO: 555 - DNA, 4001 bp, Homo sapiens
ttcatgttccttttagaaacacctgccaccctagccctcccagctccctttttagaccctgattcactgccaactcacgaagcctctccctcccctccctcctctcttctccccccaccccccactcttttaggcattggcagctgggtgcagaagtagccccagcattcagggaatgctgcgcagtggtagagggcagtgcccccagggtcagagagagcacaccaggaagtaccactctctaaccttggcccagcccagttctttgggtcactgaaagacctgggctgaggtctttctgtaccactaactagcagtgtgtggttgtggaaaatgcaattcatttctcaagcctcaacatcttcatctgtaaatcggcattatatttggttgaaccatatgaaattgctgtttttgtaggttaaataaaaacagttgaatattgcagttgcatatggcttaacgtgatacctgtcctgcctgcttcccaaggctgttggggaaataagaagagttcagagggcagcattttcaaaagccctgaactaatatgagggcattattttattattattacttcaaagagcttagtacagacccacccggagccagtggactgaaccaataacccagaacttgaaggtttgggacttggaagtctgggagagcgccacctgctctgatgactaacagggcagacgcttccacctggcctcctcatctcctagctctaaaaggcccttggtgaaacattattgagatgacacaagttcccaggcccccaaaaggagaagcagcacacgcaggcacatactccagctcgccccagatcccccctcccacccaccaggggccttagcatgcaggaaggacacgaccagcaacatcccagagggcaccccctgaggtaggtgaaggtagagaccaagctggggagtgccacaaagctcttgcctgaatcaagggtcaggggtccccagagaagtggggaatgatctgacctcggaaaagtctcatctccctgtcccatatcccaccaggaatggggggacagtgggggggacagagcccaggtgtgggtgattcagagtgaaccgcgctcagatacactctctctcacacagccaacgcacgcgcgcgcacacgcacacacacacacacacagtcacacagggcagataccgggacccactcacagagacagtcacgccggcacacacatccattcacacactcacagacacacacaggcacacatggggacaacacacactcattcactcacatgtccacagatgcatacacagtaccaccctccacactcacgctgcatacacccactaacatgcacacacactctcgcccacagtgacacacgcacacactcacggcatacactcaccggcacacacaatcgcccacagacccacacagtgacacactcggcacagacacacagcgacacgcactcacattcacacacctgcagaggaaacttctctccggatctccccagcaccacgacttcccccacaaccagctggctactccctcccagacccgagcctccagccgggcgagggctgggccggggctggcctgtccccgcggccctgaccgggagcgtgggtccgcggtccgcgtggtcccctgcccgcccctcgggtcgggcccgcgggcagccaggccggggcaggagcgggggcagctgaggaggcccagcccctcccccctcccggggccgggagccgagcgccggagcccggggcgtgggcggcgccggggccgcagccgggccgtgcctggggggcgctgcagagggagccgcgagcgcggccccgtccccactcctccccgcggcttacctggcccggctcgggctccggccgggttacatggtgccggcggcccgggccgggggcgctgcggcgttgggcaggcgggcagggaccggggcccggcactgcggagcccccagctgaggggccgcgccggctgcggagccccaagcgagcgccgagcggcagcgggcgcgggagcgggaggcggccaagccacggaggctggatttcccggggaccgggaaggggaggcggggggatcccgcccgcgcgctccgcccccgcccccgcccccgcgcagggcagccgagcagggagagggagagggagaggaagagggagggggaccgagctccccgcccccgcgcggacccaggagggccgaggtcgccgcccgcgggcggccgccggggtcccggaggagcgcccacctcgctgagcgacggtgctgggggcgcccagcgtaggggcaggaatgagatccccctccccggggacccaggaacaggcacccgaagtgtcacggccacgcacagccgacctgggtacagggacccaagcccggcggcgggcgggcggtcggggaccagctcagcctcacggaccgggtctcgccccccgccgaggggcagtcacgccctgaatgtcacacacagcccccaggcccgtccgcttaggagactctccttcgggctttcccggtcggccgcctgacctcagctcctggcttggggtcagggagcccccctcttcggccccagcccctgccaggatggggcgctgtgcccggcctcggagccgctggcaggcgtcccccacccacagtccgcacagccgaggcatccccagtgtggagggagagccccgctgtacctgccgcctgtgctgggcccccgcccgtgcccactgtgcccgcccgcctctgggccctgagcctgggattgtgccatggcggggtcggggtggggggaaagggactgtccgaagcacagctggaggctgcggagcccggacacaggctgcgggagccgagaggcggagagcggactgcagcagtcccctggcttgaatccgtcttggcgcccagagcgatgctgtaatgggggggagggggccacggtggggaagccgcagggggaggggctgaagacgtgggggaaggggtggctccggattccggctttccagggtaggtgtgaggaaacactgcctccggcgctgaaagttgggggtggaggttcagtgggcatccttaaagccctcttccctcctctaccttttccggtcttgaaagcttgggatggtgaggtgtgggcttgggaggcttgagactgcccacctctctaggaacataccttggagttgttctgattcaacggcccccaccccgcaccccaacaactccctgctctctgtttccttgtggggccaccggctctcctccctgtataaaggggaaagtgaggcacggaaaggagaagccaaaggcccagaagagctagaactgggagccaagacctcttttccccagggagatgatgttttaagatgccacattacattaaataacataaggggcttggagagccctcttcccaagggatacctagaagtctggtaagagactagtagattggtcacctaccctgctgctcacaagaacggttcattgtctcttcaatcatgaagtgaggttgcagaccatttccagcccagggttcagtcaagagcagatgtcatgaaaataagaaagttgttcccaggaacccactttagaactgaaggaaacatctcactttccgtggagcataagaacagccgttgggccgagcgcagtggctcatgcttataatcctagcactttgggaggccaaggcgggtggattacctgaggtcaggagttcaacaccagcctggccaacatggtaaaatcccgtctctactaaaattacaaaaaattagccgagtgcagtggcacgtgcctgtaatcccagctactcaggaggctgaggcaggagaattgcttgaacccgggaggcacaggttgcagtgagctgagactgtgccacactgcagcctgggcaacagagccagattcagtcttaaagaaaaaaaaaaaaaaggatgagctgacggccgggcacagtggctcacgcctgt

SEQ ID NO: 556 - DNA, 4001 bp, Homo sapiens
gaagactaagtcaaggacgatcccccaagtttctggtttgggcaactgggtggaagatagtgccattcactgagatggggaacagatttgggactgacagagggaagatgatgagctctgttcagggtacctacctgatgtaaggtacctgtggggcattgagaaagagatattagtaaatgactggatgcgaaggaagcactgctctggattggtgacttgtagagagggtaactgaagccacagggttcatactaagaaagtagagaacaagaagactagagcacctaggatacagctctgaggaacagcaacatttgaaagaccaagaaaagccatgaaaaaccagagcaggtccgggaaagaacaggatcccttgggcagaaaagacccacagagtcctactctgcatgcatttgccacgaggattgagtgggtaatcacagttgggcataagcgtgcccccagaaccaaccctaggagactggagagctcgcacaaatggctcaaagtgggagggcaatcttggcctgtgtccgaatgaaggtagcttaccttattgaacctggcaaaggggtagtccttgccctcctccgctgcacgtcgccagtggaagaacattgctccgtccttgcgggccgggttggtgaatggcatccacttccaaggccgcaccttcttggagcccaacttggccttcactgtacggtatccctggccagtgtcactgggtagcagtgggggtgcatccctggcagggaggtttagggagatgcgaggttagaatcagaaggtgtgttaaagagctttttgtcccagggagctgatctaccctaccctatagcaagaaagtcatgtcctggagcaaaagacttcaggtcctcctgcatcctgctaagcaagcaggagcccttgctggggaggagaaaattgttagagaaaactaggagttaggggcatggcaggtgaatcaggggccaaaacctgggggacttgggactccaatacttgcttcttgtcagagtagagcaaggcatagacttcccggtgcatgccctcgggcctcttgaaagtcagtgtctcagaggacttcttggattttttctgaggaaggaaaccacagaaaggaaccacaacctagaccctttcctgaaaattctttagtccagctcaatccctgaacaaagcagcacctacagggtcaatgacaggcaaactgacacactgtaaaggcacagaaacccactcccaggaacaccatcctacgcccaaatcagagcagtcccctccccatcccaccaactctcagactgttacaatgtcttgatctctccccaacaatatcttgcaaaaatcacacttgcctggtcctctcagctcttagaggtgtcataccctcttggtcccaccatctcccacgatgtcccatctcctccctcccatcaaggatgacacatattccctgtcctgttatgtcaccccttttatcgcccaactcactgtaagtgtagcacccatcccttgcccgttgtcactcctccccatcttcactcccctaccctcccctagtcaacgctttcaggtgcccctgctaccttgtccgggttgataatgtccttcttgctgatggtcccagaggctgcatccccttctggacccccgagttctagaatgtcccgtacatccgcgcccgtagccatcgcgcctgagagatgggggagccaccggaggtcaagggtcagtgcctgaagaaggaccaggctcaggtcagggggcggggccaatccagacctaagcggaggcgagttgaaggggcgggccaagaggagaagggtggtccaggtcaggtcggggatctgcctgtgccccaccgcttggatgttcctaacggccccttcagccacctgggccctcgcacttccgcacctgggtccggcagctgcagcccccactaccactcccccgtccccgcaaagccgcggcagaaacttccggcggtgctcattcggaacgcggccgacagaaacacttccggtcggtgttgtaggaaacgaagccgactggcaaccgagggtgaaagctactggccgtgctgagcttgccaccctttggttctcccgcgagcctgttttcattggtgcactgcctgctttctggcattttccctctacgatgctccgttgcgtctcaggcagtgaagagataccagaactttgtgactttgggaagtcacttaatttctctggacctttttctttatttgccgaatggaaattgtaatggcacctgtgtaaatgaaataccaagaatccttgtaaaacattagcacggtgcgtgggacatttactatttttttattaaatgagttaatgatttgaattgccccctcttcattaagtgctaatatgtactaggcactgtgctaagcttggaggtgaagagataaacttcaaattgtgataagcttgaagatgaagaaataaaggcagagcttcctagggcggctgccaaaatggagtaaggtgtgggccctcatttgcacctcctctgatggagatagctgtgggttgtggcctcgtggggatttcctggaggccagcttcgtggcacttcactagtacaggagctagctgcactctttgggctacgaagaagcccaaaacacagccccaagcaggaaccagcttagaagtatccctcaagggaataaacctggggatcttcctggaaagagagagacaggaggtcctgaggaagggcacaagggacaaggaaagcagctcccagcttcagcagtctgcaaaccagcctgtcaatttgaaggacacatagcctgtgggatagggtggggcttgttaaggcattaagaaggccagaccccaagtcgagacctgccaaagataccagcagggactagaggagcagacagtttgcgcaagttagctataagtggtgtagcctgttctggcctggagaagacaaggggatacaacagctgtagccacaagcctgactagtccccaaaactttggagaactaggcctggaggtacaaacctgttcctgggtctgattcctggatggatccactgagctccaaacagttgccggaggaagtcacagtcttacagcagaaattgtccacagggtaaggaaatggtccttggagccagaaagggagagagcaattggctgcctgaaacacttgaccctagttgtagttaattaattgtgtaattacttgtttaatatatatctctaatagactcatttctgtgaagacagggatcacagtacataaaggaatgtatgtgccaggcactattctagactctgggcatgcagtgggtgaacgagatacaaatagctactggtggagcttatatttagtggagaaggagaaacactaaggaaatagacaataaaattgataatgtaagttttgatggtaacaagagctaggaaggaaatgaaatagagcgatgggatggagaactgctttccataatctggtcagggaaagttagtggtctctcttttttttataaatgtgtatatacatagaaaaaattctggaaaggactaaactgaaatgattccatcacttgtttttatctggcaatttatattttctatactttctataatgaatgtgtacctcttctataataaaaggaaggaatgaagggaagaaggaaaggaagaaggaaagacaggcagactgtgcgctgtggaaggtggaccaggccagagtttaggagactagagggcagttgtgactatctaggttagaggtgttgggaaactgaactaaggttgtagcagtggcaatggattccagatatttagagaaagatgaccatgttatctgcaaataatgacaagtttatcccctcctttcaatttataccccttatttctttttcttttagcattttccagtacctccagtaattggttaaacagcaggtgtggtcgtgggcatccttgtctttttccaga

SEQ ID NO: 557 - DNA, 4001 bp, Homo sapiens
tcctgaacccctcacagactgaccttaatcctaggcctgactcagccctgagctgagtcatcctggggcaggggaaggagtggggaccgctctgtcagccccactctggttggggaaggagcaacagctcagcatcctactgctggctccagggactgcaggggtggtggggggtggggggtggggggcgtgtaggtgtcacagggaagccaggctctctaaaccgccggcagagcctctgctggaaggcaaggcctccatacaaaggctcacttggagttcatgtccttccttcctaagaattagagagttgggggtgggctgaacaccccagttcctctgcccccaccagcggacatgagccccctgtccctgactcctctctgtgctctggtccttgggtcctggaatactgtcaggagctgatgtcaccaccaggttgtgcataggactgtatccaacatccccacactagaaactaatgcctccacactggtccagagaacctttatccactgagttctgcccagaggcctggcagggtctaaaggagtgagactggccatgccctccctgccaggccagtgctgctacccaggtggagatcccatcccatttctgtgcctttgctcatgttggcctttttgaggcctggttcctgcccctgtggatttcagaaagctcttcctgactaccccagctgatcctgctgctctgagctgccccagcatttgaccttggataccctcctgttgtgccctctcatgggtcatgggcacctgttctccctaggagttccctgaagttttctgaggcctgcctggcacagggctgagcccatgtgggtttaccagctgctcaaggctggacctgggacaggatggggtgggtggcaccacctcccaggacatcaaactccccatccatgccactgaatccttttctcacccaccgagaggctggcagggcagggcaacagtcagtagaaccaggtgtggggcaccagactgccggtccctcataggcatatatgggtacttaccttgggctttgggtaataatgacctctgagcacctaccaggctctgctgaatgctttgcatatgtcatcacaaatcacctcccaaccaccctaggggatgggcatggccattgtctcctttttataaaaggagaaactgaggctcagagaagagagctgagtgggaaagcccgtgctgatttcaagtctaggactccaaagctcatatttttagccatgttacgttccaaccccacttggcccagatttagcctctctgagcctccgtttccttgtccataaaatggaaataataacctctccacatggggattggatgatttgaggcacacagaaagagagagactcccacagtgcctaactcacagttggtgtcagaacatagaagctgttatttacaattccctgtgcctgaactctccttgcctgggcattccagcctcttccagctacttcccagccataatactctggactagtcccttaccctcctacctcatttcttcatctgtgagatagggctaatgaatgcctccctcacaggcttgttttgagaatttgaaagcatagggcagctccagcgccctggacagtgctggcaaacaaaaggcactctggatatacatgcatagttttgaattgacatctctctgtgttgctaagtgacctgagtctttttgagccccctagaacaagcttggccagtgctccctctcctctttgccttccagagccttctcccccaacccccacagtcctgtccccatggtcccatccccagggcccttaccagccaggcgctcagccaatgtaagcgcatgcactgaaggccggtagtcgggggcatgctgggcctgctgggctgcctgctggtgcaggttgtacatggcgctgagtgagttcatggcgtgcagtgagtagccgttcaccccgtagtgctgcatggcggcatccgcctacagacggaaaagggagaggggccatgaggcaggcctatcagactctgccctcagggagacccacccccagtccagaccctggatgcccaccttctgatgggtcagaagctccctccatcggaagggagcctgtcttgcccgtggcttaccgtgtgggggttcctgcattcactccttcattcacccactcattcatcgattcactcggcagggccagtgtgggtttagggctctgggctctagagtcagactgcccagggcaggctgaaacctcaagtccaccactcaggagctttgtggctttaacttatctgacccatagtttctctatctgcaacatggggttcatgatagtacctatctcatagggttgctgcaaggattaagagaagcctttacaaaggactggatcatagtatgtgctcaaaagtgttagtcattgtgatttacaaattcatttgctgctttatgcaatcatctcttcgttcaattactcaggcacttactcatttttaccttcattgattcactcacacacttattacttattcaaccaatatccattgaggcccacttggagccaagatcagagctagactgcccactgaggcatttgctttgaaatgagataaacccagggctgggcacagtggctcatgcctgtaatcccagcactttgggaggccaaggcaggcggatcacctgaggtcaggagtttgagaccagcctggccaacatagtgaaacctcgtttctactaaaaatacaaaaattagctgggcatggtggcgcatgcctgtaattccagctacttgggaggctgaggcaggataattgcttgaacctgggaggcggaggttgcagtgagccgagattgcaccactgcactccagcctgggcgacagagcgagaccctgtctccaaaaataaaaataaaaaaaagaaatgagataaaccctaaggtcctgcacaaacataagaatactgataagaatactgttgttatgactgtcatacattcaccgccattacctccctttattctcaccatatctccaagaagcaagcaggccaagaatgacaagccccacttgcagttgagtctactgaggctcagagaaagaacagtgacaagttgaggccacacagccagtccagggcctgccccactccacattcctgcaggcttattctttcttttttttttttttaagtagaagttaatgttttatttttttttattattattatactttaagttttagggtacatgtgcacattgtgcaggttagttacatatgtatacatgtgccatgctggtgtgctacacccactaactcgtcatctagcattaggtatatctcccaatgctatccctcccccgtcccccaaccccacaacagtccccagagtgtgatattccccttcctgtgtccatgtgatctcattgttcaattcccacctatgagtgagaatatgcggtgtttggttttttgttcttgcgatagtttactgagaatgatgatttccaatttcatccatgtccctacaaaggacatgaactcatcattttttatggctgcatagtattccatggtgtatatgtgccacattttcttaatccagtctatcattgttggacatttgggttggttccaagtctttgctattgtgaataatgccgcagtaaacatatgtgtgcatgtgtctttatagcagcatgatttatagtcctttgggtatatacccagtaatgggatggctgggtcaaatggtatttctagttctagatccctgaggaatcgccacactgacttccacaatggttgaactagtttacagtcccaccaacagtgtaaaagtgttcctatttctccacatcctctccagcacctgttgtttcctgactttttaatgattgccattctaactggtgtgagatggtatctcattgtggttttgatttgcatttctctgatggccagtgatgacgagcatttt

SEQ ID NO: 558 - DNA, 4001 bp, Homo sapiens
gccaccgacgccacaggcggccccgtcgctgttgccgccgccgccgtcgccgcgccgggcacgctgggcagctccgagcgcagctccatgacaggacctgacgggaaagaaggtgggagaggggagagacctggtgaggagcacaccgcgcgctaggccaaagcgccgccttgaggaacccaagctggagagggaaatttgggccgcggaggctgggctagaggggccagaattgctgggaggaggtgcagtcggaacctccttgtgagccctagcaccttcaccccagtctggccatggctgctcttagacctgatatacacgctaggggtaagattttgtctgaattagtgattccgctggaaaaaataaagagacatgtaaagtgtgaaagtcactgattcagatggctgtaatgagaatttggaaaagttaagatgataccccaaagcttagcctaattggggtgagacgggtgagagaaatgctcgtttgacgggactgggattagagcgacagttttggcccagaagttaggctgatgccaagggcaaaacaggaaaacccggagcaaaacggtcagtttggtggaagggtgaagaggagagagatgtgaaggcgcagatgtgaaggccggttgggccggagttttgtttctttttgtttgtttatttttaatgcagtttggggcagaagctttggagagaaaaatcaacaacagaaagaatagctttaggaagcagagtgaggacgaggaaacaacttgggcaaagttaggcccagtggctctgggacccgtaaaaatgtgagcgccaaaagttccacggtgagggcctccagagagtgagagacaaaatgtatgtggaatttagcttaggactgggaagtattaaagagaaaaattcggccaaagaaactttctgtataggcaaacccagcccaaagatgagcttcatgggcaaggaaaacagtgaaaagcagctgatctgggtgtccgggatccaggggccgcgcctgggagaggggaatgtgtaagaaaaaaccccacaggcaaatgctgggggaggggattgggtaaaacctgtggtgcagttttttagcttcgcagtctggagtagtagtcggggcggaagacgtatcctgcgaaaagttaggcatttcgggagggggatctttctcgaagaccacctcacactgccctcccctcccctccgggtttagggacagagtcgtcagacacgccctccccgtcttggggtcccaggggacccctctcgagcgcaggctcctgcgttctgatctcagagttggggtcctaggacacggatggcccagcaggccgcaccaagccaggggagtcgccttcgcaactggccataaacggacaccagagtccctcccacgccgcagccccataaggcccaagcaggcccagctccccgcttctgccgcggtctcctctgcttcccgcgttccccgtccctgccagagcccgcgacagagtccttgtgtctccgtccgagagtcccagacctcctctctatgagcgttgcctcctctcccagacccttcgggcgtccctaaggcccacggggcccaggcctcctcaacaggggccgcagaccaggtctccacccactgctctccctgcggccctcaactacctgccttgggctccgggatcctcctcctccgctggcgctgcacgcgcctcccggctccactggcgacgctggagctcttggccgcttccctttgcccccggccccttatctgaccacgtcaccctccttcagtcaccatgtccgaacttccggacccctcagaacgcagcgcagtccaaccctcccttcagaaatccgggtcggaggctcgtctgcgggccgcgtggttggaacccgcgacctgactctcgccgtgccgggtcccctcgcggtgcgcgccggacgctgcgcgcagccggggcccagttgcccggcgctgccagactctcaatgagccgctcgcccgctctattgttggtccttagggctccattagacagaattggacaacaatgtggcgcctgccattggccaggggaggcagacggcgctctgattggccgggcccgcgcccggggagccccgcattctgcagtgtccgaaagattcgaaactccaaaagctccactgcgtgcctctgggaggggagggggcgcgccaggaaaggagtggaaaaaagtgggcgaggaggagcgttgaaaatttcctgacaagtagtttccgtgcgcccgagagcgtgtgaattgctcctaattaccgtgtccggtgcgcctctctgcgtagacttgtgtaacctctcggcttctggggcgccggctcggctgcaccgctcttactggcctggggcgcttggcaaagccgagcttcccaagtggctctggagccctgaggcgggatggggggcaggtgacaattcaattactgcggtcggggtaggggcgggacaagggtgcgggggtggggaagggagggtgttcaaggcataaatgccaggacgatttttcctgccttcttcctgctatgtttcggcgcgctcccaaatccgacgagtttggggtagttgggggctgctttggttttttcctcctgtctccttaaagctcagttactttattttaaaagtcctgatacgatagtcatcctggagggtaagtgtggtttatgaagattttcgtgtttaaagagaagctcagcgaagagaaatgagattgcacttcctgtcggtgcccgccacgtccctcgcgccctgagcctttcctctccccgcccctcttttcgcgtccctcagccccttttgagctctcttttcctcacttttcagcatctcgatttcttttccgtggtggtgggattctttttgtcgttattgcaaatgaacaaatagcccccccccctttttttttcttttctaaacgaaagtaaaaagtggcctctgtgtctccgcagattctcttaaactcaggacgcgcatcggtctgtccgaccttcccggcaagagacaaagtcactgctgggaggccccctcggacagttttcagttttaactttcgccttattctcgtcttgtcttgatgtcacggccctgaggaacagctcgttctgcagaagaggtaacaggtttcagattttgtttcctttttgaaaggctgttgcctttcaaacatctggaattaatgccgcggccctcgggcgagtcgccctcggtttctgtagctctgattttatctctgtgtcttttcccctctaatttctaaagttctgtttttccctctaattctgtttttccctctaatttctaatgttctgtcactctcgtttttgttctctacttttctctctctccttcagaataaagaaaattcgtttaaataatgaggaaaatgagcgttcctgtcgttctccctccactcttgaccgtgcgtctctgcgttgctctttcgaacctccaggccggcgggaatctgggcgcgcagactcggcccgggtcgtcgcggcctcaggacgcagcccattccgcctggcacgactactgggccgcgtcttgtcagtctatcagcttctgagcccaggaatgggggtgggggaaggacggtgcgactaacgggcccccacccgaagaccgcagaacctggcgccccggaagagccctggaagatgcccaccgggaggctgaggctggagggaggagtgggtgggggtgattcgctggaggaccgggcggagagcttccagaaagttcaccaggccccggcgcgagggcgctccgacacggacaaggtctatgatagcgataaaaagctggttactcgctcccagaaaatgccacttgctggagtctgtgaatgggtttaggagagagaagggtgtcagcccccgcgagggtctcccgcgtgaagtgaggataagggagtgcttcagggataatatgtcctctaggagcgcaggacccagacccca

SEQ ID NO: 559 - DNA, 4001 bp, Homo sapiens
ggggtcatcagcgctgccgtccaagcacagaaagcccaccccgcacttccttccgctgggccctcactgcatctccatcctccagccagccccactgctcttggaaagtcctcagcacggccatcaagcccgctgtgggccggggccgcctccagacctccccgctgccccacacaccgtcagcccgcactctgcctctctgaggcctcagtgccgagctcctcctcctcctccgggtcacagtgaacccggccatggctcaagccctggacactgatttgtgtgactctttgatcaaccctgtccctcccacaaggacaaggtccttgagggcaagaaatgtgacccgcgtcctccatcacgaatgcctggctcatggttcggctcagccctgcttgtctgttgagatggaaaaaagaaaggtggcttctcctagatctgcagtttcaggcctgtgaccctgtcagatgggacgttccctggggacctagattttcctggaaagtcaggggggcgggacgagcctgcgggagcctccggaccagtgccctggcacacagagggcaggagcttgtccagcgtgacccgggcccccgcctcggcctgagcccgtcccaccacaccaccacgggggagacaccaggaaaacgcgtccgcaccaaaccccggggcttctaaagcttcaaatgtacatgtgacttgaaactacttcaataccaaaagctccaaggcacagggaacaatgtaatttatgtacaaggtgaagggagaaaagaaaggcaacatctttactgaccaactgttctcgtgtgtggagtaaagaagcaggctcccctcacctgcacgtggggaaacggagggaagaggtgcgcaggcgcactgggccagggcggagctgaggggaggagcctcccgaccgcgaaccgggagggaagagtgcgcaggcgtccttgcgctaacgtgccggcaggaaaattctgttattctggaggaggagcctccagcccaaggaaatggcgggaagaggtgcgcaagagcagtaggactcggctcctcgaagcctcccccggaggaggaagcactgctaagtcgactggacgccattttgttcttgcatgccggaatggcacaaactacagctaaatgttaaaagccctctgaaccgcccattcctttctgtttctcgtttcctttttgcgaaaagttacccaatccaaatccctgttcgaagaagggtttctcaaagcggaaggtccgttacccgtggaaaaacttctctccaccccgaacccctatgccagctccccatccgggctggcctgggctgccagctccgggagtcgaccgcgggaccaaggccacgacttaccaaagtcggtgaacagtgggccgggcacggtccgcatcggcctgcgcaggtctagggggccagggtagccactgcctgcggcctccgccccaaaagggggtcccgcaaggctgggcatcgccacggcggctcgctcgctcggctccacgtggctgcggccgcccagaaccggctggagggctctcgggccggggttccggccccgcgggggctgctcgaagaagcaagcggccgcgcggccctcgggtcccgggtcggcgtctccggagggagtccccggggacagcgggcggaggctcgcggccgggacggggacgggggcgggggcggcggccgcagccccggaggcctgcttgggcccctgcgcacacagggccgcctcctgctcctcctcggcggcctgcgtcttgagcaccttctgcgcggccatgatcttctggcgctcggagatcaggtagcacttctcgcagaggcactgcttccagcggcatttgcccgcgtgtcccttgacgggcaccaggaagccatggttcctgcatctcgagcacttgggggtgcgcaccattttgtcggccattggcagggtcagccttcgtaacacaaccaccacctctgggagctgcagagcaagtggcgctgggatgagccgcgccccacaagtccctcgttctggggacattggatacacttgtaacaaagcggctcgcagtgtgtcccgggaactgcagcaggaaccttgcattttccctccttttggggggtgcacagtttggagagtttctgtgctttgggtaattagatgcaatggattgggttgaataaattcttcatgggatgctattgcatgtatgtcatttagcttatctgaagtcttaggcatgtaattttccaaactctgttcccgccaccgacggaaggtatttgtaactttatgaaaggcggagtgatattcaacggtccacaaatttaaaactcgggaggaatgtagctctcggtgtagaaaaatactgtaagaggcaaactgtatttcttctccccaaagctgctccttctgtggcagttcacttctctgccctgcagagatgcttccaggatattccagaatattctcaagagttcagtgcagtgtgatggttgctcaagggtatgcccttacagtaattcccgtttcttgagagtcttgatgtaggaatgcatttctggatgttgatgccttccaaagtgagcatacttagaatattttaaagtaaaatagacagaatattgtagcactaagcctggcatagtgtcctgtgcctgtagccctagctactcgtgaggatcacttgagcccagtagttggagaccaacctgagcaacatagcgagactcctctttctaaaaaattaaataaaaaattctgcaagacccctctttctaaaaaattaaattaaaaaaaatttctagcactagcttcagtgattgcttaacctcatcatgaacttcgttatccttgtaaaacaacccaaatcttgggacatctgaaaagttagcacaaacgtcatagtttacccgagggcattaattgtttttttttgtttttttttttttttttgagacagagtcttgctttgtcacccaggctgtagtgcagtggcaggatcttggctcactgcaacctccgcctcccaggttcaagcgattctcctgcctcagcctcctgagtagcttggattacaggcgcccgccaccatgcccagctaatttttgtatttttagtagagacggggttttcgccatgttggccaggctggtcttgaactcccgatctcaggtgatccaccggcctcggcctcccaatgtgctgggattacgggcgtgagccaccgcgtccggccattaattcattttttaaaaacaaatttgtgacaccctgaggcatctctctctctctctctctctctctctctctctctctgtctctctctcccgcccctcccccccaccaccccactgcctccatttccctcccctcccctctcctcccttctttgtccaaaaaaaggaaaaaatgggccactaacaagctgaaaagcttctaattagatcagtcgcatttaaggaggtagttacagttaatatgtggctaaaacttgtgcatttttcattgctctttctttgaatttctctctttctgttggtagaatgggagaagcccacgcctggtgtccaccttgattttcctgagtccgtgattgtagttgtaccttgcgtttctcactagctgcctgggaataggaaatggttaccattggggggcttattagatctggaaagcgaaaaaaggttttaaagtctttttctgctttaaaaaaaatcatcttaataagaaagtaaaagtagtaaaaagtttcctgtgttacttggcttgttaggacttcactggttgctctgcatccatttaaggaggactaggtttgtttctgctttgctctaacaacctctcacttaagtttttattttaaaaatatgattagtgggccgggtgcagtggctcacgcctgtaatcctaatactttaggaggctgaggcaggtggatcaccggaagtcacaagttcaagaccagcctggttaacatggtgaaacctcgtc

SEQ ID NO: 560 - DNA, 4001 bp, Homo sapiens
aatttaagtttaaaatttgaatactatatggaggtagagagtggacaaatagataacacggactgagaaggatgaatggcaggaagtgggaggatgaacagaagtgggcttaagggtacaaagactcagtaagatataaggaataaattcagtgtttgatagtggagtaaaatgtacttaacaaaaatatattgtactcaggtcatggacaacctaagtaccgtaatttggtcactacacattagatacatgtaccaaaatttctcacgtacctcataatctggtacaaataaaaacatttaaatataaaaataaatttttcaataataaatcatagcttcttgtaacttttttactttataaactttatttcttactcttttgtaataacactgagcttaaaacacacattgtacagctgtatagaaatatttcctttatatccttattctattaatataggcatttttctattttaaaattttattttactttttaaactttttaattataaactaagatacaaacacacacattagcctaggcatagacaggatcagtatcaccaatatcactgtctttcaactccacatcttgtcccactaggtctctggggtaataacacatggagctgtcatctcctatgataacaatgccttcttctggaatatctcctaaaggaccagcctaaggctgttttacaggtaacatttttttaataaagaggagtacactaaaataatcgtttaaaagtatggtatagaggccgggcgccgtggctcacgcctgtaatcccagcactttgggactccgaggtgggcagatcatgaggtcaggaaatcgagatcatcctggctaacacggtgaagccccgtctctactaaaaatacaaaaaaattagccgggcatggtggaggacgcctgtagtcccagctactccggaggctgaggcaggagaatggcgtgaacccgggaggcggagcttgcagtgagcccaggtcgcgccactgcactccagcctgggcgacagagcgaggctccgtctcaaaaaaaaaagtatggtatagtaaatacataagcaagtaacatactcatctgttattatcaagtactatgtactgtacataattgtatgtgctactcttttatgactggcagcacagtttacaatagcatcaccacaaacacataatgccttgactatgacatcactaggcgacaggaatttttcagctccattataatcttatgggactaccgctgttatgaggcacatgactgtatatgtacatatatttcctagcgtagtctatcccacaaacgcaagtaaaatatccattagtgtccctaatgtaattcatcaacttcttagaaaagttatatctctacatacaaaatcacttataataatccatatatatttgtgttgagagtgtatatgtatatattatacaataagtgatggcaaggtttttcaaatagctcattattcgtttataaatggaaaattttaaaaaacttcagaaatataggactagaagggaacgcggcctgcctgagggagagcaactaagaagaacctcgcgttgagagctcctgcggtcggggctaccggcgtggcggcgccggcgcctggtggatgcgccagcatctgcctggtgagggttccgcgcggggactcggaggcgctcccacagcagctgggtggggagcgcccaggccctccgcgcccacgcagccctcccagtgcgacaccggctgccccacgcgccgcccgcccgccgaggctctgccgaccgctgacaggaagacgctgacgaccttacccgccgcgccgtggtccgacggccgttgtggcccttcctggaagcggcgaaggtccggcccgcccacgccggcgagcgccagactagggtgaatgggaaggaccgcgcagcacagccctaccacgccaggctccgacgcctcctggccgtaaccgcctgaccaagagccacgcctgcgccctggcgaagaggccacaatgggggtggggtcccgaacgcggcgcaagggatcctgggtgccgggcaggtgaggaggggccctggctcttgcgagattccaccgcgggtacgcggcggcccccgatgtgacaccgacggtgctgggggtaaggggggtgttgggggtgcagagtgtggcccaaaagtgtgccctaaaggcagatcagatatggtgcccaagttaaagactctagtctgacctttctaccacctgcatgcctacctaggtatggcctaaaggcgggagaaatgtgtgcctttgcagaacaggtggctctgagacctctgaaagaggtgacttacacttaagattttcacaactcgtgggcgtgaattttcattaaaaagcctcacttactagtgaaggatcgtatatatgtaataaaacaggtctaagaggtatacaattctaaggtaaaaataattacatatatattaaaataccccatttctttttaaaggtcttataaaaatttagtaagttaatgttctatatttcactcacgcaacaactacaatatttattgagcacttactatgtgccaggcactgagctaggcacaaaaaatacctgggtgacttcatatttcttggtgggatccacaggaaaaaaaaatgtagagatttgttggggcctattacatctaaggctgtgtttaatattttaaaaatcagcttcccatttttgttacaatatttaataagtttaaatatataaccattcggcatattacagtaaaatctatgtatgaatttgagtctttgagacgctgtttggtaagagggtttaggtattgggggtaaggaaatatgtcactttaaaaaggaaaaacattttggaaataatgtttttatatgccaataatcatttccatttgaataaaattggccaaaaagttgagagtcgtaacttaaaaaaaatcagtcaatagactgtctaaaacaaaataagatcaacaaaaaagacagactatgaagggccgcctgagttcacatccagtgttccttatctcagtaaatagcaattctatttgcttaaaccaaaaatcactggcgttatccttgacatttcccactcccttaccttatataggcttattcttttttgtataacttactataaaagtgaataaagtatatctatagtatttcatcttaacttgattggttttagtaatctatttttttaaatgcatttatacgttctttcccagtgctttctgtaatcattttttaaatgttttttaatgaaattatttcaatggaaaaatgaagtcagattttatgataaaaagtcagcctgatttggctaattgatttgacaatgctgattatacagcagacattttccataaattaaatgagctaaatccacagattcacagttttgacaaaaaaaaattgaaaaacataaaaatgtctttaaaattgtattggcaaaagtgtattaaactttttttttaattttactttaagttctgggatacaagtgccgaacgtgtaggtttgttacataggtatacatgtgccatggtggtttgctgcacctatcaacccatcatctaagttttaagtcccgcatgcattagctatctgtcctaatgttctccctctccttacttcccaatccctgacaggccctggtgtgtgttgttcccctccctgtgtccatgtgttctcactgttcaactcccacttacgagtgagaacgtgcagtgtttggctttctattcctgtgttagtttgctgatgatgatggcttccagcttcatccatgtccctgcaaaggacatgaccttgttcctttttatggctgcatagtattccatggtgtatatgtactacattttctttatccagtctatcactgatgggcatttgggttggttccatgtcttcgctattgtaaatagtgctgcaataaacatatgtgtgcatgtgtctttatagtagaat

SEQ ID NO: 561 - DNA, 4001 bp, Homo sapiens
gtttaaaatttgaatactatatggaggtagagagtggacaaatagataacacggactgagaaggatgaatggcaggaagtgggaggatgaacagaagtgggcttaagggtacaaagactcagtaagatataaggaataaattcagtgtttgatagtggagtaaaatgtacttaacaaaaatatattgtactcaggtcatggacaacctaagtaccgtaatttggtcactacacattagatacatgtaccaaaatttctcacgtacctcataatctggtacaaataaaaacatttaaatataaaaataaatttttcaataataaatcatagcttcttgtaacttttttactttataaactttatttcttactcttttgtaataacactgagcttaaaacacacattgtacagctgtatagaaatatttcctttatatccttattctattaatataggcatttttctattttaaaattttattttactttttaaactttttaattataaactaagatacaaacacacacattagcctaggcatagacaggatcagtatcaccaatatcactgtctttcaactccacatcttgtcccactaggtctctggggtaataacacatggagctgtcatctcctatgataacaatgccttcttctggaatatctcctaaaggaccagcctaaggctgttttacaggtaacatttttttaataaagaggagtacactaaaataatcgtttaaaagtatggtatagaggccgggcgccgtggctcacgcctgtaatcccagcactttgggactccgaggtgggcagatcatgaggtcaggaaatcgagatcatcctggctaacacggtgaagccccgtctctactaaaaatacaaaaaaattagccgggcatggtggaggacgcctgtagtcccagctactccggaggctgaggcaggagaatggcgtgaacccgggaggcggagcttgcagtgagcccaggtcgcgccactgcactccagcctgggcgacagagcgaggctccgtctcaaaaaaaaaagtatggtatagtaaatacataagcaagtaacatactcatctgttattatcaagtactatgtactgtacataattgtatgtgctactcttttatgactggcagcacagtttacaatagcatcaccacaaacacataatgccttgactatgacatcactaggcgacaggaatttttcagctccattataatcttatgggactaccgctgttatgaggcacatgactgtatatgtacatatatttcctagcgtagtctatcccacaaacgcaagtaaaatatccattagtgtccctaatgtaattcatcaacttcttagaaaagttatatctctacatacaaaatcacttataataatccatatatatttgtgttgagagtgtatatgtatatattatacaataagtgatggcaaggtttttcaaatagctcattattcgtttataaatggaaaattttaaaaaacttcagaaatataggactagaagggaacgcggcctgcctgagggagagcaactaagaagaacctcgcgttgagagctcctgcggtcggggctaccggcgtggcggcgccggcgcctggtggatgcgccagcatctgcctggtgagggttccgcgcggggactcggaggcgctcccacagcagctgggtggggagcgcccaggccctccgcgcccacgcagccctcccagtgcgacaccggctgccccacgcgccgcccgcccgccgaggctctgccgaccgctgacaggaagacgctgacgaccttacccgccgcgccgtggtccgacggccgttgtggcccttcctggaagcggcgaaggtccggcccgcccacgccggcgagcgccagactagggtgaatgggaaggaccgcgcagcacagccctaccacgccaggctccgacgcctcctggccgtaaccgcctgaccaagagccacgcctgcgccctggcgaagaggccacaatgggggtggggtcccgaacgcggcgcaagggatcctgggtgccgggcaggtgaggaggggccctggctcttgcgagattccaccgcgggtacgcggcggcccccgatgtgacaccgacggtgctgggggtaaggggggtgttgggggtgcagagtgtggcccaaaagtgtgccctaaaggcagatcagatatggtgcccaagttaaagactctagtctgacctttctaccacctgcatgcctacctaggtatggcctaaaggcgggagaaatgtgtgcctttgcagaacaggtggctctgagacctctgaaagaggtgacttacacttaagattttcacaactcgtgggcgtgaattttcattaaaaagcctcacttactagtgaaggatcgtatatatgtaataaaacaggtctaagaggtatacaattctaaggtaaaaataattacatatatattaaaataccccatttctttttaaaggtcttataaaaatttagtaagttaatgttctatatttcactcacgcaacaactacaatatttattgagcacttactatgtgccaggcactgagctaggcacaaaaaatacctgggtgacttcatatttcttggtgggatccacaggaaaaaaaaatgtagagatttgttggggcctattacatctaaggctgtgtttaatattttaaaaatcagcttcccatttttgttacaatatttaataagtttaaatatataaccattcggcatattacagtaaaatctatgtatgaatttgagtctttgagacgctgtttggtaagagggtttaggtattgggggtaaggaaatatgtcactttaaaaaggaaaaacattttggaaataatgtttttatatgccaataatcatttccatttgaataaaattggccaaaaagttgagagtcgtaacttaaaaaaaatcagtcaatagactgtctaaaacaaaataagatcaacaaaaaagacagactatgaagggccgcctgagttcacatccagtgttccttatctcagtaaatagcaattctatttgcttaaaccaaaaatcactggcgttatccttgacatttcccactcccttaccttatataggcttattcttttttgtataacttactataaaagtgaataaagtatatctatagtatttcatcttaacttgattggttttagtaatctatttttttaaatgcatttatacgttctttcccagtgctttctgtaatcattttttaaatgttttttaatgaaattatttcaatggaaaaatgaagtcagattttatgataaaaagtcagcctgatttggctaattgatttgacaatgctgattatacagcagacattttccataaattaaatgagctaaatccacagattcacagttttgacaaaaaaaaattgaaaaacataaaaatgtctttaaaattgtattggcaaaagtgtattaaactttttttttaattttactttaagttctgggatacaagtgccgaacgtgtaggtttgttacataggtatacatgtgccatggtggtttgctgcacctatcaacccatcatctaagttttaagtcccgcatgcattagctatctgtcctaatgttctccctctccttacttcccaatccctgacaggccctggtgtgtgttgttcccctccctgtgtccatgtgttctcactgttcaactcccacttacgagtgagaacgtgcagtgtttggctttctattcctgtgttagtttgctgatgatgatggcttccagcttcatccatgtccctgcaaaggacatgaccttgttcctttttatggctgcatagtattccatggtgtatatgtactacattttctttatccagtctatcactgatgggcatttgggttggttccatgtcttcgctattgtaaatagtgctgcaataaacatatgtgtgcatgtgtctttatagtagaatgatttat

SEQ ID NO: 562 - DNA, 4001 bp, Homo sapiens
ttgagctatcagtgaattgttgcaaaatattttaaatacaaagcagtggatatctgctttttcacaggaattcacagtgtcattccatgtttgtgaatttctttacaaaattacaaaattactcctttagaaatagtagtacattattggtagtatctcagaatcctgcttagcttttgagataaaccaagtcatgatattttgggtaatatggccataggtatcatgcaagattgaactgcccagtatttgcctttttcaatatttactttgtaagaacctgacactgtaggtcctcaccacaccaaaacctgcaacataaacttcaattttgggcaactcatagaccaaaaaagctaaacaaaacaaaaaggaaaaaaccctctatatacaatcaccctgcttgtctacatttaatttgtttcattcaaaataagcagtcactgcttgactatattttaaggatatatttctaattaggaaaatttgatgttaaatgtaataaaggaatcaaagggataacaagttttcatagctacagtgatttgaaagccagtattttgggagaaaaactaataataaaataacttagtcctgatgttaaaagttgaaaatccccaaaacagtacaagttaaagttttttgtgttatcaattagcaatttaaaatagtcttacttcatagccccgtttatatggaagtgatggacaaacctgatttaaaatgcagaatgagaaaaggataatctgaaattatcctcctttactgtgctcactagtttttgatctcacaatgcaaaaaacaaaagtatggcagggagaggaaagggaagttgtcatgtttttctctatacctagatagtaaaatttctaaataaataatgttatctaaaagtaaatcagtaattattctaactaggtggccattttaggtcaaaaattgtatttctgagatttcattttcttggcacaaaattattgtttacaattaagctaaaaacttgttctggtattttatgacatcaggaaaattctttcctctccaggcagaatgccaaaaacaactagaagctaaatgcctgcgccttctgcttctgagagtcacaactctgtcttgttcagtctaaactagccttgctataagaaaggcaaaaaactactttttgtttttgtgaataagctataaactactcagaatctgaaatgccaatcttaaggttttaaatgactaaagactctttattggttctggcagaaaattcattagaaaacgaaacaggtttcataagacttttgacacaatttactaataggtatgggaattcaaggtttattttaaaatatacattgttaacattgtaagtctaatgataaaatatgtataatacaaaatgctaaaataaaaaaggcaaacaaggacatttcattcatggctctgcaatactcattcatatgatcagagatgaaaccttgttattatacatttgtccttctacttttgatatgactgagaatccaatttaaggataaccttaacaagctgagagagaggggaaaaaggctggcagagagagagaaaaaaaaaaaagagacagagctgaagagacagaaagatatacagagaatacttaccttcctccccaaactgatcatatatttctctctttttaggatcactcaatacttcataagcttctgcgacctctttaaatttttcctctgcctgaggagatttgttcttgtccggatgaaatttgagggcttgttttcggtaagcctttttaatatcttcatctgaagctcctttctcaattcccaaaatgcaataatagtctttccccatttcgaatgccttgaaattaacttagatttccctttgtaaaagaaaacagcgtccccagtcttagcaacagattctaagaaaaataaaccaagctgggtattttaaaagttaatcagcaattcagctagctgtcttaaggcagcaagcagacagcgtctctgtattcaatccttccccaacggctcacttacagataaatatacactacacaggagacagcctccttctagatcctcccattttcactacgtgtctctgtactttctagaacagcaaatgctacaggacgtcactttcccagctgcctctagtcaaagtactgagctatgttttctcctcctccacgattaactattcattttccgactagctctaccgtctttatttcctaattaaacaggacaaatgggttaacatgccaatatttcaacacagaatgtcacaactatatatttatgtactccatactaggtgaaaatcatcacagtcattaaacaccctatgttaaaagaagttaaagttaatatacagataaaaggaacgacaattctactttagggattttttaattttaagctatttgtctgttaagtatataataccaaaacgcaggttgtttaaattaggatttccaagtaatttatgtcgtcttcaaaattcctggggtctatcaatcagaaacgccagaaagtttgtgtactagtttcacattgttaagggagtatctataataaaattcaaatgcgttattttaaaataagtaaaggacttaaacatgattttagctaactagttatttctagtatacatgagttcatagttctggcaaacaaatacttatttttgaaattttagtatctgaacttagttacttcaactaaactaaaactgaatgaggtccctgccacccctcaacccccgtcccctgcagccgccccacaggatccctatttaaagaactgtggtgctgcaggaaagctagaacaaagtatcaggttacagacagtacatactcatgttccttacaagacttaactgcaactgcatcaatgtaaaatttggatatgccacttaaggggcagtaatatgagaaatattttttctttcaaaaacacatttccctaattataaatatatattcattgttggagattttggaaaacgcagaaaaaagtttttaaaaatctccctataatatcattttaggtaatccctgttaaatattactgtatttacttctaattctgttttctataaatcttcatggttatttgctgtagttttataattttttgttaacaaagttagatcatagcatttatatacccttttgatgcctgcttttgaaagtataacatatttcaggtatttatgagacattttctatgtatataactcatcttttatctcctgtatggttttctcatcttttcaaaaatgttcccatttctattagagagataaataagaaaagtcagaagaattgcacacagtccaaataaaatgttagaaaacctttatgaggaaaagaaaatgtacatatatgtttagaatataataaagggtaataatcatgtgttaacctttaaagaaatgagaacgcctactctatatgccaagcaatgatgattcagcaattctttctgaatgttcatctttgtgcattttgacagctacgattttctactcttcaaaattctctactttaacaacaccatgacattagaaatgtataacattgatctagcctacctgtaggttacagaggtttgtcagctatttatcaatttttttagcctcaccaagaaataatatcaaaaggtactttcaaatccaaaaaacttagtgaaaaatgctaatatccagtcaccttaagactcccagttttaaaaagcatattgccaaactgaaatccagtgcaaggatcagtatcacatagagtaaaaacagaataaaaatcacctattacaaaattcatttccaagggagttcctttaaatattccttaccaaaggaacggtgactttactatttaacaaccggaaattgttctggcgggtagtgtttgcagaaaaaaaaaatagacacttatttgattcaatcattttcagagagctaggaatattatcaaaacttgacacagtaaattattttagaga

SEQ ID NO: 563 - DNA, 4001 bp, Homo sapiens
gggattctttcatgaggtgctcagtatcaagcctctgagcccaagctaagccatcatatcccctatgacctgcacatatacatccagatggcctgaagcaactgaagatccacaaaagaagtgaaaatagccaggtcctgccttaactgaagatattccaccatggtgatttactcctgccccaccctaactggtcaattggccttatgacaatacacgctccccgcccttgtgataatgtactttgtgatattccgcccttaagaaggtactttgtaatattctccccactcttgagaatgtactttgtgagatccaccccctgcccacaaaaaattgctcctaactccaccgcctatcccaaacctataagaactaatgataatcccaccaccctttgctgactctcttttcggactcagcccatacgcacccaggtgattaaaaaggtttattgctcacacaaagcctgtttggtggtctcttcacacggacgcgcgtgacactcaaggatacagtaccagaactagcagctttgtagtccaaggactggtaaggtaaggtgacagactagcatggagctcacaagctgggctccagagtcagactgcctgggttgagttcaggctcttgcactttctagtagtgtgactttagacacactacttaatctctctatgccttggtttcctcaagtgtaaatcaagggctatcataatacttaccttaagagctatcctcagaattaaatgagataacagtacaaagttcattcagcatagtggtcccacacaagataagtttgtattattaacatcacatagactaatatttactgacaacacacactgaacccgctttggttagcatagccaaacttggctagctttcattaccactggaaaacctgagagatggaattaggaattctctggcagggctgaaaagtctggacccatcggcttaaagaaactgatccacctcatgacctgaccctggaagccttctcgcccttcacacctatctcaactccagactagtcaagaacaaaggagtgtagtggggccctactactgccaggctatgtgagactctctcatgttatcttttattcgttgaggagacagggtacaagtgcttggtgtgaatgttgaagctgttgttagggcaccacttttctggcctagggcttcttcctaatctgcagcctccgagccgagggtctgtgtcccggaggctctgcctgcaatttctggacatcgggtccaggggaatgaaagagggcatgagacgcatgcctctgaggctggacccacttcagaggcagagcgtccccacgaaagactcgggaaccggaaaaagccctaaggacgttccctagtggccttgaccttggtgggtgagactcagttcgccatcctgctggcggcgggcgatgacacagcccctcagccaggacgagtatgtgggctgagcgcgagacggggtctcggaggactgctaaccccactacggtggcctcctcggggcccccgtttcctcttgagcgtgcgggggcctctggccctacccggacacagtgcacgcggcgcactggccttcaggagctggggcggaggctggccccggaacccccggcgggagggtctgggcggtggggacgcctccatcgggcggctggcgtgcacgtcgccggggtcacgcggcctccccgacggacccgagcctcccgtggcgggggtggggcggccaccgccagcccggccctcccgaacgaccgggctcggcctcagcccccagagcgtccagccgctggcctcacctccctgcgcacgttcagcaacgagtaatagtcttcattgtccagctcctcctcgctcaaggccgtcgccatcttcgcaacctttcaccccgccaaaccggcaaggccgtgctcaagaggggccagtgatccgcgtcagggacagcgcgggccagcccggctgcgccacagcggcccctggcggcccggagccgtccgcgcccggcgggagtgcgcctgcgctttgcgcccccgcgcggcctagggcgggacgcggcgcctaggcagccctggcggggtgaccacgcgggtgtctcttcgtgctcccaatggacgcgtggcacgcggcgtggctgcgtcctcgggggcctgagatccagccaggactccctagggcttttcctgtactagaaagggaaactttgctttttttttttttttttgagacggagtcatactctgtcgcccagcctggtgtgtgtgcagtggcgcaatcccggctcactgaagcctccacctcccgggttcaagcgattctcctgcctcagcctcccgagtagctgggactccaggcgcgcgccaccacgcccagttaatttttttgtatttttggtagagacacggtttcaccatgttggccaggctggtctgaggctcctgaactcaggagatcctcggcctcccaaagtgctgggattacaggcatgagccaccgcgtcctgcctagaaagggaaactttgaagtcacctccaggagattgtcatcctctgggagacaaacccctgtgataccacctgttaccccactggccccaaactcctggaagaagcgcgaggtgcccccagtgcagggtgcatccggatcctagatatcccccaaatgacatttgttcctacctccattgtcttttctcttggccacccagaagccttcctgcccagaacaggcctcctcattttagttatttgttattgctctaatttaggagcacctggccatcttttctgctgcttaaatgacaaagcaataactatttggttcctgatataattgtctctggcaggcatgtgtacctgcagtccctaccccagagccattctcctgtaaatttctcccttataatttatcggtggagtctaattgatttcaacctggtgcctgctgtttggtgcattattaaagatgtcttggttacaacaatctaaataatttaaaggtcttcgaaatgacgccattgtcaagggaaggtggacagcagcccactcttgccacctgtttggttcccgctgacctgcgcaagtctcagaaacctttgttgttccttcactaaccaccagtccatagccatccccgttgcccttcataagcaggtctcctgggaagccccgaacacctgtctgtggatttgagaggctgatttctttctctttctaatttttggccagatgtgcaccatctgggcctgtgtctcatcccttccaagttgcccagccctcttaggatcttttggcatgagacacttcggtgtgctgagacagattgttcgggtgggttgagtcagcctgaaacaaactgtcagcccaggttgtaaattaagggctatttctttagttgtgtgaagcttctccacaacagcttccatggtccatcagctcttccagcaatgttatgggctttgcctttttctcctttgcagagaaaagagctgtggttagggccaaactgcatgctgacatttgacagtctttaagaatttctttctttttttttttttttgtttgagacagagtctcactcggtcgcccaggctggagtgcagtgccacgatcttggctcactgcaacctccgcctcccgggttcaagcgattctcctgcctcagcctcccaagcagctgggactacaggcgtgcgccatcacgcccagctaatttttgtatttttagtagagacggggtttcaccatattggccaggctggtctcgaactcctgacctcgtgatccacctgcctcggcctcccaaagtgctgggattacaggcgtgagccaccgcacccggccaagaatttcatacagagagactgggggtaaaaacaacaatgtggagacattcctttttcccttaggtttttttttcttttttcttttttcttttttttttgagatggagtctcgctctgtcgcccaggctggagtgcag

SEQ ID NO: 564 - DNA, 4001 bp, Homo sapiens
tgaatgggatgcagaaataatacataaatgagagaaaacctaaataggataatcaggacgactacctctcaaatacatgatttcatttattctgataagaataaataaaataaatggtttaagaatacttcattgagtacatgttaaacaaactcatgaaactgtaagatttaccatgtacaaaactacaaaatgagatagttgtggcattcttgggcattaaataagtacaaacatggacgtgaaacactctcaaaaaactgtgtagttaagacgcagtatgcctcaattctattctttctcaccacaccattcaaacaagaaaatgagaagctgctctttaatcattagtaatatggtgtttttttgttttttttttttgagacggagtttcactcgttgcccaggctggagtgcaatgatgggatctcagctcactgcaacctccccctcccaggttcaagcaagtctcctgtctcagcctccccagtagctgggattacaggcatgcgccaccctgcctagctaattttttgtatttttagtagagacagggtttcaccatgttggccaggctggttttgaactcctgacctcaggtgatccacccgcctcggcctcccaaagtgttgggattacaggcgtgagccatcgcgccggccaatatggtcattattaatggaaacctcagatgagaaaaagcggcaagaaaaaatttagttttacatgtgaagaagaattaacggcaaagaccaaatagcaggcgtggtctttaaaagtttcaagctccatctctggtgagtacagtgacttaattcattgtgaattttggaaataatcctggctggttaatgaacagggtagtgctggaactgcagatatttatactccacaattatgattgctgttataccctacaatgttttttttcaaggaacacatttatcttgatttctcacaagttaatacagttttaaggttcaagtgtcttctgtgacaccttactgaagaagggcaaagctataacagtggtggatttccgtaagtgcaagtttaatgccgcctgggagtcctcacaaaattgactaatctgatgaccaacgtttaaaattgcatacgtgctgaataaaatcctaaaacaaaccagtttcttctttgttaaggcaacctattatatcctagaaaacacgtgaaggcaatgtagctactggttaagcatatgggttgaagactaggatctattctccactactttattaccttgggcaaattatttaaacttactaagcatcagcgtccttattcataaaatgggaatgaatactaccaccttgaaggatcatcatgtggggactaaatgcatgtaaagggtttactgagcccagagtcaacagtcaacaaatggtcgttagtgctattatttctaccatgcagtacgatcgctgccttatttaaccatgtcagttccttccagctagagggccgaagtggcggtggtctgggaagttctttagctgacatgcgagatagacggcgccgacctcggagcagcaaacacctgcccaacaggtaggctgccagctctctgggcagcatatccaggaccaggaagaagctcccagagacaagctccaggtctaagccccgcctcgcgctcctgccggaggtcgcaaccctgcaggagacagccccctcccccgccgccctccgagagcccagggcccggccctgttggctcccggctccccccggggccagcagtgactggaaacgagaaggaactgaggggaaatccctgagtcggcctggccccgccgcgtccgcggttccgcgcgtcacgccgggaaggagttaccgggaaagtacaccggcccaaccggctgcagctccgtgctccagttagttcgccgggccgggagcttcccgtccacaccagcgctcgcctgggcctggggaggggaaagaggaggggacaagcccgaggggagtcacgtgacgcttaaaggtctatcgcactgaaggcgaggaccgaacaggtcgagggcgtctactgggcgaatctattttgacccttgccactcgccgtctaggcgtggacctggggtggttgctatagaaacgaggcgcgctctttggttgcagccaaaaggctgatcgtgaccaaagaggccaaaacgtgcctcctagcgaggcgaagtcgctatgcatgatgggataccagaaggacctcctcgatccaggaaggtgtttccgctcctaccgggagatggccctcgtctagcaacagttgctaggatggggacgcactctctggtccctattctctttaaccctattcgtagaaccttagagcgtcagattggaagtgaccttagggattctttaactctccaactcctgcaatattgatagggagaccgaggtccagagaggggcagagatttgcccaaggcctagaatccagcattccttttatttttgtttacttatcttttttttttttgagagaatccaggacttttaatcccgtttaccgaaaaccgagctccacccaagaatgtaccagtctgtgccttaagcacggggaaagggcggtgggggtggagagagggataaggcacaggtaagtgaaggaaactttctttgagccaatgagatagatcccttgcggatataaagagctttcatatctccctgtcttgtttttatttttttctctttgcatttatcactatctaacatagtatgtcttatttattgatatagtttatcacctgatccttccactggaatgtaaactctaaaagcagggattttgttttgttcaccttcatgttcttagtgtttgactacaggctcaataaatattcgtagaagtgaacgaatggggctgaggttttggtgctcaagagattatattctaaggtggattcttaagagtgtggcttacagagtcaggttcgggtttcaatcctgcctgcctcggccacttagtacccaagtgaccttaaacattcgtttccctgaaccctagggtctacatctgtaaaaccggcggggggtgggaatactttcctggcaggattgtagttaaggataagtgaaataagcatgaaaagtggctagcacgatgcctgggacttagcaaatgctcagtaaacagaaacgattatttttgaaatgtgaaaatgaaccgttcagaacgatgggagtttacaggactagatttctgccgtttttttttttttctgtgtgggaggtgttagggtgggagggagggaagagggaatggaagactgtgtaaggtgggcttggttggatcagacactcgagtttggaacagtcaactgcgatctgggcacaagggcggtgaggggagcttatggttttacttggggtggaggagggggctaaggggaagccatgccccggaggaggttgaatgggcgggacagatcacggctccactcatggtttccctcttgctggaagtgtgacgactccctccggatctctgtaaaagcggggctatagtgaattctggcgaagggcccgcggtggaccaggaactggtgccagaattgcaaaagggcacctgcgcccggagtggggaggtgatgcgggggcggggcggggccctgggggcggggcgagtcgcggaggtgccgccttggggcggggcggtgacagaaggatggatcctgggggtgaggattgactttgggggcggggcgagagtgcgaactggagtctgaggctgagcggtgacgcaaggacgattctgagggtggagcgaggggaggggattggctcttggaggcggggcggtggcacgaggctagcccttgggggcggggcggtggcgcaagattgaccttgggggcggggtgggggcgtgggttgaatcctgggggcggggcggtggcgcggaatggattctggggtcggcgcgaggcgctgaggtgcgtcctgagggcggggcgatgacgcagagcgaatcc

SEQ ID NO: 565 - DNA, 4001 bp, Homo sapiens
aaaaaagtcctgcctgggcgcggtggctcatgcctgtaatcccagcactttgggaggccgaggcaggcagatcacctgaggtcaggagttcaagaccagcccggccaacatggcaaaaccccgtctctactaaaagtacaaaaattagccgggcatggtgacaggtgcctgtaatcccagctactcaggaggctgaggcaggagaatcgcttgaacccgggaaacggagtttgcagtccgccgagttcgcatccctgcactccagcccgggcaacagagtgagactccgcctcaaaaaaaaaaaaaaaaaaaaaaaaaaacagtcctgaaaccatcaatcccttggggatcattttagttttatttaaaatggtctaagagaatgtcccatcaatatcttggttaacttcaataagagcttcaatgagtagaatttgttttcagcccaggacatttgagcatctgtggacaatatttcatcccactttgggacaaggaaaatagaaaataatagcccaaggacagccattacacaattaaaataaacaagcatttgtttgcaaagcagggcatttaaattcagtttgatttcattactgttcaaacgaccccatatgaatctttcctctggaatcctcagttgtccagtattaaagttaccagtgtagaaccaaccactgaggacttcaattataaatatctctgtaaacaattctccgaacctggttccctgcagaagtaagcaaatagctataataatactcctagtccaacatggatatattaaatgactgttttgctattgaaatcgcaaatgccaacagcagttccaagagaggactctaacttgccaaaccttttataaaagacagttgcaagccccgatacaaagtttagaggaatttccttgtccctacatgtaaaggtttatgaaatctgtacactcaagcaaaaggacaaacaagatcaaagccaacacatgaaataaatttcattgtgcaaacagtaaaagctgtgtaaaagagctctagatcccaggttaaaaactgcaggagaaaggtaacattaaccctagcagacggctgagttaagatgtggcagagctttacagaattgcaaatagcatcagcattgcaagaataacaattggaataaataccgtctgcatgctgcaaaaacaatcaacgcacatgctccttcacctctccccctcatccagctgggcagtgaaagcagctgcctctcccagccctcctcccaagccgttcttcgccccacccgctcccctctcttctccacccctcccctcctccttccctccccctccccgcccccagctgccgtattcagcagtctagagagattaggaggagctcgctacagtctctgggcctcaggactgatctaacgtttcgtagctccctggatgagagaaattagagactcgacacccaggtggtattagaagccttcgcctccagcccggctctctcgcaaaccggggctgggggaccacgggggggcctcgggccgggcgactgggaggctccggaggccgcgcggggctcagcgctgcactcccctcgggcagcgctacctgagctgtccatggtgctggcgcggtccggaggctgtcgggcgggactccgcgccgctgccccggcgttcactctctgcttgccgccaaccccgccgcttcccgcacttaagtccccgttactgtccaccagctgcaaagattcataaccatcgttgctggtctttttccggtagctcccgaggaggctcatgggcaagcccggagaaaagagaaaataatcaacctgggaagcgaaaagggagatggaaggtggaaagggctgaagaaggaattaaaaaaaaaaaaaaattaagtgcccgacatgacgcaaagaggagggaaaagaaggagcggccaccggagagaagcttcgccgggcgaggcgaagccgccgccctgggctgagctcggctcggggcgccgggaggagggagggagggaaggagacgcggccgggcgggggcgcgcgtcctctgggccaacgccgcggagccgcccggccctgccgagctccgggccccaggccagcacctcctggctgaggagtgcccggaagcaatcctataggtgtcgccgcgtcgccccgccgcgcagcagggcagcgccaaagccgctggcccgcggggagggaaggaaagggaggtaggaagggaggggaggttcgtgaggaggggggttgaagggaaacggggcggggtggtcgggggaggggactactacgacgtgggttgggagggtgtgttcgcacgcgtgtgacagagaagaaaggggcgaggtatctcggcctgcgaagctttgaggaccaggggtcttgtggtaaaatccagacacacccatttcatgcaacttagcctattttcaccggaagattccgccaaagccaccaggacggtaaccgtcctagagaactgacttgtaactcaattcaacagaaaaagaatgcatgttaagtgccagaatatatctatgctaggatataaaggaagagcaatattttgcacattctccagaatagggatgatccctaagggagatatcaaagagttgggtattctaatactaggaggcagcgtccgttctgcctagagagcagatgtgactgtttagaactctttgttgagcgaataaactggggagaagggcaaggttaagtccgacgcattttcagatccgccaccatttaccttaggacctggagaaaagactgtttcagttagctagcttgaaggcctgcttgggaagcaagatagacaaggattttttttccccatcctctagcctcacgccttatttttctttcacaattctggccaaagaaagcagtaactcataatcagaagagaatttatcatgaagttaattaagctgtgtacctaattttgtatctgtcatcgtgtattcttaaaagaagactccgacattgtataagttctggatctgaacaaaacctggataaactctggtaagtcttaaaatgtaattatcgaatgtttattttcacctaaaataataagatttcagaaggattgctcattctcatcatcttaggtcaagatcaagtaagtcttggttaaaaattatcattttctctactaaaacttggagggactaagtgaggcgcccgtcaagagtcatttgacagagtttcctcaccaaaacaggaaaaaagtacgtgcatgtaaaatgtacttgagcccatacacaaagccagctttgctttcttctcatcttacatggttttctcttgctgtccttatatcaatcacctaaggacacaaaatcaaacaatagcatctaagagacttcagtccagatgatttgggtctcagaaagtttccgggaagctctagctctacacagttctacataaaataaattggactaagagacattttcctgtacaaggatcacccaaacacagattcttgtaggaagagcatcaaccagaagaagtccaaagaaatgttttctaaatccttccagtccttctggggaaacctaaacttcctggccagttgctttcccaactgcattctttgatgaggtatggtgtgacctgaattgcaaatcagagttaatgctcatttataacaagatcaaacaatctgaatggtggcaggaaaaactgcaataaaaattttaaaacaaatttttatactttcaattttccaaatctgtcagattgaattattttagttacttgactaaagtaataattctgtgaagtctagtaaatcttttcccataacatcttaaataatctttctctgtactttttcttttaattcattacagacacacagggacagtaaatacctagtgttcatcatgtgccctgacaaatgctggactataatcattggattaatagaatttagaaccagcctcagtgacagactgagaccctgtctcaaaaaataaa

SEQ ID NO: 566 - DNA, 4001 bp, Homo sapiens
ctctccagaaaccctttctccaaccactgaaaacaacacaggaaaatccaacattcttcctagagttaattttaaaatactttgatttcacacacaggtaatacctactcttaagatgctggcttagaaacaggagtgaacaggtcctcttcccccttaccaggcacatgcatagctgttttcttccccactaaggctgcttcattaaaatttaaacgtcaaaaccacatagatcaatacgtggctgtgaatgatccagagcctatgagatgttaatacaaacaccaccagctacctggcccttttgaaagcctcaattatggaaagtgggattgtttaagagccttcattacagtttcgtagattaaaataccattctctccattggcattagattgtgagtggggtttttttttccttctttttctaatgttgaatatgtatatatcattgcccaccacgaggtgggaatcctataacaagccagagacggtggctgactcccgaggactggagaaggccaagccccgcggcgctgcgcgcagagagctttggggcctgcgttgttgcacgtctcacccaaagaacttagctccggcgtggggagggtcgctgcgcgaaacctgcccaacgggctgcgtgccagcccccacctgcgcacccaagcccccgagcccaaggggcaagcgccggggcctccttaaaacacagcgcactcgaagcgcagactgctgcgcagcggctcgcacggaaagcgggtgaaaagaaaggggggccggcgaaccctaaaattagcgttccggaagcaggggcccggcaccgccgcgcggagacggcgtcctccgcccggacgggcacgcgactccgctgcgcccttcctgggcacgcgggccaggagcacgaccagcgcaataggaaggaagggctccccctggaaacgggatcggggaacacgtgtagcctccggagacctaggggtccatcgctcctcccccaactgcggcagaatatttaaggagcctccgaatttaaaaccccagaatcctccagaatgcttgttgttgaacttaaaatttggttggctcatttttcggttagccctttccttttttgagtttttatttaaattcgtttctctcttcccccatccctctaacagaattagagtgttgggaggtgagggggaggtaaggtgtggaggctgatggagtgggggtagtttacatcccagcatttctttgcaagataaacagttctgaaggtcagcgacggctccccatggagcgcttctaaaaagattaatgttcattaaaggattctccgtcagcgtttgccttcagaacccaaactgttttaagtcccaattatttcagatattccaattctcataatgcattgaaaacctgtatattcattattaactattgtgaacacccccaaaataaaattatcaaaaatctgggagctagtctaaggaaatctatgaaagctgtgttactcagccaagattaagaatgcaaaaatagggttatatttaggactataaaaatggaaagctgaatgacacaatatttggaaactagaagctagtcattttttaaagtcatcatgtttattatataactagaatgttaatataggtatggtaattttaaactagccattaatacaaactaaatatgtctgtggagtgacatcgcatccctagcatcttttagcctttagccctctcttagccatctttctgcagtccgccccttacctttattttcagaatctttcattctctgcttcctccctctgctgcaaatgagcaggaaagtccggctgattctgcaaccctgacttttgatttgtcattcacagtcagcggtctcgggggcgaagtctctcaacggaggagcactcgggctatgataattgcatgcaagtcggtgtgcggggttataattttgcttatgctggagcggaaaggatggggatgaaggcagacgtaaacacaaattccaaaacatggcatggaaccggatctggagccgaggcttgcctttccttccctcaggatagggaaccaactgtttagcgcctcctcatctctgaattgaaaggggaatgtctgtgccatgcaccaggtttattttcagatggtaagtcagctttggaggaggattcagagccctgtactttcattcattcattcaacatttattttacctctctgtggaccaggctgtatgctaagtactggggatacaacagtgcacaggaccagccctcggtcctcacgctgctcacaggctgttacagtacagaggcatacagggcaatataatgggctgtgtctgctgcatggacacaggttattgaacccatttcacccaggcctaagttgatactcaaggaggctttagtgactggttgtaagccattgagtggcagactaggaatatgtatgaggatgccaaaccataacacccctctgttggggagcaaggaggattcaagtaaatctttcagtcattcaattcaaacttactttgaatcattccacagctcagattcattcattaattcaatcatttattcaacacgtggttatttgtgccaggcactattccacctcttagggtttcaggtccctgccttcttggttattgcactctggtgggaggattcagacaggtaatatagacatataataaatggcaataaatgctgtgaagaaaaatgaaacatggtaatgaggtaacaggggtgccattttaggtagggttgccaagggaggtgccatttaatttgttttatggataataggtaagagtcatcacagtctcttccaaacagcttcactcagaaattgttttttaagttctgaaccctcccagtctcctctgcttcatgcatactcactgatggatggtgtttattccccatgatacagattagcaaactggtatccagaaagactaactgactcaaatacataacctaactaaattggaagaagagcaacagaaaggaatacatcttcctgttactcatcctcagaaattactgagttaaatgcaatattgatattaaaaatttcctggactaggcattaaaagggttgaagacctgtctctactgtctctaccttttattagctgcgtagtgtagggcaaatgacagaacctctctggcatcagttttctcatctgtaaagtgggaataatcatagctgtcctatatatgtactgggctgttcatatcatcaaaagggagaacagaattttgtaaacaaaacactaaataaatgcagggtataattaccaactgcttgggcacatttaagaggactaattgtcagtgttcacctgttcattacttcaacccaagagtcaaacatagctataatgtgagagctttcatggctactaaggacttcttgttgccacagctggaagattccttgaaagttttgggaaactttaagtatttgtttttggttcccatctttccttggcagtggataatatctttctgctgtctttgacagcttaagaccaataaggaaaatctgccttcattacaactccttactggccaccaaatgcgacattggctaaaccacatcagagaaaccggcatctttatctccaaggaccaagtccaggatagccaaaatgtgcccaagaggagcactttggggggctgagaaggtgagggagtaggtggtgagaagccatcattcatgcactcttttattcaataatattcatggtgccaggcactgctatgaacactaggaatgacacggtgctgaacaaaacattctctgtcctcaggagcctgtggcctcaggtcaagaggcttccactagatatgccaatttaccaaagtaggcaaagaaatgccaaagcgtggatttgaatagtagggcaagagctctaaagcagaagaggactgggagaggtggctgacgcctgtaatcccagcactttaggaggccaaggtggtag

SEQ ID NO: 567 - DNA, 4001 bp, Homo sapiens
tttcttatacaataactttagtcctcatgaaaatgtttattttaaaattaactctcttgccaagcacagtggctcatgcctgtaatcccaacactttgggaggccaagacgggaggattgcttgagcccaggagtttaagaccagcctgggcaacacaacaagaccctgtcacaacaaaaaaaatacaaaaatcagccaggcatggtggcctgagcttgtagtcccagctactgatgtgggagaatcacttgagcccagaaggcagaggttgtgcattccagcttgggcaagagtgaggctctgtctcaaaataaataaattaaattaaattaactctcttgtttttacagatgtggaatatgaagatctgcaaaattaatgtcttgaacaaattcaatcccggccaggcgtggtggctcaagcctgtaatcccagcaactttgggaggccgaggcgggaggaccttaagtcaggagatcaagaccagtctggccaacatggtgaaacccccgtctctaccaaaaatacaaaaattagccaggcgtggtggcaggcgcctgtaatcccagctactcgggaggctgaggcgagagaatcacttgaaccagggaggcagaggttgcagtgggccaagatcgtgccactgcactccaggcctgggcaacaagagcaaaactccgccttaggaaaaaaaaaaagaattcaatcccagtccagtcaggttaactgtcttccaagaatttttttcttttttagacagtctctcgctctgtcacccaagctggagtgcagtggcgcgatctctgctcactgcaagctctgcctcccgggttcacgccattctcctgcctcagcctcccgagtggctgggactacaggcgcccactaccaggcccagctaattttttgtatttctagtagagacggggtttcaccgtggtctcgatctcctgacctcgtgatccgcccgtctcggcctcccaaagtgctgggattacaggcgtgagccaccgcgcccaaccaagaatttttttttctatcctttttttccttctttttaaagagacagggtctcactctcgccaaaaatggagtgcagtggtccgatcataggtcactgcagcctcgagcttttgggttcctcccgcctgggcctcccaaagtgctgggattacagatgtgagccactgtgcccagccccttgcaataatttaatctgagattctgactccaaacggcatgcttttatttcatttattcattcattcactcaacaaatatttactgagcatccactacatactatgcgctggagatgcgatagtaaaggaggctcagaacaagcccactgctgtcctaacataccaccaagcaagctgtaacctactgtaaggccccaaactatttcacctccctaaagctcaggttcgtcatctgtaaaatgggggtaatataatgcctaactggcatgatacacagtgcctggcgttcgtgaatggcagaaacaaccactaaaacaactcattacaaaggactaagaaacgtctcgggggccaagaaggctaagtcactcccaggaagggcccagcctctgccagcccccgactccgcggacttggggcactctgcccgcgcgcccgcactatgttggacacactcgccacctccctcgatagatcgaacaccattccctctttcgttgccccgggggatctcccagcagctatcagtgggagacgctcacacacccccagacccccgccaccccgaagactggactgaaggaatcgcccaacggtccaggccaggcggccactgcctttgtccactgggaaagcagatccgggagcggtcgccccggtgccactactcctcactctgtgttcacctcactgtagaaggtcataaatgcttcctcggtgctgcctccgccgcctgaagtcccgctctctcctgaagccgccatttccccggcccagccaccacgtgacccttctgcgcaggcgtcgcctcacgtgattcttacaggtccgctcctctagccccgcctcccgtctgagaggttcttaaagggctcgcagcccagccaggcactttaaaagtaggtgggctttttaaaatttaaacgaattacacataacatataattaaccactttaaagtaaataatgtgcttaagttattgttaggtaaaaaataataagaagaataaaagaaaaagtgaataattcagtgggtttatttatttatttatttttgagacaggatctctgtcgtccaggctggagtcgagtggtgcaatcacagctcactgcagcctcgacctcccaagctcaagcgatcctctcacttcagcctcccgagtagctgggactgcaggcgcgcgccaccatgcccggctaattttatgtacttttgtggagacggggtcttgccatgttgcccaggcctcccaaagtacaggaattacaggcatgagccaccgcgccggaccggctcagctgtcttcagaacattcacaatgttctgcaaccaccatgtctacctggttccaaaatagtttcatcacctcaaaaggagacttagtatctactttttttttttagacggagtctcactctgtcacccaggctggagtgcagtggcgcctccccggttccagaaattctgccttagcctcccgagtagctgagattacagacaaacgccaccatgccccgctaatttttatatttttagtaaagccggatgttcaccatgttggccaggatggtctacgatctcctgacgtcgtaatccgctcgccttggcctcccaaagtgcggggattacaggcgtgagccaccgcgcctggccgaggagacctagtacctattaagcagttactccctattcgccccctctccccagtccctgaaaacaagcaatctgtgttctatctatatggatttacctattctggatatttcacataaatggagttaaacaatatgtgaatacgtatttcacataaatggaattaaacaaaataccaggtagggctgctattttctcaactaaaatataatcaataaagccagttttactatttcatagaaaacaaagaaggttttgttttgttttgtttttttgaggcagaggcttgctctgttgcccaggctggagtgcagtggcatgatcttggctcactgcaaccgccgcctcccaggttcaagcaattctcctgcctcaacctcctgagtagctgagattacaggcgcatgtcaccacgcccggctgatttttgtatttttagtagagacggagttagtcaggctgatctcgaactcctgacctcatgatccatgcgcctcggcctcccgaagtgctgggattacaggtgtgagacaccacgcccagccccaaagaaggtatttttataatcatcaatcaggtagataatctggcccaattctctcatctaaaaaagaagaaacagagaagagaaaatgagttagagaagagctataaacttcatgagagtaaagactactgttgtcttgttcacattcattagatggatgaagggaggttaaggtcaagctttccctagactcctacttatcctttttttttttttttttttttttttttgagacagagtttcgctcttgttacccaggccgcagtgcaatggcgtgatctcagctcaccgcaacctcagcctcccgggttcaagcattctcctgcctcagcctcccaagtagctgggattacaggcatgtgccaccacgcctagctaatttattttttatttttatttatttatttttgagacagtttctctcttgttgaccaggctggagtgcaatggcgtgatctcagctcactgcaccccctgcctctcaggttcaagcgattctcctgcctcagcctcccgagtagctgggattacagatatgcgccaccatgcccagctaatttttcatattttttttttagtagagatggggtttctcca

SEQ ID NO: 568 - DNA, 4001 bp, Homo sapiens
ggggtggagaggttcatgaaggtgtgtgcctgcgtaggcccccatttcccttttcctcatagccttaccaactgtgctgtcaacttattacataaaaatagatgaaaaggcatgtccttttatcaatgtggctgcagaagaaaaaagcaagaaaaggagatcatgttgggcaggggtgctctgctatagcaaattctcaaggaaggcctggaagaaatgaaaggaaccaggagaatatcaaggggagaacatctttggcagtgaaaacaccagctgtcagggccctgtggtaggagagtgaatgaggcatttcagaaatagcaagtgaggtccctgtggattcagcacagtgaacaagaaacagaataacaggagataaggtcagggatacatcgtaggccagatcatgccacatcttccaggccattgtaaggatttttgattttagtctgagatgggaagccacaaaagagtttctggcagagactggcatgatctgacttatgacttaggggctgtatggaggatagattctaggagcagagtggaagcagtgttttcagataggaggccactgcagcagtgcgagtggccaccagtgactaggagcaagatggtggaagcagaggtggtgaaaagtggttggatttgggaaagaatttgaaggtggagccaaaagaatgtgacgaaggataggacacatgctgtgagagtgatcaaaaggaatgaaaggtggtttgagtccctagtaaaaaggagaatacgggggatgagcagattggggaaggaagaaattgtgatttagtttgaatatattgagtttgagatgtctattagatatcttcatgaagataatgaggaagcagaagactatatggtcctggagtttagtggagaagacagggctggaaatacacatttgggagccatcagcacataggtggtatctaaagccatgagattgggtgacagcatgcaggaaatgagggtagattgagaagaggtctcccaccaccctgccaggatccagccatatgtaagttctaggagctctgtgatactgggaggaaaccccagccaggaacagaggcagagtgcctccccccacactcccaaaatccacgatgtaaaagcttaggccttctcccagccactgctcctactttcttaccttgggggtagtatggcattcaagatttcttctgcctgctttgtaggatctgggacacagggagttgaggggagcttggtcttgggtggctgtggggctgaacctgaaggtccaggctgctgggggctgactttcagtagccgagcctgagatgaaggcacaggtgagggcaggaaattgttcaggagctcagctccacacatccccaacctgtatattgctccaggtcttctgcacagccctcccctcttcctagcctactttgggtcggtcttctcagcagaaattatgtcacagagctgaaggaggccatgaagtctggccccaactcaatgcttgaacaggtgtttctggcgcatgtgctttcacacctctggtgatggggaaatcactacctagtcatctgttcttggacccgcgtaccattaagaagagtgagccccatccatctccctgtgacctccttccccatcctaaatctgccctctggggtcacacccaacatctgggcttcctatacaatcctctcaccctccttctctgacttcccaattccctttactcccagtcgctgcaatccccgtcccttgagattcctgaccctccatgcgggaatgtgtctttccctatcggagtttcgaggctcctttgtctcccgagcccccgtctttaccttggggctccgtttctccgtgttccggctcaccagcactggggtgtcgtacttgagcaaagagtctgcgggcggaatcatggcggaggcgagagtagcaacccagcagctgccctgtccagtgtgggccttgtttgccgtcaccatggaaaccgccccctcactcccgcccccgcgcttcttggcctgggcggagcttcgaagtggggcggggccaacagccggcaagtttcattctgtgcctcctgggcagaaacctcttgtgcctgacttcttaggccttctgctcaccggttcgtccctgtactcttggaggcgaggaaaacggcagttcgagtccctatgctccgtctagctagcgatttgaagtgggcagatcacctttgccatgctccaattttgtcacctgaaaaacaggagtcatctcctgacttctcatgaagggttaagggacaattcccaaaggaagtcatctggagttcctaggttttttgaaggttttttttgttgttgtagttgttcccaaaatgtgttcattgagattgtttcccactcatcttgattcagagtgcttttagtgctgcttcctcctgaaggaacatccttctgtaagccttacttttcctcctgtaggctggcagaggacagtggagcagccaacacacaaaactgccgtttgtgcatggctaaagactgtggtgattttatagcatcctgggcatttcacatccatgaagtaggaattggggctctgcaccaggcgtttcttcttgtgtttcctcttctcctcttctggggagggatgaaggagatcctttgcgagaggcatgttctcgtgggtaggtcgtcaccgcaagaaagggcttgttttgatttttaaattgagacggagtctctctctgttgcccaggctgaagtgcagtggcgtgatctcggctcactgcaacctccgcctcccgggttcaaacgattctcctgcttcagccttctgagtagctgggactacaggcgcgtgcccccatgcccggctaaattttgtatttttagtagagacggggtttcaccacgttggccaggctggtctcgaactcctgacctcgtggtccgcctgcctcggcctcccaaagtgctgggattacaggcgtgagccaccgcgcccagcctgaagtatttttctaattaaatggagaaatgacaaagtaggagccaatgggaaacctcccctttgccccctgaagattcgctcaaaaatcaattcacaaaaggcagattaattggagaaaaggcatacaaatgtatttaaaatgtatacacggggagaatcacagtatgattacccaccccgaaaagggttcagaagcttatataccctcctggtaaaacaggtttgtgagggtgggagaaggaggaattctgttcagggattactaggcagaatgaatgaataagggaacagagataaatttgtaaatagttttttgtgtttttttttttgttttggtttggtttttttgaagacagggtctcactctgtagccctggctggagtgcagtggtgccatcacggctcactgcagcctccaactcctgggctcaagcgatcctcctgtctctgctgggaccacaggcacgagccactagcccctgccaaatttaatttttttgtagagacagtcttgctatgttaggcagtttggtctcaaactcctggcttcaagcgattttcctgccttggcctcccaaagcgccggaattacaggctgcagccaccgtgctcggctgtaaatagctacttttgacagtataagggtctctggtcaggtgtgattacattcttgggtggagaagaaagaaacaattattccttttggtagtctggatcttaggcagataaagacctgtgctttgggagagatgatgggcactggaaaggaacattgaggcttcttcagttcagcttgtcagtgagccgtattttggggttttggtttctgagccccaacagcattgcagaaagttcaggaaatagaagaggaaaagctaatgatttgaaaagctaatgatttgcccatgggttatcatctctgattgcatttccatttcttcctcccttctatttccaaatgtaaatgtaattatagtttgcacacaattttg

SEQ ID NO: 569 - DNA, 4001 bp, Homo sapiens
cagaagagtcactatttctacaagcccaataaaagaagcaaagagacaaaaaggaagctgtgctaaagcatcctagttaattacgtttgtaaaaatctctagagcaaaataaacaacttgaaagccaataaggaagaaaatagaaagatttttatcattttgtgacataccaaaaagaactttgtaaaacagacatctgactatttttgtgtttagaaatttatcatggtaggtttggtatgatagctagactttccagtttgcatatgactatgcaaacataagattcactcgtgtttgcctaagtgttagattaaaaaccaaatgccttctagttatttttttttcaaagtgcctattttaagaaagcatactgttgttctttgggtggaaatagaatcaatacctgtgtcaaggtggaaaatattgaaagttctgtgtgtaacagaactggataaccttcaagagttatcctctgtgcagatgagtgtgccaatttgctggaatcctatcctcctggtacaaatgccataggatattagggcatctgttggccaagagaacccctccacttgatattgtgccctacttctttagagccatttccccaaagccttgtggcagttagcagggtagagcaggaatagtgtgggagattgttggaggagaggttgaagaatgtagcatgttatgaaaattgttgggttcccagtaaatagggtattcaggagagcaactttgctaaataaaaagctttcaaagttcatgacctttgtcagccattacaaactatattctaaatcagaggctgcaaactgacatcctctgagccaaatccagcctgtggatacattttattgcgcttgcagagtattttttaaactttgaatttagtgccaacatttaaaaactggggagtttttccacaaatattaattttcaacatctcctggaaaattgtgtccgtatcaggcaagttgaatagtaactgcctcctttcacttgctgacatcatttgcctgctcccttgaaggcatttgaatttggaatcttctgaatacttgttgccatggaaagttatttatgatatatgaaattgaaaaaaggttgaaaaatagtcattacagtagttttgtaaaaatgttttaaaatatgtattttagaaaaagtagaaaggattaaatatggtttatctaatgggcattaggattatagatttttttgtttacctgtattttgaatttttctgtagttcacaaacacatatgcaaagtttagaaataaaaaaattgtgaaaggataataaaaattatatgtgataatgtaaataacatgataaaaattaatataaaaagctatttaaaatactttttcaaaaatgtatatttccaagggaactgtatgttaagaagagctcgttttactctctataaatcatacttcaataaatctgactaaaatgtgtttgtacatatatactacatgcacatatacatatatacatattcatgtgcatatatatatatatatatataaaattgctggtgtgtgtgtgtgtcctcagtatcagtacctggattcctgctgctgcaaagcaaatattttaaaatatgttaagaaataaaatgggatttctaaaaatgagattgccaagtcaaatcatataattatattataaccagtgatatagaagtcatacatttcaataactcaaataaactattaagaagaaaggctatctatttagtatggaatataaggatactcaagatgaaatatttaagaaattgttgatttccagtaggaaagagaaaccaagaatctttgtcatacctttggtgtgtccatactttctgctgtaattcacaggtttagggactccatcattgtatattagataggctgtgttgttactctgcaggaatatattagggttataatggcgtaaatcttccacttacaaacgcccacaacatttctaccagctacccagcctgcaatacattgctttcattaatacacatgagaagtcatctattcccctaataggcagcttccccatcaatatgaagcctgtgacatgaaagacaggggaaagaaagtccatttttaactgtgcatgatttttactcatgtgacaggagccctgtgcattgtgatctgtgtgtgagggcaatgttcctatttctcttggttgttttggaaccaagtttctgattaagcaaccagtgtataataaaggagtactgaattatttgttcaggaaatgaagtaggaacaaccaaccaaggattacatctgaggttttttccattgatattataggcacagtgcagaactggctgtcaggatctgattttctctgcacactttgtgcttcacttcactgctgggtagtagcgttgtgtttaatcaggatccctcattatctgctctcccttcctcccattatgagaggatttttctgcaatccatttttcagtgtcacttcacctttccaacttgatattttcctgcttaaaaaaagtggtgaaatttactgtgtgatattggatttcctctggtaaggccaaatatgagtcaattttcaaacagccaaatcttagagccaaaataaagctattatttcgatagtatctatttttcatgttttagaaacttgctaatatttgttctaggtggttccatttaatttgtgtgatgatacaactttaattgaagccaataatgtcaatattaaaaaaatctgagtgacataattaaaagcaggaaaggataacctatgtccttaaaaaaggcccttgcttttttcttagaaaacaaattcaatgaagaagcctctcacagttgcttaattatatgatgtgataaaatttttttttcaatgcacaacatagtctgttggagcattcttgtctactgtgcttaggaatgccccgaaaagtaagctgttttcttaccttcattttccataattgatcatagctactgaatggcattcatatcatcatttggagaactctgaagagttagttactctgtgaacctgcattgaatgtggtaaggaggccatttgtgtgcctttggggtacaacatggaggaattctgggatgatccagtgaggaatttattttttatgataaatgaagtttattgttctaactgagtgtaactgccagctgaggttaagtggattgtagccttagttggaagagaggctattgataaagggaaaagatcatggacttaagagtaggtagatgtaggcatgtgcctttgaatagctttattcctttaacacatatgttcagtattgttttgactattgagtgttgaacaagaggggtacagtctctgccccctgtctagcagaaaatatagtcacacaagtgcaggcaatatagtttgataaatgtttatgaaggtacacggaagattcttatttgtaaaggcaagagaagggaaacaattccaaatgtaacccagctattggccttggtcaccttcacatttgagatttaaaccagttggtctaatcttgcatttcactctctgtcagaggttcaattccaggtcagggggtggaggagtaatattctcacagtcacttctggcacataattccagcttccaaagaacactgagtcatacctggatatcaccaactgctgttgctctcttcttttggctctatgccaatcaggcatggaaatcagtccctttcctgtcattttccccccagaaccaatcactcaagacattgcatgtggcaggttttactaaaggtaagaaatattgaatggttttacatcaccataaggccttaccccagtctttctccatgtttcttatgctttttaatccctggcttctttctgtcccttttttgtttagcagagcagtttaactgtgtctccctgctagggtgtggggctacctttgcaccttcaaagatcattattgtattccggcaagtgaaggcctatctactccaactaag

SEQ ID NO: 570 - DNA, 4001 bp, Homo sapiens
tcccattaacccccaactccgtatttttgaaaccaaatttataatattttgctccaaatctgctcatcccacactattagggaacatattcatgcagtctcagaagcagaagcctaaaattatttctttctttttctttcttgttttgttttttgtttttttttgagacggagtctcattcttgttattcaggctggagtgcaatggcacgatcttggttcaccacaacctccgcctcctgggttcaagcaattctcctgcctcagcctcccatgtagctgggattacaggcatgcgtcaccatgcctggctaattttgtatttttagtaaagatggggtttctccatgttggtcaggctggtcttgaactcctgacctcaggtgatctgtctgcctaggcctcctaaagtgctgggcttacaggcgtgagccaccacgcctggccaacctaaaattatttcttaacatctccctttctcctactggctgcagcccatccatcaccaagtcttctcagcatgtccttctttctatttccatgaccgcttctttaactcaggtctacacctcttctcacctgtaatgctgcaaaagtgctcctggtctcagtgattctaggctgctccccatccatccagccctcatagtactgccaatgggtttcctaaagtgcaaatctgaccattcacacccctgcgtgaagtcctccaatagctccctttcaatgtcaagttcaaaccttgtagctcagcacacagaccccttggctgtccccacctctctaacctcacctccggtcatcttcctgtattctcctgaagttccagcaataccaaactactttgcaactcccaaatttccatgttgcttcttgcctctctacctcctcattgctccttcattggcctgagatgctcttgcacatcccttctttttccagctacttcttaattgttcttaaaacttagctcaaaaattacatccttagagaagttttctgggctctctgttccccagtgttccacctatgcccttaccacataactgtgaggtccttgagggtaggaaccatgtttcgttcatatttatattttcaaaactccacacagacctctgttgagctcagtaactgaggaaagactgactactgccttgagtatatctgtgttctgtagcctgaagtttacacaaaaagcttgacaccaaccattatggcaaacctaaatatcccaattaaagggtgaaaaagtagttaaagctttaggagaacccatgactataatgcaacacagcatttaatgtctttgacactgtacaacaggccagtggcctacgtaccaatcatggcaacagctgcctctgcttccaaacaaaccgatgttaggcaaacagtgctgtgtgtgaccaggtcccccttctctttctcataaggagcagcacatgctccattttcagaaaaaaataatctgccttctttactctgtcagtctttcaaaggatgttggaagtgttctgttaggaaaagccatgatgtaattaaaagaaattgccagctcacagaagctgtcagctcaatcccacttctgtggctaccagccttgccccgctgagaacagtgaatcaggcccaagaggggctgctcagctctttttcagggggaaactccgtcactcagaagcctacccctgcctgggagtttggccgatttgcacactttaacttcctttatttgtaaagggaggaaagagaatggacattccccttaggaacttcgcagtgagccaggccaactctgtaccgaggctgtttgcatgcagcagtccttccatttcatttacctaccagtccacagctttcccttcttcatttctgcatgaaattgttgctgcccccagcaccccaaagaggccaaggaagagcaaagcaaaggatgttcttagcagtcttgccatcattttctgtttcatttatttcatgccacagcaggacactttccccatagattgtggagtctgagtttcaaggcgctctcaggctgtgctggctctgacgtttgatttgatttacctgtgctgttcgctgttcggggcattttcagagtgggatggatcccatgtaattgtgcgattctgtcacaacatgccagcgtgactctggatgcctttgtgctgaattgttgactggtttgcaaagtcatcaaaaagttctgcagaaaaatagggaaagatagttcactctttggagtgaacattgttgtatgaaattcattgggcagggggacttcattttaataagtagatgttaaatatatttcatgtcttctcctgtttgactcaatgaatgagagcaaatgcaggtggttcgtacattaaacagaaatgataaaaccttatgtcttagtaataattaggatctgtcacttaataatctctgtcttaaggaaccagttgctaagggatacttcaaagggttgcttcaaagtaacagtaaatttaactgtattttaccaaagatgtttacatattctctccatcttcctggttttagccactcaatgtggtgcttcaggctgctatgcaataggtaaacatattgatcacccactcttcaggttaataaaaaatgttacaaacatctattttgcccaaactatgctttctcattctcgaagctgaatctgaagtagaaaaccaaaataaaatggcccactaccataacaactataaaaaggtgagaccaatttctttgtgaatcagggaaggagtagatagacatatgaaaataatttctttaatgcatacttttgcatcaattattaaagctgccatcataataaatagcagtttacatcatgcctggaaataatgctgcccctaatctgtctctctgataatcacaatgataactataatagttccagatcagaggatccagaccaaactgaacccttgtaaatcagattacctctgtggttgcactagaactgttcacaattctcaggattcatagaaaaggggaaggcttgtgtctctatcctaagacagagttttgggaggaggactctgtaccacctgcccaattacctgtggtgcctgcaaaaaaggcagaattctaggacttattccaaacctgctacatcagaattcttccagttgggctcaagaatctatatttttaataagcttattggtgatgctggtgtaccctaaagtttgaaactcactgccctgaggccaagactatgctgtatttggtagattcacagctttctgcaggttaaatgaagaaatatttttcttacccattcctccattggtattattattattattattttgagatgaagttttgctcttgttgcccaggctggagtgtacccacctcggcctgggaatccatccacctcggcctcccaaagtgctgggattacaggcatgaaccactgtgcctgttctcattttgttttatatattttcttcctgtgttcagaaaaaaggatttcaacaaccccaacctttttgtcaatttttaaaagtttttttaaaaattatcagctggacgcagtggcttatgcctgtaatcccaaaactttgggaggctaaggcaggaggattgcttgagcctgggagttcaagaccagccggggcaacatagcaagaatgtatctctacaaacaataaaaaaaaaattagtcgggcatagtggcacatgcctgtagtcccagctgttcaggaggctgaggtgggaggattgcttgagcccaggaagtggaggctgcagtgagccatgatggtaccactgcacttttgcctgggtgacagagtgagattgtctcaaatatatatatatatgtatgtatgtatgtatgtatgtatactgagagagagagagagagagagagagagagagagagagagagagagagagattactcttctctgttaaagtaaacacagagtcttgctgtgtcgcccaggctggagtgcggtggtgcaatctc

SEQ ID NO: 571 - DNA, 4001 bp, Homo sapiens
aaatgccctggctttggaaagccaaaaatatgttaccaaaactcactctttggatgccactttatatctcgtaaatttcattggcaacaaatcaaagaaagtaactgttatatgtttgaaatccatcacttcaccaaaagtctaagatgacgtaggcaaaatgctttaccttcactttgttcattaatcaaaaaaaatataaaaatgaggtgtagtgattaagtgaattactcaaggatacaagccaattgtcagcaattttactttgttaggcttcttatctttctagttcatacaggaaaaaaaatatcatctgagagatggaatatcatttgagagaaaggaatatgtactttatgaacactaacatttccaaaggaaatgtgggaatattcagctctaaattctacacatcaccaagcactaacaaaaaaagaaaaaaggaacagaaacaggaaccttctgcatcccaagtcacgaatgagccaaataaaaagaataaagtacaatctcgccagcattttttcttggatactgtacatttctacctggttttctattactaggaaacagatttcagttttcataatgcttttaaatgggcttttcttagcaaatgtctgcactcttcaggcaaggccattaaggtaacttaatccctcatgaattgctcagtggaagaaatgctgattcctaattcgaaaattaattccttagctgtttctgtattaagagtcatgaggaaaaccacagctacaatttagattcagaatgttgtcttgaaggctagcaagacaaataggagcttagagaacggaagatgatgctgggggagggggcgcagagagagtgcgagaaagatgctggtcagttccgagatgatgcaggaatgacatggcacctggacaacataagtccacgtccaccccctgccaagtctgtgcctcgggctctctcacaattgcctgaagctgtgaataggtgcacacgcaaacacaccaccttttattcttcgactctccgggaggagaatggtggggaagcgtctctggataaagcttcaccacaacaaacgacgtctttctcctcgcaccccgcctccccagctagaggcaggcaacagtagacagctgagaggaacgagaaccctggcgagaaggaaagcatctccacctaagggagggggctcgggggataaagccccacagcctcacagggagcctcacggagggcgacaggaaaaggaggggggtgttgagctgggaaaacaggagaggggcactgggaagctttcggcgcgctacgcagggaggctgcccggggctggcgcgcaccgagggggtgggggtcgagcccggggcggacccctcccccgactccccgactggaggacagggaggaaatggctttgtatcgcacgatgaaaggcaggcaggagggccaccaggcggggggtggcaggggacggaggatgcccagagctggaggaccccgcccgccccacggacaccgccactctgccccccattccactctgccccccattccaccgcagcgcctggtccatccaccctctggctcccgctgcccgtccacgttccaacggcccgcagcggggtcgccccactgccgcatccttactccgcgccctgcgcgcttacctgcccacgaagttctcgagcaccgagctcttgccggcgctctggccgcccaccacggcgatctgcggcagctccagcaggcagctctgtcccagcgccgaaaacgcgtcctgcagacggttcaccagcgggatcagctcctccatctcccggttccccatcttgcccgaggggccggcgaccagctggtccctgctcgcctctacgacctgacagggagtaggggccgcgctgccctggctgctgctgctgcgccgggctcagccagccaggtcctggcgcagacgtcggagcccgccgccagcccgccgcttggctctgacagctaacgacccgcagcgcgcctgcgcgggcgggcaggggcgtggcctatctccgcgacgccccgcccccgccccgcggctgccccgccccgggcttcccatcggaccaccaggccaggcgcgcacgcactgcagcccagctgcggccagatgccacggcctctgcgttctgtggccaaggctcagaggccaagttacagcgccgggtcaggaaatggcatgaaatcagcagcagcggcagcgttgttctctttcagcggctaccaagccaaagcccagtggaaagcactatcgccgctaacaccaccacacgatcaccagcaacagcagcaccgccgccgccaccaccggggcaccgctgccagactacacttcccgaaaggaaatctcctctgtcacgcccttctccagaatccgcgatgactcctcccagggtggcaggcctgttggagtctaaattcttcaatgtgacatccatctaaggccctgagtggtctgaccttacttaattcttcatctgtaatgactcgtcctccccagccccgcataagcacaggtagagtctgtagggtttaccgccccgatacacccctttaatcactctggcctgtgagactcctcatgccatttgccctcccggtctatctccttctaccggatctatccagaaccaggtaccctggacgcattctgtgaaatttagcacattgagaagtgactgtgtgtggggtcctgtgcctgatgatcgggacacaaagataaatggccatgcttctcttagcctccacagacggttcctttttagtctgctcctcaaatactgatgcttcgcagggtttcatatatgggcattttcttgtctaatgtttgtcctctgcctgaggactttcccatagctttaactctgaatcaaggctggcgactacagaaatttacattgctagaccctgtctctcttctgcaacttagactgtactccaagaggagcccagaatactacctgagtgtcctacaagtactacagactcaatttattcaaaactgaagtcatcttttgtaatctcagcatttaatgtacagttccttctaactctaaaaagacatattaaaatgttcataatgtcaaaaaacctgaaaacaacccaaatgtctatcaacaggtgaatgaataaacaaacgtggtatatatatatagtgaaataatctctgccacaaaaaagacttttgatatagcaacaatctcagatacattatgtagaatgaaaaaggccaaagaccatattggtttgatttcatgtatgtgaagttctacaaccagcaaagctattctatggtaatagaaatcggaactgtggttgtctttgaggagtggagattgactgtaggaggcatgaggaaactttctggagtgatggaaatgtcccatgtcttgactgggatgtgggcatacatttgtcaaaactcctcaaactaaacttttaagtgatgtgcattttactgtacattacatctcaacttttttttaaagcagcagaaaaagacaaataaaactgaatgcatctccactgaagtggatctctattagaatgtctgcccaggaaaccttttctaagaaacactccatccaatgcatggttgtagccagagcagtcatgaagatagaaaggcatgaagaaaaactgagccctggccatagctgtgtgcaccagattgggcacctgacttgagctttaccaatcaaagccttttcccaggagtatgcaattgagagagagattggcctttgtctgagtgactgaactataagtgaggaataacattggcaactatggttagtaagatttcaccagtagaagggaagtgctcatcttcagagaaagagaaaagtgaaaagacacaaggagaggagcacagggaaagaagagggaagatccggatagtacctgtatcctcaatcttgttcatgtctgatgtccaactgtaatcctgtcctcagttccttgtacaacctccccgc

SEQ ID NO: 572 - DNA, 4001 bp, Homo sapiens
tgtctggtatctgaatcctctgaattcacaggtgtacccacgatctgtttctcatttcctggtacaatcttactatctttcttttcagtttgtgcctttaatttcctctgcatactcctggttcttctagttgcaattccagagaatgaaatgtctgagcttgatgtctcagcatcagatatagcttctgtatgagattcttggcttggatctgtcagagatttagccttacttcttctggctcctgtagttttttctgtaggaagcacaattctagaaatacctgaaacatgagattctgcttcagacactatttcttcagtgtaagactcctttgttggagttactttcggctttttcctaacactggacactggggagcatgcaattaagatctgccttctcctagttacccttaaaatggtatcatggtgctcagacacagaataatttgactctgcctcagaggtttctccatccgtagatggttcagtcccctttggtagtgagcctgtagttctgctcttcctctttctagctttaggagttctagggattaaactttgcttcccagtggtctgtgattcagcagtagttcgggcatcagatccagtactactttctggatgcgcttgaatcccattagcagcaaaactctgcaaaccagagaaaacacactgtaatttaggtagggctggaacaagggcaaagcaaatgaaatactgaccccaaaagctaaaacccagtaaacaagattacctttaaaacaaaaaacaaaaaaacctgcccaactcatgatttttaaaaaatcaaaatttggccgggcgcggtggcttacggctgtaatcccagcactctgggaggccgaggcaggtggatcacgaggtcaggagttcgagacagcttggccaacatagtgaaaccccatctctactcaaagtaaaaaaattagcggggcgtgttggtgcgcacctgtaatcccaactactcaggagcctgaggcagaagaattgttggaatccgggaggcagaagttgcagtgagccgaggctgcgccactgcactctagcctgggcgacagagcaagactccgaatcaaaaacaaacaaacaaaaaaatcaaaatttaaacactggagccaaccctgcatttacttcactagcctcatccttcctagatgtaacttcagaagcagaacgattaaaatttttctgtttaaagtcaaatataatgggtagaccaacattctgacccacctatagaagaggggagaaagggaatattaactctgaacaccgatgtgtttaggaacacactgatggaatcagtcgccgcccttacctttacgtacaggaaaaaatcgccgccgctccgttccctgcatcgctgagtcagaatgagacagccgactaacgccactaagagtcaccaggcgacgacaccacagccctcctcacgccttaaggaggtgatgctggacagctgccagcctccccacgtgaaaacgaagctttttttccagcccccctaaatggggcttgtgcatggtggccgaaattaaccctccttggtaccgtgttaacagtaaggtttaaaagttcgaactgtgcttctgcattaaggagttgaacgacccaaataaagttatctaacctctcttccatactaaaaattgccttaagagacagtggtgaaggctaaacagtttccgtgacaggcttagcacggggcctgggagacccaagcgcgcggcaagctcgggtcctctctgtcggcaggtcctcacccttaaccggacccttgcgccgccccgcctgcctgagcgcggctctgcgaagcggcgagaagtagggaagactggatttcctaccttttgcccggaactttcagccgacgcggcttggatgctggccttagcccgtgcagatctggtaaccaccatctttccggctccctcgcgaccaccacgacttccctcttccctggcgctccggaaatgcgtcagagaactgcctcgagcgcgttttccgcgcagatccgagaattcgcgagaatctccgcccagccagttcaggccagggcggtcagagacaaagggcctgggtttaagtgtgcatttcagagctgtagaaggcaagccagatttttgctgggaaagaccttcatcggggcggcgaagcccgcagtgacagagggtcttagcgtacccgttcacatgaattgtaaaaacgcacttacatgccattcgttctttcatttgtttagtagaatcgtttgaacccgggaggcgttctttcatttctacgttctaaagagcttaatgtagccattggtatgtccaagggagaagtttgagatatttgtgctttttaaagaaagacaatatttactcgtgtattgtgacgctaactataaataaaatttaaggacttggttggggtaaaagggatataaggtgctcgcaggaactgggagacgaagtggaaagctgtataatctaaacgtgagatggtgtttagggattgggaatagcagaaaagaaaaaaacgttaaagaaattgtaaaggagaagaataaggttttgttgttgttgttgttgttgttattgtcacagtgaaaggaagagtatgaccagaatcaagaggtttctttggttatcttttgagataaaaggtagagaactatgtttgaggggatgggaaggggttgaaaaaataagtaaacgcaaattattgttggaggtgagaaaggatgaatgagtgcctcaccaaacctagtctctacttcatgacagaaaaccaattttttatttaaagtcacagaacactgtgtcgatggacacactgcttcccagcttaaaatagcttattttatagtctctcttgcagccaaatgtggctatgtgactacgttttagccaattaggtataaattgtgtgcatgtctttagggacggcatctaaaagagaggaggccgtccctgacttttttttttggagacggagtcttgctctgtcgcccagggtggagtgcaatggcgcaatcttgggtcactgcaacctccgcctcccgggttcaagcgattctcctgcttcagcctcctgagtagctgagattacaggcgcccgccaccattcctggctaattttttttttgtatttttagtagagacggggtttcaccatgttgggcaggctggtcttgaactcctgccttcaggtgattcacccgcctcggcctctcaaagtgctgggattacagtgctgggattataggcctaaacgacctcgcccagccctcctgatcttttaaagtgcattttacttcctggaaagttgggttcgctggttttcaggcggcaagtttgtgccataaggatgaaggcatgctttagagatggcatagcagtgagatggaaaaatcaacttgtggagctgccctatgagccctcaagagccgccttctagatttttcacctgatggaaacaccttgttaaaagccactgttaattaaggatttttctatttgcagccgagcctaatgctaactgaactggataataaacagagatgtgggtgtagtcagaaaagaatgcaccttcctttgagccaggaggaaagagttgatatctgaaacagagaggagaatgtgaatgcaagtatgttcaagtggagtgaagaagagaagattttgggtagataataacctctgtaagtaggtgatacatctcagaagaatggaaatggtttatatcaacatttgtggcaaatgtggtaagaagcaaaaataaattttagtagggccaagtagcagtgagactatgtaagaagatgaacagaagagaaaggttagatttgaggaggagacaaatcgtgtagaaggaaagtgaaccaattggatgtaggttgtggagatcaaagcatcaaagaacaacagcatcaatcataatagtattggccacttaatatctgctggatactaatctacgtgctttacatgt

SEQ ID NO: 573 - DNA, 4001 bp, Homo sapiens
tagtagagacggggtttcaccttgttagccaggatggtctcgatctcctgacctcatgatccacccgcctcggcctcccaaagtgctgggattacaggcgtgagccaccgcgcccggccagtaataacattttttaatgacatcatcatcagaagtaagacctaattattttacaaaaaaaaaaaatttcctgtcatcataactccctgggagaaactaattactacaagtgtttgatgacaggtagtataggccctgtactatcctacgcacattacacaaattatgccacttaatgttcacaacaacactatgagctgggtcctattattattctcatttgccagacgaggaaacggaaatttggcccaacaacttggccaaagtcccaagctagaaaataccaatcaggatttgaacccatgtcggggtctgagagtagagcccatgctcttaaacacttgctattttgccccttcaggaaaaaaaaagtgctagaacgctggaaagaaagaaaaaaaaaagcctctgcctcgaaagcagctaggacgacaggtgcaacaccacacctggctaatttttttgcagagatggggtgggggggactcgctatgttgcccaggctggtcttgaactcctggcctcaagcgatcctcctgcctcggcctcccaaactgctgggattacaggcctgagccactgcatccggcccaaaatttttaaagaaatgtcagcaaactaaaaagactcagagccacagaactacaactgccccaaaacaaaaaaaggtaatttaatatgaatgcttcttttcttgggacatcataattcacacaaatatgattttattaaaacaaaaatgtctactgtctcatacataagtatactccacaaagaaattctacaaatattagagtcctctgtcatttaatttttatttggcgggtgggagaaaggtggcaaccaaccaccacaagtaggtgaaaggctttgaaacctccacctcaatcacttgctttacttcaagactgcaatcacttgctttacttcaagactgctaacatataaaaggatgtcagtgtataaagaacactgcctatcatccatcttctcgggtgctctgagaaacacaggcgcacagttaaattcacaggcgaactcagaacaagcttcagcctgcaatccgtcagggattcggcagctgcacaccgaaggtgcagcccgcagctctcaacttttcattctgtccacacgttttcaatcctggacgcacaagtccactttgaacctggcccgagggtgcaaagagggttcctgtcagatttctcaggaagagagagacgcgtgaaggaggggcggcctcccacccgccccgagccgccgcgcgtttctccttttgttggggtggaggagggcggaccccgcaccctctaggggccaagaggggtgggcggagagacgggagggggcgaaacgccgcggcggcccccgacgagcccgggggtgggaacacaaagaatttgggaagcggccgaccgcccttccataaacctccgcagaagtccaggcccgggccgccgaggagcaggaggaggcgggcgcgctggagtccgcggccctctccgctccctgccgaggctcagcggcgggcgcgggctgaaggccggggttcgagggcggcgcgaggcctccgctaccccctcagccaccccgaaccccttccgccccgccgcgagccaggccgcgggatcccggtgccggccccgccacacccacccgcctcctaggccaggcctgggaggactccgcggctctttctcgggcggcggcggcggcgcgccccacgccggatatttacctgctgatcttctgggcgaaggcgcggcgctcggccatggctgctgcggcgacggcgacggcggcggcggctgcggcgggccgggtgcggaccggcgggcgcgtgcctcctcgctcgtgctccctccctcgcggcctccgccagtccgggctccggacctgggaggctggggctggcggccggagccaggaacgagccctgccgtaatgttccttagaggcgcgcaacgagaaaccgctcctcccccagcgcgtcaatcccggcgggaaccccggctgcggaaggcggctgcggccggcgggagccgaggggaagaatggagcgctgaggaagcgaggcgccagccccagccgcttcgctgccgcggagcctgcacgaccgagaggtcgcggagagaagccagagacaggccagcgacctggcgaggcaagaaaataagataaccgaacgcgtagggggagcttggctttcccgaaatggaagggaaggaaatgaaaggtgggctttgccgagggggctgtgctttaaccaaagccctggatgactgggttcatgtttctgcagcaccggtctccgagctttttaaagcacttgggtttctgcttcggcctcatgaatgcagcctaactggagaaacagtggtttttcttatagagaaagagccagaaaataccttgctcctgcagcgataacaatagtaatagttgacttctggtgcttagccagccactggattaaagtttttcaagcacgagcgctttgaagtagatcgttactatcactattttagagggaaggaaattggcttggaaaagctaagtgactggccccaggtcgcacagatggtaaactcttccactgagactcaaacccagagccggttcttttctttgaggacagttgtttccgtattattaaccccttttggatctctctctgtctctcatacatacatatatatatatatatatatatatatatatatatatatatatatatatataaaatccaggtgagctctaacgttcacccccattttgatgttctgttaaataagctctgtgttgaccactgaaactgaccttgtccataatagcctataaaacagagactagcagagatttgttttcatctgttctgttgtaatcccataatgtctagaatatttggctcctaatgcatatctgttgatactgaaattatggtgacactaagaaaaatatcttggtttcttgtagtacctttcctcttaagtattgcaagaacttaaaatgtgtatttatttattgttattattatattctcagtatgtcctggtggaatatgttggatacctgttttcctctcttttaccattggaaaatctgtagcttggagccattaggtcacttgccagagtcacacactgagtcagaggtgaaagcctcaattagtcagatccataacttcctgtctagtgctgtaacttctgtggaagactgtgtatttatataacaatgctcattgcagtaacacactgcttttatttattgatttatttattttagacagaatccccctgtgttgctcaagcatggaatgcatagggcactgcagcctaaaactcctaggctcaagcaatcctcttgcctcagcctctggaggagtagctagtaccacaggctcttgccaaggcgccctccagtaacacactgttttcagatgcttgtttactaaaggaaaagatagtctattcaaagaggacagatatttggcttctacctaagtatagagcccacctaggtgttctaaaaaacacgaaggtgaactagacacagacctgctctcagaatgtttgagtccattgggaaagatgaaccaggtactcacagactgtaagtcaaggctatcactgtacctggcttttaagaccctctgtgataggaacccagacttattttgccactttcttactctgtaaccttaggcaagctacttaacttcatctctaaaaggaggaaaataattatatctacttgaaagggtgttgtgaagatttattgaattgattaatataaagttcttagaacagggcctggttcatggtaagtacgatgtgtgtcagctgttgttattattatcactgttactgtcattattcatc

SEQ ID NO: 574 - DNA, 4001 bp, Homo sapiens
gccagtataggctggaagaagctaccagaaagctggggggctagagcacccagaggacaggctaatagcacaaagacatccacctcagggaagttggcaagcttggcaggggtgggccgccccagggccaacacatagctacgcttgccagcagcctgagtcaggttccgcaagtgggccagtgcctcacggtgttgggctacacccagtgtgcctgccagcagccctaccacgcgggcatctctggccctctctaccagatatcgtcttcgtgcccttagccgtccagcccgggcaccctcatcctgagtcttccctgtatctggacagcaggaggagaagggttgacctggtgcccaccccaagagcagccgactcaggtctgggtcaaggtctgggtcagggctggccttagagccccctacatagaaggcaccatactcttctagacgcctccctggggcaagggggaagcggcgcccaaaacgctctaggggcataggctctggactcagggaacccactggttggggaaaagctgggctggagactagcaggtccaggtaccgtgggcgcaggagagtagccaaagcctctggaagagaaggaggtagtgttgaggttggagcctggcaaagcaggagctccctcatccccaggagactaaatatgacccagtaggctggggccaagcccatatcaagagttctatggatggtatatggaaatggggaaattaaggcataaagcagttggctcaccctttgtgcatacacaggcaaaaccccttacccagggcatgggcacaggccggctcactcagcagcaccacaggcgctttggggtctgggttctgggcctcaaaggccttgacacagagctccaaggccacagaacgttgacgaagcacgaaggcaacgggcagtgggcgggctggagggcttaagcaggcagggccaaaatgtatgagagcctgagctccagcttgctcagcacccagcacatccacgcagcagctgcagggaagatagcatcagagaaatgggttctcttctggaggcgagttgctgtcatcactgggaaatgtggtcagtgaataaaatggtttcattaaaggaagacattgtcaatgaaaggagctagcatcagaaggggagtcattaccattatcatcaaggagaaacaccaccattgaaggcaatcactgtcatagacgtaaaaccccatgagccccggatccccaggcctggcccacctaaggccaagttcacacctgccgtaggctgtgtcacccagaatgaacatctttgaccctgtcgtctcctccagtcgtgcagccacagccacagcatctcccaatagctggtcagggaactgcaaggcaacctataagcataaaccatggagtcagggacagcctctctcccactgagggcttctttaaagcaatcttccaggagctcccactcaaccttcaaagcccctggtcccagaggggcactctgccccacgtagtaggtggaagggagggatggtcaacgcgctgcggacagactgattcccccaccctctcgccctcacaaaatcccccaagatccggatcctctgggcgacccatcccgacagaggcgagccacccttccctaagtctgtcctcactcgttcacaccccaggtcgcggacaaatccagcgactcgctccagctcgtacactccgtccaggtccggaagaggagtaagcagtcctggcaccccggtctctcgctgcagcgccgcctcggcagggctgctaaacatcgactccatgaggcacagcttgggtggtgggatgcagcggggacctccctgggacagcttcggggcctgagtcctctagagcagccctcagggggtcaaaatcgccttgtgggggtagggggaatcacagtcggccttcagccggtgagtatccccttcagccatcctaactactgtttctccgctacacgtgggactaccggggaggttacttccgggttttagaggcgtggctgatagcgattttgccaatcctaagtcagcacagctcccgccctccaatccccgccaccgccccgcacagagaaccaatgttcagcctgagtcccaggccagccggaagtacatcgaggaaggcgcggagccttgtgggcattgtagttcccctggcctcctctcgggcgctgggagtccggttcagccgacccgcggccatcaggaacaccgacttcactgttaagcatttcacgtgcactctatcctctgggcagtatcactgcataattctttcattcattcatttttttttttttttgacaaggtctcgctatgttgcttggactggagtgcagtggcgcgatctccacaaccttcacctcctggactgaagccatcctcccacctctgcctcttgagtagttggggctacaggcgcaccaccacatccagctaatttttgtattttttgtagagacaggtttttgccatgttgctcagactggtcacaaactcctgaactcaagcaatccactcatctcggcctcccaaaatgctgagagtacagacgtgagccaccgtgcccggctacactgcataattttaaacttggtgccgaccggctcgggtttgaatattgtgcttggtcacttgctactgagtatcttaggaatgtccctatgcccatttccttatctgaagaatggggagttgtgacaatagtacctcttaataagattgttgtgagggtctaattaatttatatacaaaactttacaaagtagttctttggatatcgcatgcagtgaaagcatttgctatttaatcagccaaatactgagcacttactgtacattaggcacttcatttttagtgtttacagtctttggagtaagaattatcccgagtggtaccaaggacatgactggcacatcctcaagtcacaggagatgctctgcacagctccagccatcctcaaacactgctgcttcccagcaatacccccagtgcataccacatagacctctaccctccagcccctcacatcccctctactccccatgtttacttatatgcaaacacccccacatgcaacatcacttgaaatgccctccttacatacctctgtcagatacggaaactgaggttcaaagagactacttgtgtaataagacactaattctgtggcacaaccagcatcaaacccggatctattgaacagggaaggagtgggatgaatgtgggagtaacgagttccccatcacccacaaggagattgaaagctcaagggtaaaagtggggagaactcattctgctcttcagatcttactgaggagaagcctggggtacctgagaggcagcctaggtgaaactatagctgaggagacagaaagggaggcaacactgctaagggagaaaagcaagaataggtcaggagctgtccctggtgctgattgatccctgaccatcctgtgctggaggtcctgtgtaagcggggagcagcggacatatggacaaccttaggtcctactttcctcttttctcctctgcggctgagatatcttctctccttcacctccctgccacccacccaccccccaatacacacacactcagcccctttctatagccctcctcaaccatatgcaagttcgatgttgtataactccacaccagaaacccctcccggaagtcaaaactccactccatttcttccttcctaaacggacccagccctaccccacttgcagcccaaagtctcaagtcctctacctagaaagcctactattcctgtcaaaaactttctccatgcagccttccctcacttcctaccattctccatggtagctatggactagatcaacctttgttcagggcagaacgacgcaggacagagctaggggcctaatattcggcggtgttgattaaataaatgtatgcatacatgcatgttgggattaatttaatggggatgggggggttgatga

SEQ ID NO: 575 - DNA, 4001 bp, Homo sapiens
acacctaaagtagatgttttttaccccatttaaaaaagacactaaagttaaaggacttgtccaaggtcacattaacatgtaacaaagataaaactataaccaaactttcctctatgccatcccctgatatctcattctatcaaactgctgttttgttatttgtctgtcttttcttgaaggtgttaagttccttttacttttccttaatcactgattagagacgcacatttccatcatttcgagcttagatattttggttctatcctaagagtgaaaaaatgagaaaaaaaaatgttttttaaatcaaagctggccttaggctgggtgtggttgcttgtgcctatacaatcccagcactttaggaggccgaggtgggcagatcactagagtccaggaacttgtgaccagcctgggcaatgtggcaaaaccctgtctctacaaaaaatacaaaaaattagctgggcatgatggcacccacctgtagtctcagctactcgagaggttgaggtgggaggatacttgagcccaggaggctgaggctgcagtgagccatgatcataccattgcaccccagcctgggcaacagagcaagacttattttctctctctctccacatatatgtatatatcaaagttggtctttacacacaacttttatttaaatgcatggccaattcaagtagcagttcttaattccttctataagattttaaagtaatctgaggcctaaaaattttaagtctattttttgtttggaagacatgacaataaatctgctccctcctcccataacatatgtattaatcctttgatttacattctacttagagtttgacaatgaacctgaagttgacccttcccccaaatttactgggcccttatgagggccaactataaatgtataatatactaacaaatactttggttacttagtgtatactcatgtaagtgtatactcatacatttttatatattaagtccaggctcactcaatatatacaagtgtatcagtataagccttattgggagatagtctatttaagataagatctctctggataggatacaaaaaggcaatcgccattccctatggacacacttcaaagggggaagctttcagcttggtttttgaatatatataaccaactcattaaggctgtgtcagctcctcattagcactcaactcagaaagggtttcttgactacctcatgaaataaggggttttgataactatcccccaggagtataaaatagctttcctatttactggagaaagccacaaaattagacttgtaaaataggacaaagcaccctttcattttccaagtcacttggttggtgtaaaatttccattcttctgctcctcagatcattaatgaacaagggatgcgtttcaaagggtttaaacaagcagacctgaaaattctgttcagcttagtgtatgaaaatcagatgttagatagctttcttcccaggaggctggggaacgctcagcacctaccaaggcttccttccctacagttaggactgaggtgtaggcttccagatacactcgactgcagcgtctaacaacttccaggcccttgactgtgatgtccttggcatctcccaggcccaacccgatgagataaagcatttcaaacttgaggagaagagagactgcaagacgaagtggacagaaaaaccgtcagtaacaccgaggacatctaaaatctagtgatgaacacgatgacaaccaaagtagcacaagagaagaggcaagtcacaaggaggggtttgggaaccttatgtcacgcttaagaactgggataagaggttttaaacaaccctaccagttttgcctcttgttacacaaacctaggagcagccaattacccgctgagagaatcgtaggtagttctctggcctttacaaattcttaactaccacctttccgcagaagcaactgcaaaagcgccggctccgtgcagagaaaaggcccacgccgccggcctcacctacggtgccgcaaaatgctggtgcctttactgcactttacgactagcgggagggggccgggctagcgggctactgggctgcggagaccagagcccggctccactgaagaaacccgccggctgctggggcagggcggcgaaaggtcagtcggccgagaggagtccgtggagccaccgtttcatagcctcagggaaaggatcgggcgtgctcacgagccctctaacccatggcttaaacacccgcttcctaagcctgggtaagtgcagtagctcttcgctcgagaggagccacgtggaagagagtcgggaggggccctgcgccctactcctcctctccagaaacagggagggctgggaaggattttcctgatttgtccccggatttggccgagtgcacagattttaattccagtcttctcatcctcctgtagttcaactaggtgtcttcctggtgaagcgtgagattggcaaacccagcagtgagtgtgcttctgatttcccaacaaggcaatgactccttgggtttgtccccaagaccttatgcctggagtgccccaaggatgtttcagtcaccctcagtgtcaggaatcccagaccttcctgtacctaaagaagtgacctttaatagtgctcagggatttcagacctctcaagtgtttctgccgggggaattcttataaagctgttggttacatgtaattagaaatagggaagatttgttttgactgaaaatgctcttcccaaggtgacctcatccaagttaaaaaagacagctgtcattgcttttcttagcaggcagtgttggttactcagaattttcctgttgcctccccgacaatgcccaactccgcttccttgaaccttggctttttttcattcccaggttccatccacctttttgcacttcctatctataaactcttcgtggctgtgttttatcccctctcattacgttgatctattcctcacaccacatacacaccccaaaaaactcaaaatggatcgtagatgtaaatggaaaacctaaacctataccagaagaaaacataggaggaaatattcgtgaccttatttaggcaaatatttcttaaaccaaaagcgtgatgaaaaaaattgataaattggacttcaacaaagtaaaaatttatgctcttcaaaagacttgaagccacatactgaaaatatttacaaagcatgtatctgatgaaggacttgtatggagaatatataaggagcactcagaaagcaataataaaacagttcgttgtttaaaaatgggcaaaagatttgaatagacaccaaagaagatacacaaatagcaaataattattttaaaagatcttaaacaaacaaaaaaagatcctaaacatcattagacattaggaaaataaacatttaaatcacaatgagctaccacaacccacctattagaatggcttaagtaaaacaaacaaaacctcacaaaaactggctgttcactcagaattcctagtatcgctaatattttgtagattcaaatttcagcctcctatccagacttcctccctcttggcttcatgttaacgttctgctggaaatcttcacctagataacccggaagcatattcaacacatccaaggttgaatccatcaccttccctttccattttgcttttctttccatattatctacttggatgggtcgggggtgggggtgggtgaggagagtattgtcatcaacagattaaccccagccagacacttgggagtcacccccacatcgtctgtcatgtctgcctgtatatctcaatagaaaccataccgtctatcaccatcttgattctcaggtcctcattttgtcactcttgtagctgataataatgtctccttcactcaagggggtcagagagttatagttaacaatctgaaaatattacaccccttctagatccttctgaggccaagagaaagtccaggtttgttaacataccccacaagatcattcgtggtgtggccactgccta

SEQ ID NO: 576 - DNA, 4001 bp, Homo sapiens
atctttagaatatgccttaaaaggccgggcgcggtggctcacgcctgtaatcccagcactttgggaggccaaggtgggcggatcgcctgaggtcaggagttcaagaccaacctgactaacatggtgaaaccccatctctactaaaaatacaaaattagccaggcatgatggcacatgcctgtaatcccagatacttgggaggctgaggcaggagaattgcttgaacccaggaggtggaggttgcagtgagctgagatcgtgccattgtgatatgaatatgccttatatgctgatatgaatatgccttaaaataaagtgttccccacccctgcccacgatggttcattctctactcataattctaaacctgcctggtttggtgaaggatagatccacagttattctcaggttggtagggtaggctcagaaaaggtatctcaaagaaccaaaaggttggaaagacccaggaaggccttaaaaataacaaaacttggatgttatgaagaatggaacttaggcttcaagaaagtacttctggccgggtaaggtggcttatgtctgtaatcacagcactttgggaggcccaggcaggaggatcacttgagcccaggagtttgagaacagcctgagcaacacagcgagaccctgtcactacaaaaaattaaacattagcctggtggcgtggtggcatatgcctgtagtcccagctactctggaggctgaggtgggagaactgtttgagcctgggagggtgaggctgcagtgagccatgattgcaccactgcactccagcctgggcaacagagtgagaccctgtctcaaaaaaaaaaaaaaaaagaagtagtacgccgggcgcggtgactcacacctgtaatcccagcactttgggaggccgaggcgggcggattacgaggtcaggagatcagaccatcctggccaacacggtgaaaccccgactctactaaaaatacaaaaaattagccaggcgtggtggcaggcgcctgtagtcccagctactcaggaggctgaggcaggagaatggcgtgaacccgggaggcggagcttgcagtgagccgagatcacgccactgcactccagcctggacgacagagcaaggctccgtctcaaaaaaaaaaaaaaagaagtacttcctacagggttgaaaggaccaggaaagtgaaatgtcatttccatcctgagaaatattgagaaggggtctttgcctccttgggagcaaaaatgggaacaccagcaagatgcaaagataaaggctgagatggcctcaagaaggtggttctttcacattcacttctcgaccgttagtacatagaatccccaatacccgttttccatactcaaactaaacgaagttagaaaataaactggctctttaatgggaaatgggaggaagggctgtccgcacaggaatggggttaggctgtcagaagcgcagccccctgcgggctaagtcggctcgggcctcctgtatctggctctgcagctcgcgtgcggcgtcctcgcagtcatgaaaagtggccacacgatagcccacagtgcccagggcatagcagccggcggacaccagcaagtaggcgggcagtggccacaggacttcctggcaggacaagggcagctccaggcccaaggctcccgtggtcagggccacccaggtggagcccaggatcgctagtccccaaagccactgcgctaatttcgtcatggtcactgcgagagaaggaagcaatgctcccctgaggagcagaaaggaaaagcggaccaaactcaaccgaagcccgcccacggagagcattaaaaccagccctggccagaggggaatcgccgatcccagaggtccgaacttgagtgcccacaaaaggtggaagggccccttccaccttgctaccccctctatatttgagacccactccccatctctcgccctccccattcagccttcaacctacacttacctctaccccacgtctccccttccccgcgcggcccggatgttggcgtccggaagtcctccctggttcacgttccgcttccgcgcggccttctgggagttgtagttcacatggcggcgcctggtgtactcctggccagcgcctcaatctaggcgggggtacagtgggctgtgctccgcaaacggggagcaggccgggtctggagaggcctcggcgctgctttcccaccttgggctacgctccaggctggcgtggggcttgaggacatccttaaatgttgcaacaagatgggaatataataccattccccttaaactcaattctccagcgctgaaatccattccttcattcactagttcattcattcgaagatttctttctttccattcttgacagggtctctctatagtgcctaggcgggacagaactccttttttttttttttttttttttttttttttttgagacaaagtctcgctctgttgcccatgctggagtacagtggctcgatctcagctcactgcaacctctgtctcccgagcagctgggattacaggcgcgcgccaccacgccgggctaatttttttatttttagcagagaacggggatttcactatgttggccaggctggtctcaaactcctgacctcaagtgactggcccacctcagccttccaaagtgctaggattacaggcatgagccacagcgcccggccagaacatttcttgattaccatgatagactttggagatacagagatgtcaagagactcgacccctttcaggtggagggggaaagcaggagtcagtgaagcagttgcattgacaactaaccatgaaggcttgagattattgttagaacagaggtagtcatatttttacaaggacaacaaccaatataacttggagccagaggaagaagggctccaggagtctgggtttcaaaaaaaaagaaaagaaaagaaagaccagaagaattacctgaagtggtgaaggcattgaaagaaagagtataattctttagaacagttttggggatgaatttattatgtatagagagaaagagagagagagaacaaagtaagagaaaaggttaggcaattatcaacttcagaggaaacaaagagttatataagaaaggaaagacaattgataagcctgtcttataaagaccacatctgtagtttgacagttaggtttattaacttgccacaacagagagatcacacactagaagaactgtggggcaactcattaaaaaggaagaaatatggtcattcagatgatatggtttggctgtgtccccacccaaatttcaagttgatgtgtatctcccagaattcccacgtgcgagggacctaaggggaggtaattgaatcacgggggccagactttcccgtgctattttcatgatagtgaataagtctcacaagatctgatgagttcatcaggggtttctgcttttgcttcttcctcatttttctcttgccaccgccatgtaagaagtgcctttgtctcccgccatgattctgaggcctccccagcaatgtggaactgtaagtccaattaaacctctttttgtttgcagtttcgggtatgtctttatcagtaatgtgaaaatgaactaatacaacaggatatgggaaaggcttgactttaaaatttatattttaaaatttatttacttatttatttagagttgaagtctcggtatgttgcccaggcgaagctcaaacttctgggctcaagtgatcctcctgcctcagcctcccaagtggctgatactataggctagctaaaatttaaatgaaacagtgttttgatcggttcgaggtaagcataactttaagtgaagggatcaagaagtccaagctgagggaccacttggaaattacaaagtcaagataaatatagaatatagtgtccaaaaacccactatctaggctgggcacagtggctcgtgcctgtaatcccaacactttgggaggccaaagtaatccacgtggctcagaacttctggcaagagtaggatgtt

SEQ ID NO: 577 - DNA, 4001 bp, Homo sapiens
gataaaaggaccaaagaaaaagctttacttagatgattgattggggcctaggagatgaaatcactttttattttttagagatttttttttttaattttggaggttggggtgcaatctttagaatatgccttaaaaggccgggcgcggtggctcacgcctgtaatcccagcactttgggaggccaaggtgggcggatcgcctgaggtcaggagttcaagaccaacctgactaacatggtgaaaccccatctctactaaaaatacaaaattagccaggcatgatggcacatgcctgtaatcccagatacttgggaggctgaggcaggagaattgcttgaacccaggaggtggaggttgcagtgagctgagatcgtgccattgtgatatgaatatgccttatatgctgatatgaatatgccttaaaataaagtgttccccacccctgcccacgatggttcattctctactcataattctaaacctgcctggtttggtgaaggatagatccacagttattctcaggttggtagggtaggctcagaaaaggtatctcaaagaaccaaaaggttggaaagacccaggaaggccttaaaaataacaaaacttggatgttatgaagaatggaacttaggcttcaagaaagtacttctggccgggtaaggtggcttatgtctgtaatcacagcactttgggaggcccaggcaggaggatcacttgagcccaggagtttgagaacagcctgagcaacacagcgagaccctgtcactacaaaaaattaaacattagcctggtggcgtggtggcatatgcctgtagtcccagctactctggaggctgaggtgggagaactgtttgagcctgggagggtgaggctgcagtgagccatgattgcaccactgcactccagcctgggcaacagagtgagaccctgtctcaaaaaaaaaaaaaaaaagaagtagtacgccgggcgcggtgactcacacctgtaatcccagcactttgggaggccgaggcgggcggattacgaggtcaggagatcagaccatcctggccaacacggtgaaaccccgactctactaaaaatacaaaaaattagccaggcgtggtggcaggcgcctgtagtcccagctactcaggaggctgaggcaggagaatggcgtgaacccgggaggcggagcttgcagtgagccgagatcacgccactgcactccagcctggacgacagagcaaggctccgtctcaaaaaaaaaaaaaaagaagtacttcctacagggttgaaaggaccaggaaagtgaaatgtcatttccatcctgagaaatattgagaaggggtctttgcctccttgggagcaaaaatgggaacaccagcaagatgcaaagataaaggctgagatggcctcaagaaggtggttctttcacattcacttctcgaccgttagtacatagaatccccaatacccgttttccatactcaaactaaacgaagttagaaaataaactggctctttaatgggaaatgggaggaagggctgtccgcacaggaatggggttaggctgtcagaagcgcagccccctgcgggctaagtcggctcgggcctcctgtatctggctctgcagctcgcgtgcggcgtcctcgcagtcatgaaaagtggccacacgatagcccacagtgcccagggcatagcagccggcggacaccagcaagtaggcgggcagtggccacaggacttcctggcaggacaagggcagctccaggcccaaggctcccgtggtcagggccacccaggtggagcccaggatcgctagtccccaaagccactgcgctaatttcgtcatggtcactgcgagagaaggaagcaatgctcccctgaggagcagaaaggaaaagcggaccaaactcaaccgaagcccgcccacggagagcattaaaaccagccctggccagaggggaatcgccgatcccagaggtccgaacttgagtgcccacaaaaggtggaagggccccttccaccttgctaccccctctatatttgagacccactccccatctctcgccctccccattcagccttcaacctacacttacctctaccccacgtctccccttccccgcgcggcccggatgttggcgtccggaagtcctccctggttcacgttccgcttccgcgcggccttctgggagttgtagttcacatggcggcgcctggtgtactcctggccagcgcctcaatctaggcgggggtacagtgggctgtgctccgcaaacggggagcaggccgggtctggagaggcctcggcgctgctttcccaccttgggctacgctccaggctggcgtggggcttgaggacatccttaaatgttgcaacaagatgggaatataataccattccccttaaactcaattctccagcgctgaaatccattccttcattcactagttcattcattcgaagatttctttctttccattcttgacagggtctctctatagtgcctaggcgggacagaactccttttttttttttttttttttttttttttttttgagacaaagtctcgctctgttgcccatgctggagtacagtggctcgatctcagctcactgcaacctctgtctcccgagcagctgggattacaggcgcgcgccaccacgccgggctaatttttttatttttagcagagaacggggatttcactatgttggccaggctggtctcaaactcctgacctcaagtgactggcccacctcagccttccaaagtgctaggattacaggcatgagccacagcgcccggccagaacatttcttgattaccatgatagactttggagatacagagatgtcaagagactcgacccctttcaggtggagggggaaagcaggagtcagtgaagcagttgcattgacaactaaccatgaaggcttgagattattgttagaacagaggtagtcatatttttacaaggacaacaaccaatataacttggagccagaggaagaagggctccaggagtctgggtttcaaaaaaaaagaaaagaaaagaaagaccagaagaattacctgaagtggtgaaggcattgaaagaaagagtataattctttagaacagttttggggatgaatttattatgtatagagagaaagagagagagagaacaaagtaagagaaaaggttaggcaattatcaacttcagaggaaacaaagagttatataagaaaggaaagacaattgataagcctgtcttataaagaccacatctgtagtttgacagttaggtttattaacttgccacaacagagagatcacacactagaagaactgtggggcaactcattaaaaaggaagaaatatggtcattcagatgatatggtttggctgtgtccccacccaaatttcaagttgatgtgtatctcccagaattcccacgtgcgagggacctaaggggaggtaattgaatcacgggggccagactttcccgtgctattttcatgatagtgaataagtctcacaagatctgatgagttcatcaggggtttctgcttttgcttcttcctcatttttctcttgccaccgccatgtaagaagtgcctttgtctcccgccatgattctgaggcctccccagcaatgtggaactgtaagtccaattaaacctctttttgtttgcagtttcgggtatgtctttatcagtaatgtgaaaatgaactaatacaacaggatatgggaaaggcttgactttaaaatttatattttaaaatttatttacttatttatttagagttgaagtctcggtatgttgcccaggcgaagctcaaacttctgggctcaagtgatcctcctgcctcagcctcccaagtggctgatactataggctagctaaaatttaaatgaaacagtgttttgatcggttcgaggtaagcataactttaagtgaagggatcaagaagtccaagctgagggaccacttggaaattacaaagtcaagataaatatagaatatagt

SEQ ID NO: 578 - DNA, 4001 bp, Homo sapiens
gcaaagtacaaactctttgaagcaaagactctgtggatccaaaccccagctttctagccgaggaaatactggatctctagactgcagtttgtctacctataaatgggatatacccttgttttgagcattacacgagatgatccacataaagcacttagcatggagcctgctcagggtaagcactcaataaatggtagctgttgtcattacttaaaggcccgctctctttcctggctcccccacccatcggtgtttcttcctcttggatttcccatcatcacctctctactggttgtgtcccccagggttctatgctttttcttttttctattttcttttttttttttttttgaggcagagtcttgctctgccacccaggagggaatacagtggtgcgagcatggctcactgcagcctcgactccctgggctcaagtgatcctcctaccttagcctcctgagtagctgggaccacaggctgcatgcaactacaccgggctaatttttttttttctgtagagatagggtctggctgtgttccctaggctggtctcgaactcttgatctcaagtgatcctccctccccagcctcccaaagtgtttgggattacaggcgtgagccaccacacctggccagattttgtgcttgacccctccaatccccactacactaagtacttgttgccacacatctgggttgctctacagatagcacatgcagcagccctccaggtgggcttcctcctccctggactgcctcctccgttctctcctccaagcctcctagagtgctggctccatctaggctgttgtaaataatcagcctagcagtcagtgcctactaggatgagctcctgaccaagcacctgggctgagacccagctgagacaatcacaccccacaaaaaagtacaagctcgaaaaaattccatgccactgcttaaggcagaatgcagtcaggggaagacagcacctctctccaaaaccctttagtaaactattttccagcaataaaacccactttaaattcaggcagagagaaggacctcagtactcataattgagagagcacatttaatcaaggcagtagacagctatttaattccactttcttttgcctaaatgtccttgtcccctcttttccattcacttgctctaaatcaatagttctcaaaccctccgtgctgagagatcaattgtttatttttcttgttcccaaactactgtgggccagtacttttgtaaaatggtaaaaataaatttctaaaaaagaaaaatgccattccgatggcacagaaagttttaatttctataaagtttattactttcagtttctgtacatatcttttggtagtctggtaagcaagcttctcgccgacctacaccagcccctggcccaaactgagagtaggtagaacagcttctggaaggaacagagccacagaggagtctgtctcccacagacactccccatcccaggtttttgtcctgtcatgtagtccgctcagcagcagccctgctccacccagagcatgcagtggtgaggtttggggtgggatttgcccaggctttggttactgatattccttgagagtctagcagcccccaggaggagggatatgcagagatgttcccagccccagtgcagtgcagggactggcccttaccattccatgccagccctgttgatctcctcccaccagcactccgtgggttccccgaggctctgtggcgtgggcatgcaggcgtagttccattgtctgtcagaaccttccttcttgctgaagatgctcctcacggccactatcacctgcccctggggacactggtagctgaagccttgccggttcaaattcacccacccatcatcgctgtagtcatgatactgctggtatgggtatccataatcgccatactggccccaggccatggtgactaggggcagaagtacccagagaagactgaggtccatgctgcctgggattttggcaaacaatgtcactctaagattgctggtctgaccgttttatatagctgccgctgacatgtggcttccagatgtgggtgagaaggatccaactgcagtgtgtcattgcttaagcaaaacttttccatgctgagatgtcagccataaggacattcagcttgttttaaggtggaattctaggaatataccagcagcatgtaagtctaagaagctccctggagaaagaacaactttgtatctagattataaaagccaactgctgctctaccctgtagaaatattcacttgaaaaacactgattagtagcatatttgtccctcacctttcagcacctcacccctttctgtcctaccctacccgctactagcaaacccctgtatttgttctccaaactagccttccgggccacacaaatacccagacagtgatttcaaaataccgaaatcatagactgaagtaacagagccatctaggatttctgtaaggctgaatgcctgtttttttttttaagttgtcaatccaacactttttaacccttgagtataagcgcgggtataccagtttgcagggctactctgagaactcataagttgcataaggaagtactatgggcccatggggagataagttggatatgatttctacacttaagcattctaccatgctgctgaaattggacccagtcaagtctagaaagtgtgctctgctctcaaaatgtaatgggtttaatctaaataaaccccctatttatccttcagtatttttgccctcacattgaattttcttttcattgagttataatttacatataattaattcaccttttaaaatacataatgtacagtaacatagccagcaccctaatcaagacttagaacagttccatcaatccaaaacatccccttatatccctttgcagtcaaatcttcccaaacacccagccattggtaaccactgatttactttctgtctctatggttttgccttttccagaatgtcaagtaaatggaatcataccacacgtagcctttcatgtccatctttcacttagcataatgcttttaaggttcatccattttaaaattcaacatctcattgtatgtgttagtattttgtttcttgttattgttgagtaatattccatagcatggatgtaccacagattgtttatacatttactagttgaaagacatttgggttgtttccagtttttgaaaattcattactttttatgtaatgaattttatattcattatattttatataatgaattacataaatgtaattataaagttgatataaacatctatgtataggtttttgtgtgaacaaatttttatttcatttgggtcaatacctaggagtgagattgctggttcacaaggtaatgtatgtttaactttaaaagaaactactgaggccgggtgtggtggctcatgcttgtaatcccagcactttaggaggccgaggcgggcggatcacgaggtcaggagatcgagaccatcctggctaacatggtgaaaccccgcctctactaaaaatacaaaaaattagccaggcttagtggcgggcgcctgtagtcccagctactcgggaggctgagacaggagaatggcgtgaacccgagaagcggagcttgcagtgagccgagattgtgccactgcactccagcctgggctacagagcgagactccgtctcaaaaaaacaaaaaaaagaaagcaagaaactacctagctgatttccaaagtggtgataccattgcccaccactaccagaaaattgccattaaaaaattttagctattcaaataggtttgtagtgatatttcagtgtggttgtgattttcatttctctaatgatccatgattttgagcatcttttcatgtgctcattacccattccatgcatccgttgatgatttggcttttcaaattttttgaaacctttgggcatctcttaagcacatagtatttcccatttctcatcagtattgttcttaaagtttcttagaattg

SEQ ID NO: 579 - DNA, 4001 bp, Homo sapiens
taagcttaatgtatttttcctcactgcattatattttaatgattaatttcatgctctttcatggtattctagctcatgaatcacgggtattactttgagggaaaagtaaggtgctgtgagtgatgaaagatgttactgattaaagtgttgcacatatgaactacataagagctgaaggtgtttgaacaccagcaatctagattaaaagtaatattaggcaaactggccatatagactaaggttgaattgagtggagggagtgggaaggatgggcttcttaaatgttcttagttgaaacaatatatgaaatcaagcttggcattcaatgtttcactggcatctttctcctcagtagaatgtaagaactgatttcgaagacaactgcagagaaagaaatcagttaagcagataacacaccattctgaaattaaagagccaaaagccacccatcctaagtcaactccgatatcttaaatcaatactgccttaatactgtcagaagcttgtttttcgacttagtaaataaaattttttaaaaagttaagtcaaagtcacaaggaccaaaaaggaatagactaccctaaatgaaatatagaaaaagacaagtatctattatcctgcacacagatgaacaactatttgttaaatatatcatattgctcaatatcaaaaagtcaactctccaaaacagaaaccaaaagtaaactaaccagagatgtccacataatacactttggctcttgttactaaaatgatttttcaaaccaagttatggagcctggagaaaacaggactacttcctcccagaatataaagtttcttcaattacggaggcaaaatgtggcaaaagcagctattttgcaaacaggtggtttgcaaaacttttacttaagccgccaaaaggactgacgaaaggaaaattttgttatttctaaagaaaacacacacacacataattttctaccagagtagaagactcaaataaagaaaagccccaaacaaaacagaaaactaaaaatcagtttgtcttagctcaaaagtgctgacctaggtttagtatgtgtaaaatcactgttgataattaaatccttttcatcgcatatattaagatactagagagaaaggaaatgccatgtcgtttcaggtaggaccttatttacataaaaaaagattttttttaacagaaacggagtgcaagagggaatcaaaaaccgttgagaggagagaaaaatacagttagtttttctgagggcactgcatttttcatgttctgaatacttcgttccattctctccatgttaaattatttcataaacaatactatgactagaggcgactgctacagctgacacacagatgttttatttctatgcttcacctttgcaaatagcaggattcagctattggaaatgggggcagtggaggtgtccagaaacgacatacaggaggtgaaggggtagaacgtgtgggaaatgggcactcctaccccctagagtccacctctctggaactccagtgcttcttcagtcactgacattcagaggaggacaagacaggcttcctgaaatctcttccgaagtaaacaggtcccgacgcaaagggcaacccctccagtagcggaaagtcctcccctgagctccccgcctgcccacgcgggcctgtggctccgcgctcctccgctcccccgcagagctcccacgggggaaactttcccgcgtctctcactctccggggtgcgggggccgcgggggcctccccggcacctacccgcagagcactccccaccaccccgccaccaccgacgagccggcgcgaagtccgtacctcgatgtccgccgagtccttactgagcacaggggccatggcagtgcctacagtctcgagtctgccagtgacaaaccctccttgcgtcctcaagctccagccagagagccaagtgacagcagccggagcgcgagtcgaaaacaggcagactagggccggcggcgcgggggcggagcgggcgcggggcggcaacgcccccggggcggggctgcgctctcggtcctgcggctcccgcgccaggcacggcagccgcagcccggccttcccagttcagcccgctccgcgccccagcctgcaagcagaagggagggagggagtagagcacccgctctggggactggcctttaatctctaaactgctaaaaacagagctaggcaggcggggccagataggagggatccccaggcaaaggtaaaagcagtccgcgctccaagcaacaacttgcactttttcttttcttccacagaaaccccgcgagatgtagatacattgtttgaggggcaactgcattttcaggaactcctcaaggatgaaatagtagatgttcctccatccatccaccaagtaggtgggcggggtttgagctgcagtggaggataccaaagcaccggtcttctgagagttcacagccccagcggggaggggagggaggcgagcaaaaacatccacagcccgcagcagcatacaggaagtgctgcaggtggtacataatcaaggttgtctttttgcaggaaagtctcattttaatggttatttttttaaatattttttattctaaaacgtgaaactcttttgaaaagttgctcttcgtttttgctctagagcttgctgaggagaagggagagatttcctgtagagttggtcccaatccagaaaacattcacctcgttttttgaggatatgtgtactccagacctctctccttttctccccgccccccccccacccctgttagatgcatcccacctctcttctaccataacactttctacttccgttaggacatttgcggcactccttcatgcacttggctaggtagtgacaccttggagtcaagtatttctcccttattattttttcattagtccattcatcgttttattcaacgaatatgtttattgagcattttcaatatgccagacacagacactgtgctaggttctccggatatagtcttcaagaatacacatcactgtcatggagattatactcaaaataagcaagtaagaaaatgtgatgcctgcttgtaagataaaagaaaaataggacagaataactagggtatgggtaccttgcgtggttgagaaggcttctctgaacaaaccatcagattaccttccagaacctggaaattactaaaagacagatacatttttcttgaatcaaatattaacagacactagaaagttaaatggaaaccttagaatcatctttgactcctttatccttattgcctcatttaatctatgcccaaactctcagaagtcaacctcctaaatagattttgaatcattcatttctccattttgctgcatccaccatggtccaagctactggtattctagcttctattcttacctcatatccataccagattgagctttagaaagtattaactggctcatgccatacaacgatacatccacacacccaggtacccatggtataaatccttcaatggtccattgcagtcagaatataatacaaactccctagtaaccgctgaataacctgctctactccgcttctccgccactcttgccctgactcattatgttccaaccacaaggtaatcttctcatcctccatccacttctctacctttgcacattgccctccacttggagctcttcttccccttctactcatcatttaggtctcactgaagcctttatgatctaaccccatcaccaacaaaattacacccactctgtctttttcattatatttcgtcttcatagacttttcaaatgttgtttaaatatttatttgaatgtgattcatttaatatatgtcttctatttagagaggaagctccaggaagagggggcccatgtgtacttttattgtttactggatactcagttcctagctcaggactgaagcataagagaccaagaacacttggtgattgaatgaacagagtacattcgtttatacactgggcagttcattt

SEQ ID NO: 580 - DNA, 4001 bp, Homo sapiens
tttttccctgatttcacaagcaatcaataactttaattagattattacaaaaggcaagttctcacctcaaattgagtacaactctttcacaagagtacatgtaaaaatatcgcaaaaggtacgttcccgaaacattatgaatagtaaatatgtttctcctctctgaaaccaccagaatacagtcccccaaatccctattacgggaccaaatcctttccaggataaaagaaactgttgaagttttcagaagtgctgttccataaaagcctaagtgtatacattcaaataggaatgacagcaggaaaggacggggaaattttccgttaaaaaaaaaacttgcataaactttcaatcaaagatttcaaaacttatctccacagaatagaacaaagcaaacgacataaaagcaaacgaaaagaaaaaaacgaaaatttaaagttcaccctattcttacagaatggaacaggagttatttggtaactcattcatgaacgtaccatcaaaccatttttagagcagaaaacatacaccttttatttaacaacgataaacttgacaacgttgaacacattgtatgttaagaattttttaactcatgtgttcagaaaataaatcttttcctctacattggtgaaaggtcaggtggggaagggggtgctctgtctccacccacgttgaagttcctccgtctgaattttaactttccaaaggagaatttctgcgttccttaattattatctaagttcaacttcaggcaagtaattcttgttgcttcggcttacctggctgtaaagtgagatcactcttattctttacgttttggggacgctgacctaaatgtttgcactccttacatgtattcgctggatgaaaagtactgcaaaaatgctacaaagggattgtttttaaagcaccggctgcctacatgccagtctggctttttcattaagttacttaccagggaagaggaatggaggctttgacacgaaagggtcacgcgattagcagactgctaccctagaacctcattcaaaccagctctcacacacgacttaccttgtatgacatgctctggtgagatggtcttcttttccgatttgttacaaatctcattggcttcagaagatataaggtgaatgaattcagtgcagcagttcaccaccagctctcgagcatcgttggccacccggacattaggaagagtctctttgatcattttattgatagcagctctggggatagtgagatcatcatcgttgccagacgaggaagccatagtaccttcctgtttctcgcgccccggcttttaaaaactccccagctctggtccactactccaccgagatttctcaaaaagtcgccctcggagagtgatcccggggggtgctttgcgaagagggtgcagaaaatgaacggaggagcagctggcttgagggctgggaacactcgcgtgtgtgagagatttaggatgagtttgggaagaaagtgggggcccgaggattctagagagagcacagcccaggctgaggaggggaaagcgcggtggtccggaaatttgagcggctggggaaccaccttcgtgtctcctcagaggggcgggcgctgtcgcctaactggtccccaacggcgtcggagcagaggcaagatccaggggcactggcctcgccgcggtaccgggcgggtacccagcgggctcggctctatagagcccgaggccccgctgccgctgccgccgccgccagcagccgttgccgccgcctcggccaaaccatccttcagacacccgcgccgccgcctcacaacatgtccgccgctgccgctgccgctgccgctgctggaacggcgacggccgcctgggaactaatatggacagagccaggcacagtgggagtcgcagtggctgccgccgtggccgcgtagcccgaacgcagatcgtggaagccgaagacgcggcaacggtggtccctccagatgccagggaaggtttgcaggaagccgctcccgacaccctttgcgccaccggaagcctcgttccctcagatttccccctccctcccggaccgacttccgggtgtggctgccgcccttcccccacccacgccggcgggagccgcccgttcgcgctgccagcagcttccgcctgctacggtcctggcaagcacctcgggatcccattccttcacagggaccctagccaggcaagcgcgcgcctcactgtaccggagagctccaagcacgcgcttggtctggggcccggacgctacatctgggaaggggtgggtggctgggtagataggcgaggaaggatcgtctctaccctctctcaagtagctgaggcctccgaaaccttccctagctggatttggggacagaggagcgctggtattgataaaataactctctttgctattcctttaggagcccaaatgaggattgaaagtgagaagaatgggacctgggcttgggggtgggaggtggggaaagcagaaccccgtgtgcctgtttctgcgtcgtctggagaaaaagcttttcaagatgtctgatagaccttattcggttcaaagctctctaaagtccttcacctttttttttttaaacttcatgaaaaatgaaacatttcagagaagttacttgcctagaggcaactaagtcgcctaatggctaagtaggaaagcagaagtcagttccaacatagtggaaatggagtggaaatgcatggcatacaatgagctatattagaaggttcccatttagacagttttcatgttgtattccatgttggcttctacaggggaaaaaagtgttagagcatcttaagcaactgtttttacttctttccatagtgactagtaatatcaacaggtgtcaaggtctaaacagaaattgcatttaaaaaaaaaaaaagtgtgtcagccaggcgttgtggctcatcatacctgtaaacccaacactttgggaggctgaggcagggggatcacatgagcccaggagttcaagacccgcctgggcaacatagtgagacccgtccctacaaaaaaaaaaaatatatatatatatatatataatatatatttatatatataaatatatattccaacatcccactgtttatagtatagcctcttctatatgacaatatgaaacacgggtttttttttcaccaggcttggtggcaggcacccgtagtcccggctactctggagggcgaggtgggaggatcgattgagccagggggtcaaggctgcagtgagttgcggttgtgccactgcacttccagcctgggtgacagaacaagattctttgtctcaaaaaagataaaaaaaaaaaaaaagtaaaaaaactgagtctgtcatactgtcatgtggaagaagaggctatactataaatagtgggatgttggaatttctaaaaactaaacaagacactgttgaaatccattttgtcactttggttcatcagattcattactcttgatacatatgatggcaactggcttgttgacagtgttttcttaaaacgttctgtctgagccctatatgctgctctcaagaagacattacagtttattatgctattttttcatttagcattttctgcaggacaacttactggttctttaatttctgaagtgtagacacttgtttttcagtgctactaaatttagtcaaaacaaaatttctttgattaaaaacagtattttaattaaattttcttcaggctgggcatggtggctcatgcttgtaataccagcacttttgagaggccaaggggggcggatcacttaagctcaggagttcgagaccagcctggccaacatggtgaaacctcacctcttctaaaaatacaaaaattagctgggtgtggtggtgggcacctgtaatcccagttacttgggaggctgagacaggagaatcgcttgaactctggaggcaaaacttgtagtgagccaagatcgtaccactacactccagcctgggagacagagcacgactctatctcaa

SEQ ID NO: 581 - DNA, 4001 bp, Homo sapiens
tttgagagtcccagttgtttaaactgacagtttatagaagcagggcttgaaatggtttaccagtttgcgaatgacaactgaggaatttaaatgcatggactaggtgaggaagactaattgtcaatgtgtttttgcctttgaaacctgaaagcattgctgagtaattgccaaaccaacaaaattagaatttcaatgattcataattcaaaaagcctttcaaaataattgagagtatgcaggaataaatttcacagggcagtaagaatgtttataaaaatgttcttgcaggccgggggcggtggctctcgcctgtaatcccagcactttgggaggcccaggcgggcggatcacgaggtcaggagattgagactatcctggccaacatggtgacaccctgtctctactaaaaatacaaaaattagctgggcgtggtggcgggcgcctgtaatcccagctactcaggagactgaggcaggagaatcacttgaacgcgggaggcggaggttgcagagagccaaggtcgtgccactgcactccagcctggcaacagagcgatactccattaaaaaaaaagaaaagaaaaagtcttgcatctctaacctaacctatcttctctgctctctttgaagttctatgaatcaaaactgtgattacaattttttaacaaatatttaaatacccgtggtaataaaatgaattcctcatgctgtcttcgccaagtggtgaatgctaagaaataagaaaggaaattctggaagttccaagtgaacggtcagaaagccctaagctgcttttagagatgcacagaaccatcaggctcaaatcaaaatataatttaaaaatacttacttttctaaactctaacttggcctcctgacaaacataatattctcctaatggttaaatcctaaagagtctagaaaattaagtttttttataagctgcatcaaatgttacattaagagaaatgaggacaatccgataatgcaatgcaaaatacagagttgcatttggttactgatttataaattaaaatttgggagaactggaaagattatttctacagtgttttgtgtttttcagatgtatcctacttgaaagcacggttgtgaagatacccaggaccagcaatttcctttctgtgtgggacccacccgctgcgatagaattgagtgcagaagactgagcttcgtgtaaacacaaggtcaccagggatcgtaatttcaaactctcccctccccctcgctccctccagccaccaaagtatctgaacccagaactcacaacaggaacgtgtactcaacaggaacgtgtactcaattagcttttgtgggaaagggttgaagattcttggtaactgcttcaacaaaccagaggaattaattagaccgctgattttctccggaagcgcgaagcactaggccgtttgaggatctccgctccgctttgcctgggaccaggaaaagacgcgagagacggaactcggcatcaggcactgcttggggcaggaggagagtaggggaaaccaaggaagagaacagaaaggtagggcacggggagctgagcccagctgcactcatccccgcccccggaaacccccgcagctcccgccccaaccagcccccctctggcgcctggcataaggtagcccccggaggcaatgagggccagcaggagtctcgcgcgcctgcgacgcgggtaagggggctccaggctgcgcccacttccccgagctgccagatcccaccctctgacgcacccttctagagggagcgggctgcaagcgctggggcctgtcccttctcccctacttcgacttaccttaccagaccgactagcgctggccgctggcgccgaagcccctatgctaaaaggagacagggctgggccacggggcgcgctcccgagcagaccggccggccccggggcgcgctcacggcaccgaggagcgcgcctgcggcgctgctcgttcaaaccttgttcccctttacggcaatcgcgaaagtgtcgtgaacgtgctgccgccgatcagtcacccagtcggctggagtcggaggcgatatttctaggggtgtacttgttggggtcagggtaaggctgcggagcgcggtcaccggacgtgaaggatttgaagggcgttgtaggggccagtggagagaggactggatgctctggggcgggtcattaggatatagctgtgtatggactcgcgcgaggcgaacgccgtccttcttcctggcgcagggtggcctcgcgcgcggggttgtggggaggcgaggggcgactgcccccttgcccctctgtggagactgcccccttgcccctctgtggagacattggggtggcggagcgccggcgcgggagccggggggctgttgtgtgggagcccaaggtaggggtgggaagaaccgtggagggccagcgctgagcgggccgagggctgggagcgctacccgtgccgaacggaccttgcttgtcaggtccacaccctcctgcccgaatgctggcaagtccacacaccgtgtggcatcctctgccgggtttgtctccccttaggaatgcggtgctgatgtttgtggctgggacgcgcttctggtcagcaacttttctggaaatttcagcctatattgataagctgtgagattgctagctggcgtttatttcagcagcattcttgcaaggagaaataaccaaaagagttgctggtgtttgccagtattcccagaaacactgcatgaacgggatctttagccatgtttaacttgttttctccaattcagtgcttggcattttggtgtcatttttgccattttgcatcattagtattgaatatataattttgcttgaagtcttttaatcagtaaatccatagtatgacagtaggcaaattcatagttgtctttcaacaaatgttagtgtctcgtcttgtatgtggacaaagaataaagatttatttcctactcgaactattaggaatatgtccagtccgtagatgttgagttgaacgacttataacacaagttagactttggtaagggcatttagagcattactaatttagagccattgccattcacataaaattcgagattgaggttctaaaagcatttagtttcctcttcgttttatgctgagaaaaactagttaaggccccctgcacaacttgtctttccaacacatttaagaaataagttagtaaatctaccttatattaacaccaattacattttattgcacaatttctttgttttctaggctttagatttgttttttaagctggttaaaggtgctgatgttctttttgagggtcatgctgtgtttatttttaaggggctagaaaaataacctataaaataccaagcttttgctgatttttatgttgtgtgtgtgtgtttttttaagggggaagaaagtgatttcctcttttaaggagtgcaatatttcacttcagcaaaacgctaaatctaagttgtgttacacagccctgtttttgcttccaagtctgctgaaaaggcttttgtttttgtaaacttgctctatgtatcacttgttaaataatgctgaacttaatcctgtgatcctattagttttctttttcttttttttcttcctttctttccttgttctttataatttgcccttcctttctgctagtgtagccatgagtatttttctttaggtagccaattacctgtgaaaagactgtaaacatactgctgaatcagtgcagatcaaaacttggcacccttagacatggcggggatggaaattctggaatttcacacaacaggttgtgtattgtgtaagcttaccttatgcactgctcaggagttagagatttttttttttaatgtgatacttgtcagacattccccatgctaaagtccacacaggaataatgtagcccatatgccattatcctcagctgatataaatgcagccgttttgcatgatagacttttttagtaaaggtattaattaaatatctctgattatacttt

SEQ ID NO: 582 - DNA, 4001 bp, Homo sapiens
ggggtagagatggtatgaagggccgggttcaccaaagtagggcctgtctgccaggtcggatttcgagcaggagcctggatgggggatgtcgtggggatatccagccgttcttgcctctaaagagaaaggttccagttgccagccctggctgtggctgaaataagaactcagccaggggagcctggaacctgccagctgggaggtttccctcttctgaagttgccctcattaagacactcaggccacgtcactgccagactcctggagtggtgtgtcacatgttatgaccacctagacagtggtcagggggcttgggcaagcacacagcaggtccaggagccagcaagacaatcccctcagaggaaaggaagtggcctgtgagctggtgccgctattaaaggcatcaagccaagactgaggttcagaattgggggtgagtcaccggacgccttctgatgggtgatcagttgttggcaacaccagctcagccacactgatctcattttgaaaaaaagtgacccattggccctgattgttttagctgattttaggacaagcaaagaggaggagagagagaaagagaagagtgcttgcaagggtgtggacgcctgtatgggcacgaggaggtgaaggtgacaggaagtgtgatgggggaagaggctgtggtggtggggttactctgaagtgtctctaagccttgactttgagatccatttctgtggagccccctgtccccaccccatcccaggtctgtagactcccctcccctcccctcccttcctccacagggtgtgtgaaccagcaccaagcggcaccccacaatttccacacacatccctataggtagggactagcaccatccctgttttgtgacaggaacactgaggctcagagaggtgcattcctttgtccgagatcactcccagagccccagtgtacccgactccagatgcatagtactgaaccggttccagacaccagtgtgtcactgggctgggaggtgggcagcgtggagggagcatatagggcaggggagaccaccgggcggagaggatggcccagggagcacccagctgaggaaagcaagaaagacttggcgggaaaccccagccctctctcatctcataccccggccccgaaggcggctgagacccttgacgagcggacggagaaaagccaaaagccggcggtggggagcaggagggacagagcgggagaccacaggcgaaagaccagcgccgtcgggggagccaggctgagtaccttcctgggcacagatgggacggcgcggggccaccggcggtgctggttccgggcgcactcagcgaccccggccacacaccccagcctcctgggcggcctcgaaaggggctggagggcacgcccgccagctctgcccggggctcagggagtcttcgaagacttcttccaacggtggcggactggggccccctgcctgagagaccacccggagactcagagacagagagacaaagggagactgggtcagggagagagaaggctagtgccgaggagagtaggtgcgagccgggaccccagagggcggcgagggcgcgcgcgaggccgagtgtcagagcgtggaaaagtgggcgtccagcggtaggtggacggatggggagcccgggagcagagccagggtccgtgggcagacgcggcgaggagaggaggcggcggaaggactggcggatagacgggtccgagggctgggaaggaggcagcatcctcacttccagcctcgggaccccgcgcaccccgcccctgggcgcgccaggtagcccacctttgtccgggctcgcagccaggtggggcgggaggggcggagccaggggcgggccgaggccgtgccttacctgtccggccggcgggtagggggaggaggggctcggggccgagcgcccgcgggagccgagcgcagccgagggcgagccgcggaacggggccggcgtggagaggtgcgcgggcagccggaggatgtgcccgggctgagcgggactggaaggaagggggagtgggcgggcaggagggaagggggcgggagcgcggggaggggacagaggaggggcggcgggtggcgggctcgactgcccccagccgaggggcagccccggggccgggcccggcgcgcacccggccagcgcgccctcgccagctgcgctctgagttctgggccagctccccagaggcctaggcgccgccgccgcgagggcgcggggcagacaaaggaggcagacaaaggcgggcgcagcccagcagccgtgcgggcaccgggcgaggcaggcccactcctcccggtgcgtaagagccgcctcggcgcggcccagggcgcgtgggacgggaggggctccggcagttgtggcgcctctggagcggccccgcgcagggcgggcgacaaagggccgcggcgggcggtcctcggtggaccccaacaatggagcgaggctgcgcgctcagctgcggccgcgtctgtcagggcaggggcccggggccacaaaaggattattccgcctagactgtcaaaagggacggaagaaatgcccagggcgggggaggcgggacggggaacggcggggcctttgtagccgcagaaagtgcgcagagtgggcaggcggggttctccgagaggtcgctcctggatgtaggggtacaaagggtcttcaaagtgctaccagctcacctggggcgctgacggcgcacctgtgccctctttcccggtagggaagggagaaagacaaccgccccaatacacacacacacaaacacacacacacacacactcacacgcggcgcggctctcgccacgccccgtccaaagccggcctgaagcttctcagaccggcccaacccggacaaagccagcgctggggccggctcatccatcaccgcgcggggcgccgtgtcctgacgaccctgggagtctgagaatgctgggttatgggtcccgtgcctcccataactcacgacggggtcggtggggccacggacgctgcaaagatcaaagagcgatggggccggactcccatatgtgggaagcagcgctcccacctggcgccctgagctcgccaggtggcttccatttcgactgttttctttctccagcgtgtggcaaattatgactttgaggttttagaacacagttctgccgtcaggctaaatgtctgtgttcctcttctgatgccgtcccctatgacctcgagcaagtcgcctgacctctgagctcatgattatacctaaatttcagtgttctaggcgtgaatgcagtgccctgtgtaaggagataacgtttctaaggtctggcccataggaaatgctcctgtaaaattagctgccattgttaccgtgatattattagcttggtgggcaccaggatggattgatgagaacactgaactgtttattcactgaaaggtttgagtcatccatcccataaatacctattgaacacctactatgtgccggcaccggaggtacagtagtaaacaacatggacaagaatccctgcccccatggagctcagattctagtgaaggagacagaagataagtgaacaaataaatataaatgatgtcaggtggtgattagtgctatgaagaaaagtaaagcacattacagacaaagcatgaagggacgaggtgttgttttacataaagttattaggaaaggcctctttgctggggcagttcttttggcaaagaaaaggaggtaatgagccacgtggttgtggggagaagacttgcaagcagaagagccactgcaaaggtcctggagcgggagtgtgcttggtgtgtttggtggagaagagtcagtctggaacagagtgaggtgacatcagacagggagctgggataggaccatgttgttacaggaaaggggtcctgacccagacctcaggagagggttcttggatctcgcacaagaaataattcagggcgagtccatagagtaaaaagtttattaagacagtagaggaataaaaagaatga

SEQ ID NO: 583 - DNA, 4001 bp, Homo sapiens
attttaccttgtaacataaaaggagggggatgactagtttttctgaaactactagtttttctgatactgtcatgatcttagtatcttatttttatcaccatttctggattcccagtcggatgtaggatattaagcgcaaaactttgggaatataagacctaacacgcaaagtcagaacaattcatccagttctaagccttgtgttcaaatttgctatgagcatctaaattcatggttctgaaagtattttaacggaccacctgcatcaccttccccagtgtcttttattattactattattattattattattattattgagacagagtcttgctccgtcgcacagggtggagtgcagtggcacaatctctgctcactgcaacctccgccgcctggtttcaagcgattctcctgcctcagcctccccagtggctgagattacaggcctcaaccaccacacctggctagtttcttatatttttggtagagacggggtttcaccatgttggccaggctggtcccgaattcctgacctcaagtgatccgccccgcctctgcctcccaaagtgctgggattacagacgtgagccaccgcgcccggcctcttcagggtcttttcatgttaaattagattcttaggacccacttcacacacctattcaataggaatttatgagctagagcacgagacatggcatttttaatacgcccctggggtgagtttaatacacactttagtttgagaatcactaaattaaacccacagacttctttgctgttttgtccccaagatatctatctacgtggaatgtcagtcccttctcccttccaatctaaagttatttcctaattagacgcagtagttaacaaatcctccagttccccaccaacagcagtttaaaaggaagcaagacgttaggaaagattaaagactgcacgattttaagtgtttgggggcctctggcacatcctagaaagaatcatgcaagaaagaacaagagtagctagttctccattggctcaggaccaaaatgatcccttccctctcttcttcaccttaagcatgagcaacatctctggcaattccgtggcacccatcagatatgatttcctctggcgacccccaaccctatttagagaatgtcccctcttcacagagctgcctcatgattggtgtgaacacatttcacatacatcatcaaacccacacacccgactacagtcccatggcctcctcggactcccgggactcgctgccgcctctgctccatctctaaactggggctctgacccacaacggcgcacgcgcccgcccccaactcagagcaactttccccactcctcggattaactgctaccctctccgaacgccggcccgccccaggtccgtcagcgcacaccccggtccccggggtcccgctccgggaactccggccctcggttgcccctggctcccggtcccccagcgggccccttcctcccctcctcagaaggatgccctcccaaggtatcccagatccggccggcccatgcccggggacccggccacacgacacgactgcccctttccgcctgcccgagaagactcgggcttgttttgcagggcaggggtgcggtccgtcctccgatttgcctctcctgccctctctccctccgggctgccctccttacccgcctgcagcccggtttcggcgacatcgcctgcagggccgcgctcggccccgccgccgcccgtgagggaggagagacaagtgtggttgtgggagcacttgatgtcgcggaagaacttctgggtctcgcgcaggttctgtcgcagccgtcccaggtagcggcggtagcggccgaagccccggcacagctcgcggatcattccgccgccgccggggccgggacccgagacgggctcgctgccccatggcaccccgtcgccctccatcgcctctgcccgctctgtctttgcggctcggtccccggccgcaggcccggcctccctcctccccgccccccagtgccgaagggaggaggaatccgcctcctgacgcccccgcctgcagtcagcctggctcccaacctccgtcactgccgttgcaaacaaaccaaaccgcagtgcgccgctatcggaacctttctctccactatccagaagcgtgagggaaggatcgctggaggacaccctcgccgcggggtctcctgggacttgcagtccgggctgggaccaaacgccaaaacctcaaggctggagaaggggaggctgtggatgggactgatcccttttggagaaaaccctcactcgttcttgtgttttcgcgctctcttcattttaaaaagtgttcctaatccctctatgagcgtccctgaggagagggaggagctgcaggacctgagtgccagcagaagtgggggggccttaccgaaatcgtagcgaaagatgttaatagtagagaaaaggaaggaaacaagactgaagacagtcatctccatggctaccctaagtggctctctagtgtttcggatacagtagatactggggaatcggctaaaagtaccctggaaatcggctgaaagtaccctggaaatagggaaatctcttatatttgcattgcgttccccttttccaactttccttctccagacttggaaaggaagggtgtgaaaggatcaacaagagctgtaagctgaacttcagtgggttcctgaagtagggagaccggactgggtaaggggaagttgaggtttgtagccttccaaactatttctgattatcttaacttggtttctgctaatatggaggactttcattgacacacacagtcacagactcctggacacaattacaaagggggcaaaacttgacgtcacctcttttgtgcttcctgaattatctctcccctcttcaccaggcacagagcccatctgtatctttcttgctatagaaagacaccgtcttttacctaggccagacttcttctctgataggctacatgatgtagttccttgactgaaattaagaggagatttgagtttggatctggactcttcctataccttgcattgtgatctcgggcaagaccccgtttcatcttctataaagtaagggtttagaatggcagatctttaagcccttttggttttaaatttttgtgagtcctgcttcagaaattttacttctcctgacctctcatcgcagaacacccaggtgttcttagccaaatgatgtcgtgatatttggattaattgttgtaagatgtgaaggccttacctttccaggggcattagcattttataaaaaggggtcactaattcaaatgaatctgtatttgataaatgtctgtgagggctgactgcaaggagggagcctcatgctccttcccatttacccactcccccttctgccttttacttggtcacgtattttccatcagccattcttcttttgcaagattatattccccatgcaatccccaaaggttcagtaaaatagaaatgaaaattaaaaatgggaattttaatacaaagtagatactatttttaaaatagaagagctgtaagaaagcaatgtgtaatgatttgccacacacacgaatttctagcacaggagatcagataagagcactcaagctggagttatccagaaaaggaatctatcttgaagaaggggcaaaatttagataggtggaagtaatcagagagggcattatttcaggtaaatatcacaaagcccacccttttaaaaactattccttagtactttgcatttattttcaaaataagtaatacacgaatgtggtataaaattcaaatggtgcaaaggatatataaggaaaaactaagtctttcttagtttttctgttcacctcccagtcacctagttcccctcccaggaggcaaccactgttgtagatataaatcatgtataaatagatcctatatatgtatttatatatgtgtatgcatgtattttaaatacaaatgatagcatacgtaatacatatttgattatg

SEQ ID NO: 584 - DNA, 4001 bp, Homo sapiens
tatggtagagttagtttagttatacactgttttccctaaagtcacagtttccaagagcctatctagacattaagtgaggacttactatataagtaacagaaggttgtatgtatgtagaagtggaagaagccctggttgtggctgtgatcatccaaaggagtaggtagaagaagaaaaggggtcaaggatggaacaccaacactgaagaggaaaggagatgattctatagatttcatataataacgaatgaatttcagtgactattatgtaacaacgaatgagtacttgagaataggaaagagggaagggaaaggtaaacacatggagaattaggagaaaatctgtcacaaaatagaggctgaacagctcccccagaacacacatatagtaaggtgtggaagtataataaaacccaggcagtttaacttcaaagacagagttcttagccactgtgcgtactgtcactcttaaacagaggacaaagaagttactcaaacaaggtcccaggagagacagaaagaggagcatttaagtataattacaaagattatctaagagggaaataaataaggatggtataaagtttcagactgctagcaggaagttgagggactacttctcagtctctttctcaatattattttcctagactcatcgctgaatataaaaattcccttctcaggttcgttttccacatagtttcaaggggaaaaagaacctctggctatagtcgaccttcacatgagtgagattttatttctgtccaaggttaatctgggtagttagctcccttatctgaaacttaccaaaaagtttaagttgatgacatccaaatctaacctcaaatctcttattgccaatgttttagcgtaagaaaataagttagatttctacgtattaacatgggaatacgttcaacttataccattaaagtgaaaaaactggacgttttgatccgatttctgaaaataataggtattacctctagcgtcgaaaacatctggaataatatacttcaatctattaacaggggtcatctctggcggatgtggttacaggcatctttcactctataatttaaatttttatgaccgtgtagtaaacggggaaaataagattttgttcctgttagaagcagatatcctgtcttctctgcttgactgagttccttaacagcgggtcatattcactggtatatacctatagcacatagctgggctcactaagattctacaacaaacgaatgaattaatcaatgattaggagttttgagcatctcaaataaccgttgaaggaaacatatacacacaaatgcatgcattttcccgttaacgcgcaatggagatgtaagctgtaaggggccttggaaggcagttatttcgacgtccctgcctacgttacgattttaaaagcccgattacgattacaagtgtcccgaggggatgaaagtacagctttctttagtagtccctgctaacactaatttacccttgccatgggagaactcagaagctgagttcagaattggagtcggccctggtcggaggtggcgtgtgtttcgggggaaatgaattccgccagctccgagcagcggttgggaccgttactcaccatttctcaggacgccaagctggggctggcggagcaccgaattgaagagcatcagggtcggaggaaaagcctcagctgagagaaaagtcgtagaaatgcctccaagttcagcagaaatcgcagcttgcgcctctcacaacacaaatcgttatcgcctccaactcccgccactgtaagccccggccgccaaactccgcgccaaactgacgtcacgctctctgattggcttccgagcgacgtccgggcgcctcagagtcatttcccccttcggatccccgcctccttttctcccagccgcgggaacctggagtccaagagctccttgagcgcctgcgcagggggtagcagaggcgcggacaaaccgcggggtgaccagggcgcatgcgtaacagggcttgacagcgcgcggaagaaaaaccagcaagaaggcggcgggggaagatggcggtcctggggtagagtttgcaagctttctgactaggctagtcgagtaactattcgggtcatggcgtcaaactcaactaagtctttcctggcagatgccggctatggcgaacaggaactggatgccaactctgcccttatggaattggacaaaggtattcgaaagagagggctgaatgggtgaaacaggcgtggggggaagtggcgccaccaggtggtggttgctttgggagaagacggataggcgcatgcgcatgtcttcgctgggcggggagcgcctgtgcttttgctggggcgtgggctttgaccccttcgggaggttgcgggaaatttgcaggattgtgtgactggccttataccggctaaacaagtagcgagctctagtgagaggcccgttttgaccacttgagggagcagtcccccgattttctaagcagtgacagtggctagtttctaagagacactgcaaagaaattgtgaaattggttttcagtctgttcagttgagaccaggtcttcatgaaatgtgctgaatagtaatcttgcaccgacttgacagcgattcatttgatttccatagctctgttacctgcgggttacaaggcaggctaaacctggccaagaccataaaaaagcaagggccctgctcattctctgcggacaagttccaggagttctgttgccgtacagggagcagcttggtgtagagggagctttggggttacactgagttaagtttcaatgccgctgattttatgattaacttcatctagcctcggcttgtcgtctgcaaagtgggtacagtaccattgagccggcagaattgtattaagtgacttaatggtatgcaaaagaagcatttagtaaatgctgaagagatatacctcccttcttagatgtggatatgggaggcaaggtcggaaatttgttagtaaagaactcgactagtaatatgaaacctttatttcatattgaggatttttattgtacgggaaacatttcggcagctggtatacaattaaatcttgattaatcgtagccaatatataatgttggagaactggactagaactcagaagggtttgagccacttcccagttttctgagttggacatgtctattaacttttttgggactctttttctgtttattttttaaactgtgaatatttttagtgggttagtctaaataagagtttctcaggctcttaaaaaagcttttaccttattttgataaacacaaaaatttcacagccccctaatgggatattcctttggttgagtctcagtatctttagtgcacccccatcaaccaagaaaattatgttgaacttttccttctcttaccaaatctttaggggttttctcctctgaaaaaaaaaagtataatactaaatgtgtttttctctttttttttggagacagagtgttgctctgttgcccaggctagagtgcagtggcgccatctcggctcactgcaacctccgcctcccgagttcaaacggttctcctgcctcagcctcccgagtagctggaattacaggcgcccgccaccacgcccggctaatttttgtatttttagtatagacggggtttcaccatgttggccaggctggtctccaactcctgacctcaggtgatccgtccgcctcggccttccaaagtgctgggatttacaggcatgagccaccgcgcccggccttaaatgtgtttttcaaacactttcctcctcattctgatacatttctttcttattcctcagtgaaagttacaggtcaggataatatctaatatccctacgagttctaaggacattttctaccattctggtgcagctgagcttgtctcatgctgacaataggatagtggttgtggaacagggataaagatggggcactgaagaggagtctagaatggtttaattcctcaaattttgcagttgtaagaa

SEQ ID NO: 585 - DNA, 4001 bp, Homo sapiens
catctgagaaagacccatttgtccacccttgcatgcttgccatttaattccctcactcgctgcaaaggcaaaggggtaaccaagagcactggcatggttcacagaaaggtacagcagctaaatatacatcagggtggatgtcaactttctgcaaatccccttaagtgaatctctttaacttggagctattcttgccttccattctctattggggtcctttgaaaagcacaacatagtcatactaaaacctcacatgttgtcttttggcctcttataaattaatctgcatttccccttttcactactaactggtgtcctaaaacgaaatctcaagccatggagccagatctggaaacctggaaaccccagccccggcaaatccctcaccctttgctctctcacctgcccccgccctcattcctgcctggaaaggacaacttgggctctcctcccctcttcatctccctggctggcacagactgtgcatcctagagcttctctcaatgggaggcagccacgttgtataaggtttcaatcccatacagatatccccccttcaagagtactgattccgtaaagaggacctcccaattagcctgtactcgttgaaagggacagtgaattgttgcccaccggatctatctctgatttcagagtgtctgcaaaaagacagctccttcctcctgtaggcacaggggcactctacaactcaggcttgctaactcttcttcttctattagacatgcacatagcaaagacgccaaaccccacgccaagagacgctcacctaaacgaactttaagagctatcaggaaaaatgccatctatcatccgtctacacacgaccgtcaccattctcatccgtctacacacgaccgtcaccattctctgacacagaaccaaagtgtcacaggcggaatccacactcacgcgcgcacacggggcacgcacccatcacgtcggcagatctccaacgactcgggtttctctcacccacctttggatgggagcgaaggagtcaaccccccttcccttgcgtagtattttttctgaagagcgagttctattccagaagctataactgtttcccggttggaccaagcggtgaaagtctttgctattgtgttacctggtaggacacgtccaggatcaacataccatttcttctgagagggacgcataagcgtgttcacagagacacgcgctgggacccccacctccacacagagttcaaggctcacacacacacacacggagtgtatagagagacctgcatccctgcagcagagggtcgggcgtacatactgcccgtgaaaccatccagtctggcccagaaaatctcccagagaaatactgagctatcccctctcccttccaccactaggcaagagctggagagaaaattaagtggttagagaatgcttcttccccattcctggagcacttaacatccccccgccccccgcttcactcctcggcacacagcgcactaatgagccccgagcatttaaaactgccgcaaagcatcccaacaaacctcattttttcttcgccccaaatccaagtagactgcagggagtaaacgcacagggtagcaggagccaacggccggaaccttataaccctacctgctgtagctcctccgtcagcatcgcatctctatctttctgtctctgtctctctctcacacacacacagatacacacacacaaacacacacactcacactcacacaagcaccgccttacaatcctccacctccagtcccgggctctcaggagtagtcgcggtgacttccacttacttcataaataagtgtattcctccaccatctggcgctcctcttcagctatggactcgcacattcagcccccattcactcggcttcattgatctccagcagcaacatagttactttctcttttgctacactgtaaatgtaaggttctgagggggcggactcgccgccgaccgacggcgggttgggccaataagaatccggagaaagccgaccgctacctcacagagccccgcgaccaatgggcagcctagggggcgggtaagaaggcgtggcctcatctctttaaggagggtttatccgaagctgctctgggtcctcggtgttaaaacacgggcggtgatgtcattggcaaccaatcaaaaacttaaaagagccagccggggccgcgcggagcagctgctctctatttacatgtaaaccgaaccggcaggatgcagttaaccctttaccaggctgaagtgtcagcgggctggacgcgctgctccgctaaaactggctcttcccactggacgggatcctccaacactccctcacccggggacaaaccacgctatttttcctccttactatggacagatgatcaaaagtatcggagtaactttctaaaggaaagagactgcgatcaccgtccctagtgggaaagccgggttctctccgagtcgctcgaggtgacttgacaaacgctaagccaaaattcgcggacctcgccgggtcttctgcgctaggaccagcatgagcgcgcagccaggggcgacgcttccgctccgagccgcggcccggggccacgcgctaagggcccgaacttggcagctgaccgtcccggacagggaggcccttcagcctcgacgcggcctgcgtcctccggagggccctgctccgcccgggaagcgtccgcctcccgcccgcccgcccgcagatgtcgctgcccctctggctgtcccggcctgaccgccgcgcgccgccctgctgctcacctacttccgcgccacggtcacgcccctgccgtccccaggctaaccctcccggggctcgacccagagcactaaggcggcgccactgagggctgctcggaggaggaggcttgagtcgacgccagaggcggcaagggacgcgccctgagcagcggtgcagaggccaatcccctggccgggcgtcctggggcccgctacgcgcccgctgcccctccgggtctgggtccccgcccgccgccgcccccctttcccgcctggcgcgctgggtccccgcgccgtgccagcagcgcgcaacccacccgccccacatgcctcggccgccacccctcggtcccgcacggcccctgccgaggccaggaccggcagcccggcgcttctggaacagccgcagctggcggaaaagagccagagccgagtgcaaatagctagattgaatggggccggaggagcgtggaggaggtgacgccgcctctccccgctcccctgactttggccggcgccaggtagctggccgcagctcctgatcagggagaagagtagggggcggggcaagccgccccttgcctagtccggaaaatattctcattagggaaactgcaggaaagttgccctgggatacaaaaagaagtggagatgaacaaccccagatgaactgtggagagtctacgtccaagaaccctaaagaagtagagctttttcttttcttatctgtgagagaagggataaaaagtgaaataatggaataatacattatgagcactagggaatgttgggctatcgtttttctcccttacctgattggatggggtttggaggtctacttcagactccaagcctagtagtatactgagtagcaggggcatattcatgtaattgttttcagggcagatctgaaatcaggaggtgtcagaccatagctagcaagtcagctatgctcaatgagctgtgaagagaaatccccttgggcacctccacttacatgcaggcacataccccccagtccagcttttcacaccagtgttacgacgggcatcacgtacacatccgatagtcttacataggagaggattttgtgtaacgtctgttgtcgaaaatagtcaaactctgtaaaatatttgaagagatttattctgagccaaatatgagtgaccatggcctgtgacacagccctcaggaggtcctgagcacgtgcccaaggtggttggggtccagcttggttttatacattt

SEQ ID NO: 586 - DNA, 4001 bp, Homo sapiens
tgagaatctggagcttttcataggctttttcaaagggaagttggtcagtcttcatgagaaaagcagttattatggccacacttcgactgactcctgcatgactgaaaaagagacctttaaaataaaacagcaaatagcaacaattaaaaaaaaaaacacacaaagcccagccccctattaatagtaaagtttaggcccacttcatttttgcttctcaaataagcccattgcctctgaaatattatcaaggtacaaaataattattcctttttccttttgaattctgaaccacgtgaatctattacctattcaaaaataataacagtaatttttaaaatttttataatggctcagaacaaatccaaactcctggctagacacagtggcttacctacgcctgaaatcccagcactttgggaggcgaggtgagaggattggttgagtccaagagttggagaccagcctgggcaacaaagtgagaccccacctctacaaaaaattagccggatgtggtggggtctgtagtcccagctactctggaggccgaggcaggaggttcacttgagcctgggaggttgagactgcagtgagccgtaattacgctactacactgtagcctgggtgacagagcaagaccctatatcaaaataaaaataaataaaacaaaacaaaaacaaatccaatctcctttcatcttagcattcagggacctcaaaatctggtcccagacttcttttgatttcatcactatcttcttttatgtgctcaataaatttaaacgattattatactccaatccaaccaagaactgcttagggattcccattttctttttttggggggagggatggagtctcgctctgttgcccaggctggagtgctgtggcatgacctcggctcactgcaacctccgcctcccaggttcaagtgattctcctgcctcagcctcccgagtagctgggactacaggcgagagccaccacgcccggctaatttttgtatttttggtttcaccatattagccagcctgatctcgaactcctcaccttgtgatcctcctgcctcccaaagtgctgggattacaggcgtgagccaccgcgccctgcgggattcccattttctttttgtctttgctgcaaccatctcctccctaggcaaagcccagggatcctttagatccaaaccaattcatctcttcatcaaccacccgccacccatcccaaacaaaaacatttaaccctaaatctttgtaaatcccgtttacaagacaccaagcaacctaatctgcattacaataatcggggtgggtgtctagcttctccaacagagctgtaaactccttagggtgtaggtaatttgtcatttatcagatgacacctcccccgccctctgctgctgcaggaagaaccaactaaagcatgaatgaatgaaagcctgcacacaccaggggcccgcctcaaccctcctcctctcttggaaacacgcctcctgcgggaggcagcgggaggaggttcacgcggcatgaccgcgctcttgtcctcccgacggcctcggaaggtaaggggcgacgggggccggctggaagcttggcggggcacgtcacccactgacccggccactcaccagtgcaccaacaccgcacggccctcagcgcgggcctgaccgatgaaggccacgcaccggtccagatggctgagtaggtccgtctcgggtttgtccagcgctggcacgaagaggcgccatagatcctcgaccccaggccccgccttgaagctgggctcctccgagtccactgttagcacggccgtgatgcccgcttccctcaggtgatctggctccgcgacggccgcggccccaccgaaatacaatcctggctgcacttccagcatctgcccggcacagctgactctgctggcgctggggttgctgagctcgcagccatcactcgggcccggagcctccaacatggccgcgcccagagacaaggcggcttcctgccctaccatcgagtagactccggctagaacatccttcccctgggactcgccagcctcggcggctctgctgctccctcggaggaccacgtcggccgcaggaatctggacttatcgctgaggggcggagcttcggccccattcagcgcggcctttccacccttgttccctctgacccctacccccaaagttgatggtgaaggataagcttccccaaatacagggtttctcgagctcttagtattgaaattttcaggaaagagacatcaggagcagctgaactcaaatgtgaaataaatgtcgcaccagctgaatcagaagcatcattttatgcatttgaagtaaaatttttttcaatattatggagccatctttactgtgcatttcatgattatttttcctttttctgcccaatttcattattggggtgtgaatccttgttgatgtttactgtctatttattttgaagatactaatcctatatttttgtaagtcaatgtcctccggccaggactacaagaaaccaactttaattaagcaagttggttttattactcagtcatgagttatggagaatttcagggcatctcagcacgaggatgttaggaagatcctctacagattttgggcttttatttggggattttggaaagggttgaaggaagcaggctttgctccagactgaatgctgcaggaagatactcagtacagtgagtatattttatatatcttttgtatagggaggacaggtgagagagatactaaagctgtaattggtcaagaagtagcagctatagtactggtataaagatagatacatcgacgtgtctctattctggaacagaacaaacccttgcgtgtggagtcctaattagggaaaaggagtcaggctggctggacgaagggaagcaaaaggagaaagcagacaagccataagtctgcctttcttcgtggtccaggacacatagccctgctgtgcaaataactcacaatctgcctgtgcccagccatcaccagaccctcagctgatagaaaaatggaagttagttcactgcaaccctggcattattagtactgcacaaagccctcttccacccacaacataagcaccattctacaaaatccccagcaagcctttgtttcctagcagtcagcttctctcttgctgacctgcctgttgcacccttgcaatgtattttcatactttatctaataaacctgcctttctttacctacaactgtgttggtaaattcttcctaccacccatgtcaccagcccagaaagctgctaatcacctgcaacactgcatatatgttagaataatcttcaaaaagagtgccaagaccacacaatggaaaaaggacaatctcctcaacagtgttgggaaaaactagatatccacatgcaaaagaatgaagatggacctttaccttggaccatacacaaaaaataactccaaatagattaaagacctaaaaatataacattcttagtagaaaacatagggggaaagcttcatggccttggatttgataaaaatgttgaaacaggtaagggttaatggtctcattgtctaaggtgttatccgaacttgtctaacgaccgagaaaactaaggagcatgggcacaaagagtgaggttgaagcaaaagtttaataagcaaaagaagaaagctctccacagcagagaggggagcccaagtggggtgccatttttacagctgaattcaaaacctattataagaaactcctctcatctctatagttgtttgagtaacttctcttatgaataaatctgtctgtgcaacttcccttatcttctgccgatgtgggtatgtctctaggcaagcacaaagcgtgggttctcttgtttgtatcactgtaggtttgttttaggtaagcccccctccttcctgtgcaagttcccacggagtccactgtgtatatacctgaaaaggggaggaaagtttttcctgggagctcgccaattacacgaagaatgaaaag

SEQ ID NO: 587 - DNA, 4001 bp, Homo sapiens
tatctgtgagtgtgacatccaggctgtctctacccccagataaacaagggtgacacgtgtgcagcaggtgggcctacacggaggggcctcctggcctgtgagcatcagagacctgggaatgccaggaggccaggctattctggacctgaatccttttcattgactagctcccccagaaaacacatcaaatattgtcagggaacagatacatagcatttcagcatcttcaagggattgaagacgtgtgttgctgttctggcccatccttccactttctagaagtgttgaagatgggcctctctgagctttgcccacctcatccaaagaacagagatggcccatctgtctttcctgtatcacagggctacagtgaggctgaagtaagttaatgtgtgggaatgctttataaagtaccatgcaacgtgccctggttcgtaaaactcatttattcaacaaagcagtacaagcctccccttcaatcaggacctgcctgcaggggtgggctacttcagtgtcttcagccaatgggagctagagggtttaatactttagtccacttcccttcatctctggccccatcgacaacatggggaaggggagtgagggcctggtagaagggtactaaggccccttatttcgttcgctggtagaactggaagactgctttctcctgctcataggtctcgatggagccgggtcgtagtcgtcggatttcagcaatggcatctcctgcagccaagccccgctccttcaccaggtaacaggccagcatggtgccagtgcggccaaagcccagagcacagtgcactcccacagcctacgaagagggggctcgatgggtgccactcaactcccccacccacaactgtttcctgcccctcacttggttctccccacagctccttcttctgtgccaggtccagggctctgcagcaaagtcagggagggctgtccctgcactaggtggctaggaggcctctgcactggctggttcaagagctgtccacctctacacagccctccacctgtggtgttcaatacagaagacagtagccacggctactgtggctactgtactcgaaatgtggctagtccaaactgagatgtagtgtgaaaaacgcaacagggtatgaagaggtagtagaaaaaagaatgaaaatatctcattaagatcaccaaagttaattttatctgcttccctgctttttaagaatgccgttgctagaaaaattaacattacatggagccacttaggttccattatatttggacagctttactctagaaaatggtaaacagcctccacctgacttcaacccccacctctcccaggtgtctgtccacacccttctccttcacaactcacagtattagctggttttcactgcctctcctcaagcccagttcgcactgcttcgccctctctttagttccttccgtttagcgcttccctcccccgcactggcttcccagtctcccggccctactgtctgcctccccgagcccagttaagttatcccaggcccggtctccccagctccgcccgtgtcccccgctgaccttccaggcccctccctccctgcgctgaccccgcccgctgacctctccccgtgcgttggcctcgtccacgatctgcacgaagcggtcgatctggtcgggggccggcgggcagaagtcggggatgcgcaggcggtgcagggtgaggccggggcagctgtcgctgtgagggggcccgcgctccgtcagggacaccaggtgccgcacgcccaggtccaacaggaactggtagtgggcggggagccgcggcagcgccagtcccgccagccggcccggaagcacccaggagaagttggggggctgcacgcccatcgctgggaaagggcacaggacagcgggtcatgggggccgaggctggccagccccgctccgcccacgcgtcccctcgcccgctccgagccaagtaactcaccacctacctggcctcggcgcctcccgggccacgtggtctgcagggcgccgccctcgggtcgctctgcccagccgcggggattggcccagaacctggggcggggctggaacgcggaacccagtctctgagcgaccgagggaagcgccgcgatcccgccccgtccgagcagatcacgcggtgattggctggatcatcataatgggcggggggttacttccacggggttcaacccactcagctaagaaggaagacctggagcgagttaggaattgtttgctgcggatggaacaacccggggtcgggctctgctgcaccctggcggcatgttgcagtcattgcgtcactggcgcctgcccctgcctcctcgcgggccggcctagttctacctccttcacgctggatgccctggggtttaagagatgacaaatcggctttctcccaggacgaggagtctcctctctaatgattgactggtcgttatcagcgactttttgaactgttccagtaagagggaattactgctgcaaggaggctattctcattttttcattgctggaactattaaaaacttacccagggtaataattatagtaataataataaccagcaccaacttctcctgtcaatccagttgctcctcaggacttattgagcatttattatgtgctagatagtcttctaagcacttagcacatactgactcatttaattgccacagtaatcttataagataggtgatctagtgaatcccattttatggatgaaaaaacagaggcactggagaggttaataaacttgaccaaaggatgatgactaatgcctccaaaatctttaataatatcgccatttcctaaagttaaatggaacattgttttctcttcacataaccccctcatgtccccaaatattatctgggttaaacgcttgtgggttttcttaatttttattagtatttcatatttcttcatttttcaaggtttcctagttctctgggtcactgtcccctgggcaggctagagttgattagtgttgttcttactaggtgggggcccctagatctgaacaccgtttccactgtcatctgaccagtccatatcctcatttgaataatgtgcttctagcgatgcagactaactgtaattatgaaaatagttaacccttattgaatttgtttatgtaccaggccctgtgccaagcgctttctggaagaaccacatgtgaaaggtatttttgtatctttttttgtacatgaatcattggaagcttaaagaagttggttaacttggccaaggacacagtgatccaagcccagggcacttggccatgaggatgtattatatttccttccctttgcacccacctatgacacacgtctgaccatttaagcctttggcttcagcaagatggaaagcaatttgtcttctcctaaagatcaaagcctgctctgaccctgtgggaaatacacttaccatttacccagacaattactttccccaggttccaggaggtgccaaatctcccctttttctccttccagacaatcacagccctcattaagcccttcctgtttgcactctcatttcctacataaattcctatcaaggttaccagccctccccagtttattcctttctctctttcccagccatggcctctcagccaccagtcacctcttcccccaaccccctgacctcccacttctcttctcaattcaactgctcttcaggatttctggttgcactacctctggagacaagactctagcatttgttcttgtaagttaatcttttcttagtccctttgccttgttctcctttctttgcttcccctactcaccagggaagtttccacttcactccctaccctcctatgtgctccttctttgcctccttgatatccagctcgaagcccatattctccagaaagagaaaatttttttgggagaccgagatcttcctcttccctgagtcccctaccaatgattctctccctcttgtgggtttctgcagggctagcagtgcatccatcaaac

SEQ ID NO: 588 - DNA, 4001 bp, Homo sapiens
taggaggcagtaaacatgttctataggtggggaaaaaaaagataacatggattgactgactagaggagtacattgtggctgagactgctattatcgacacactgatttcctctttttcttgggctcatgggccttatttcccatccttctttgcaagaaagcatgaccttgctgagttctagacgatagaatatgagtgaaaatgaagtgaccattttcacatctggaccataaaacctcctgggaaattatccgtgcttgtctccattttatgttaatactgatgagcattgtgactttagaagccatgctttaaagtggtgaaccttcaagacagaaggagtcttagttcttgaatcactgctcaggtacctgttttggaacttatttgagcaagaaagaaatgtcctttagatataatagctagcattactcttagcaatacacgaaactgtcacctatcccaaccacacacgaagcgacctctgccttattcgggggtatacaagagaggaggacctatgttaaatctctcaatcctgagagttttcctaagtgggaccataatgctgaattttcttttctttttttttgagatggagtctcgctctgtcgcccaggctgaagttcagtggcgcgatctcggctcactgaaacctccgcctcccgggttcaagtgattctcctgcttcagcctcctgagtagctgagattacaggcacctaccaccacacctggctaagttttgtatttttagtagagatggggtttcactatattggccaggctgggcttgatctcctgacctcatgatcctcccacctcggcctcccaacataatgctgaattttaaaggagaagtctctaagctccatttgggcgaagtgccctggcccatgagtgctgagcacctgccctcattcctgtcttactccactggggaagccttttgacacaggaagcaggagccagcaagatcccaagagcatcagagaaaagtgaaatcaagcagaatgataaattcttagaggggaagttaatttcagatgttttagttaggcgcttccaactaaaggctcaatcacttcagttattcttcacaccaatttggtgacagagatgtgattaaaagtcaggtctcctgttatgatttatgacagaagaaaatggacaggcacacacagtattgttttagcaggcaattaagcacgacatttctttaacgtctcgtggtttgtcttaaaatgttatgcacatttttttcattctacatgataacataacgtcgatgattttaatgtaaaagaaagtttcaaattacttgtggtaaaaagaggactctccaggaagatgcctcatgcctcttggcatcttgccacttgccccaggcatgcacatgtcccagtttaaaagacacagcttgattatggataaaaaattattttagtgctagggaatgcttccatgggcttctcctctcctcatcccttttcttatagtctacggcctgtcatccccatatccagccccagtcctactgaatcaagcagggccaaattcctactcatcctctgaggttcgggtccatcatcatctcttccagccaagcctcctatgaccttccaagtccagttgttcccttccctattgtctagtccaccacatactagatcctggtcatattaatatctagcacacacctgccacattgcaatcagtctatttgcatatttacctcctccagaaagtaggacacatacaagtactcaataatatttgttaaatgagtgaaccgaggtgatggctgcaggctccctggagctaatggcccaacctgtccccagcccctcccagctggggctgtgagggtgggagataagtggtcacttactggctaggggaggggcttcggaggtagtgggcctgcaccgccctcacgttggcttcgtcctcctcgcttgggactacctgctcctcctctgtgtcctttctggtcgccatgacaacctgccaacctctgaaagtttggcaagaaaaaggcagttagggaattaggttcctgaggttttgttgggggagaagttgtgttggtgatgtcacctcagtggaactaggactaggaaggtcccggtgggcaaaagaccagcaaggaatatccagtcagacctggcccagccactgttaccgggacaccaagaagtgcaccccgccatattaggagcccaccttgaagtgacaatattgaagtgccagtgtggctccttccacagatgtcagcaagggagcaggcagaggagccagcaggttacctgatctcagctcaaaaagttgaagaacaatgacttccctggaccagcaagatttttcagttgaaattataggatgtgcatacacacacgcccctcacctatgcccatgcgcacacctttgtctctgctggggaagacacagctggccttcggtgtctctaaccaaggccacaggaggtagggcctttggctcaggcgtcatcctggagcctattaaaggacatgaaggataccagcagctggtcccagccatcatggttgtgccctgacactcagggcaaagccgctgccccttgtattgtaagtcctgggctcaccaggattgacaaggggagaagcacactcacctctaacctgcctggatgttccccaccaagggctgagggacccagatgaaatgactgaagctgaagctccggccagtgagacaggaaccagccacctccttcctcagggcttcttctcctaggggcaggacagctgttaacaggaaaccttagccaccctctaaatttagcctctggccccataggctggcagatttctgggaggaaggaatgcaggctctggacccaggccccaaagcagtcctcacttaactctttccctcctggctgattctccagacgcttacatttagcagcagaattggaagacgtttgtgcttggtagatggagaatctaaagaacagcttttctctgggttctctcttcagaccctcttgcctgggacagcctattcaaagttcttccagaagagagtctaaatccaaagatatagaagaataaacaaacttaccacagccgcatgtcaactagagaggcctaaaaaaaggaccagatatatagaatggaaagggtactcaacagatagatattgggagagcactgtggtacaattaaagagtagtcattgcttgtgaccaggattacatttctttttctttttttttagacagggtctcgctctgttgccctggtgaaagtgcagtggtgccatcacagctcactgcggcctcaacctctcagggtcaggtgattctcccacctcagcctcctgagtagctgggagtacaggcacatgccaccacacccagataatttttaaattttttgtagagatggggtctcactgtgttgcccaggctggtctcgagctcctgggctgaagtgatccatccacctccgtccaccaaagtgctgggattacaggtgtgagccaccgtgccctgcctgcatttcttttaatagacatgtctcaggatggtcaactggacagttgtgctcaccctccacatttcctcccctctactcacaccccaaggtgataatggattggcaaccctgggtgacttaagaattccatgagcttcataaatgtcaaataagctgtcttaccctactaacccctctaccatcacaatgatcaaagcaaagccaaatagcccacacctctcatcccacacataccatagtcatcctttcatccatttatccatccatttaccaacttaaaatattcattgattacctactacatatgacactttacttgaccaaaattggcaaaacacatagcttaaagttgtctttcttcctagttaggtggaatgatgcctggtatatcgtatcattagaaatggctgaatgaatgagctcactgtttattaggaggaatgagacacagaccaa

SEQ ID NO: 589 - DNA, 4001 bp, Homo sapiens
acctgggaggctacagagcaaggccctcgtcttggacctccagcatcaccccagtccattctttccaacccccacagcccagcccagcccagccctgacctctgcagccccactgactcccagccccctgtaagtctgcagcctccaaagctgtacactgaagctcccctgtctctttcctggccgcatccccaagcctgcctcgacacccagacctgcccaccctgttcccaggcccgggcacccacgcgtcctccaaatgtgcccagcaggtgcagccactgctagaagtgcactagggcaacagtcaggctgtctctgccctgggcagcccccggtgggtgtcaggagcagaaggcggactcccccagggcttcatcccagagcatggtccaggagcagaacctgggggctgggcacctcctcactacgcatttcctggtggcacacatttgcaacaaacagcattagtaactttggtaactttcgttagaataataaactaagtcaaaaacaaaagtacctgacacatgccccatgctcaaggccaaagcagcccaggcccagagaagcagggactgcaaggtgccccagctggggaggagcccggaccagactcagaaaacaaaccgccccctcctgcccaacctgaccggagcgggcaggagggccgctgagccgagtggggagcgcccagccttcaaaggctgccaaggacgcaccctgccctctctgctttgcctggtcgtgggggtggggaaggaaagtacagctgtctagatgtcccttgggcccccctgagagctccagagcggacccagcctgactggacctggggctgcctgaggaccctgcaaccacagaatccaagaaacaaccttaatgtcacaatcccaagaagcggccacacacaaggacaccgcttgccggaggctcacctcctggggccacgaggcctgagcccgcccccagcactgttgagctgggactagggactcaggttactggtggctgggccgggccaggccaggcctcaagcagaccgccaggctcctgctccctgtcccagagggcccagctcagcacagcaggggtctcctcgcctgggacaccaccaccgaggcccagcagggagacgctgacccaggctgccccgaaacagcagatggtctgggctgctccgggaacgcaagtgctttgtggctcagtggggacggggcccacaggaagctcaggacacgggtaggcgaataaagtttcatggtcaccagtggcccttgacctccaccctgtcacaaggaccctgcagaagggggccaggagaacctgtcttgaccctcgggaagcttctgcaaaccctagcagacaggttggtgaacctgtacccccatgtctccccatcccagctagggaaccccaccctgcttccttcccactgacacgcccctgaccccagcccgcaccaacggcaggcgctcccggccagccccggtggaagcgatgcggccgaccgagtctgacacgggccaaggcaggactcggggccgggaagctggggccagggacgccgggaaccccgcctgccatcgccccgctccacggacaggtgggcgcgcgccgcacacgggccgaggccgccacccgcgccgcatctagcggaggcgcgtcgcggtcgcaggtccccgggggcgcgaacggctcaggacccccgccccgtccccgcgcgggcaggtgcgacccccgagcccgcgccaggctcgcgcaggcctcgcggccgactgacccgaagtcctggtccatggacttaaagaagaatttgtaggcgtgcacgggccggttgctgagcacgttcttgaagtcggccagcgtgacgcgctcgggggccacgggcagcttgaccaggtacggcgtctcctcctcgtccatgtggtagataatcttggtctccgccatggcgcggcggcggcgcggagcccgcgcgctcagggcccggcccggggctcggacgcggggcgctacccgcccgcccgcctgcgccccgcccggcccgcaccgctctcggccccgacgctccgaggcccccgggcgcccccgcccgaccgcccaggccccggccgccgcccccggctcccgcgcgcgtcccgactgctgccccgcggcccgcggccgcccatccgcccccggcccgggagcggcgcgagggacgcagcacggagggcgcgctcagccccgccgccctcccgcctgcgcccctcgggccgcgccgttaaagggaccgcccggcccggggtcctgagcgtggccgcgggggggcgcccgagcgcgcggcgttgacgtcacgggggcgcacggcgggggcggggcgaggatgcgcagacgcaggcgatcatcgctcgccccgccccgccccggccccgcccccgcgcgcgggcccgcgctccattatgatccggcgcatgcgacgcgcgccgctggctgtgggcccgtgggcgccggggcgctcgggtcgggcggagggaccccggggacgccgggtgcgcggcgctgaggtggcgcccggtcgctctgcgccaccgcgaaggctcccgactcgcgtgccctctgccgggtcccacggggtccaggcagcaggccgagcggatgcggggcgcgcgggggcgcgggcgtgcacggaggcgtcggagcgcccggcggcgggagggatttagtcctggggttctccgcagggcaggggagacttccgaggcgtcccttgaggccgcggggcgtccgcgcttactgttccggggctcgcggggctggaggccttcccgacccgaccccagcaggaagcgcggaggccactagagggcggcccaggatgggaggagtgaggagggggcctggacggggcaggagcgacggggggagtgaggagggggcctggacggggcaggagcgacggggggagtgaggagggggcctggacggggcaggagcgacggggggagtgaggagggggcctggacggggcaggagcgacggggggagtgaggagggggcctggacggggcaggagcgacggggggagtgaggagggggcctggacggggcaggagcgacggggggagtgaggagggggcctggacggggcaggagcgacggggggagtgaggagggggcctggacggggcaggagcgacggggggagtgaggagggggcctggacggggcaggagcgacggggggagtgaggagggggcctggacggggctggagcgacggggggagtgaggagggggcctggaccgggcaggagcgacggggggagtgaggagggggcctggaccgggcaggagcgacggggggagtgaggagggggcctggacggggcaggagcgacggggggagtgaggagggggcctggacggggcaggagcgacggggggagtgaggagggggcctggacggggcaggagcgacggggggagtgaggagggggcctggacggggcaggagcgacggggggagtgaggagggggcctggacggggcaggagcgacggggggagtgaggagggggcctggacggggcaggagcgacggggggagtgaggagggggcctggacggggcaggagcgacggggggagtgaggagggggcctggacggggcaggagcgacggggggagtgaggagggggcctggaccgggcaggagcgacggggggagtgaggagggggcctggacggggcaggagcgacggggggagtgaggagggggcctggacggggcaggagcgacggggggagtgaggagggggcctggacggggcaggagcgacggggggagtgaggagggggcctggacggggcaggagcgacggggggagtgaggagggggcctggaccgggcaggagcgacggggggagtgaggagggggcctggaccgggcaggagcgacggggggagtgaggagggggcctggacggggcaggagcgacggggggagtgaggaggggg

SEQ ID NO: 590 - DNA, 4001 bp, Homo sapiens
tacattttggcactgaatacaaacaactggggtatttggaagaggtacagaggaaatccaacttttgtttttcaaggacagcatttctaggtttgtattttaaaacagttgaaacaagtccttctgaatgttgttaaacacaataaggactatcagaaggatctcataataacttactacttgaaaataaaggctagtttgaaactgaagctcacagagaaaaaaacagaccagaaaaaactaacagaggtaatagtttctcaagtcagagacttggattctaatctcagctctaacactggctgtgctaccttctcctctgagcctgtcttccccagtgctaccttctcctctgagcctgtcttccccatgttaatgggaagactagctccagtcttcacacttctgggtcttacaggcaagaaataaaaggcctttttaaggctgtcttctctttattcatttacttacttacctacttacatctacctaacctgcagaaaaatacagtaagtactacagcaaacgctaaaaggatgctctaaattataaaatgtattgaatttacttctctttccacttcattttctggtggatggtggaggcaaaattctaaatgattaaggatcacttctctgttctttaacactgtggctccaccactgtaagggaacacaaaagacggagaggatttatttaatccacaagatggccctgaataatgtatttcatctgctaccaagaacacggatttcccagttacacacatcagcatttcattgtatcattttacatgatacactatgaatataacaatgatgatgttgcagaggaataattttttaacgtcttttaaaatatcctggaatattctggtcaccttaaaaactgttttgtgaaattcattctagagttttctttatagatgtgttataaaaatataaagggaaaaaaaccgctacaaatatttttggaatgctctttttaaaaacatgctcacattctgatagaattatttatatttttaacagggaatggcttcaccaacagaaaccaaatattctggatgtgactgaccctttgccataagcctgataaaacaaaccaggataggcgtccacatatataaagaaaaagaaaacgtgcaaaattgcctagtgactaacagccagaggaaattaacaagagtctgcatgcaaataaagcggggagcaagggtctcttctctccatttaggtgtaaaatacaacgcaaggtggggaatctctcaaaataggatccggagaaagccgtacccagcatagcccataacctgtacattcgaagctagaccgcacccctcacagcaaaccccaagagttcagccgttggttatccgctctaagcaacagggcttctttccaaggtattgctcccgggctccccccctttaataaaaagccccacaaaaagtcctagattttcgtaatcccttaacatataccccgatctagggtttcagagggaatccaggggtggaaattcttcttgctctaactccgctctagccccgtcccccgcgcccggtgagacagggatggggggagggggccctgatagagaggaggtgggggcggtcccggggaggcagtcagacccctgccctcgtccctcctactgagggctcactctacctcctccccacccccaagcttcgcttgccagcgccagccgctccctgtggcgcctccagcccgttaccccgtggcgccgttacctccgctgctggggcgggagcccggccccaggcggccccgcatccttccgcccaggcccacgagctgtgcctcccatctcctagctcgggaccccgcgcggggagaggcgccagttgggggtccggtcggccacgccacctacgccgggacggctgcctccgcggcgcgacgctcccacgggtactctcgaccagacactgcagctcagcgcactttcgctcccgactggccccggctgggaagtggggagacgcagctccaggggcgggagggggagcggtctggtcgcctagcaaccgcggcacgcccccgggaaacgcctcggcgcagctacgggctgacgcacaggggcggggcccgtggccggtaaaggccacgcggcgctcctagcgggtgctagtactggcgcgggaggcgggaggttggaggcgaggagctcgcggcctaggctgtttgggtccctggcgcgagctgtagacggagagaggggtccggagaaggaggggtgaaagtagcagttagcccgcgatctcagaagggctgcccgcccctcacggtcccttaatagcacgttgcgtcctggaagttctaaaacgtcccgcttcaatatgaattttaaattagtgaaaacatatgtgtattgttttaggctttcccaccgcggggacggccctccgggggttggtgagttacataagaaagcaataataataaacccatttattgacacgatgcttccatttatgaacatttgatctcagtaacggaggtacccgacgactttcgtcttttacagacttagctgggatgcagaatagaagctgggcctttgtctgactaccctgcaacagtcagccacagacgggaaggcagcgcaggaaactgaggccaaaggagccgcgcttcctcatgagcatgaagcggcaaagcctgaactagaagcttctaacgcctaaccgtcctcttgccgcaccaggacctacctctgcaaggcccttcctgactttttccttagaatgtgtgtatatgtgtctttttccttttctgatgctaagacacctcagaaacaccaatgttaagcagatttccatcgttggaggttaaaacacccgaatacaagtgttttcttgagtgtggcatctggtcagatgttttatgggttggtttgtttttaaaaaaaaaaaatttcctgttagatgggtggtaagaaccagtcagagtttgtaaacccaccaagcacgaggcggtcggaccgtccagattctggagtccagaagacaccaaacgttctcagaatgccgaacgcgggcgccacctggtgggactagaacgcttattgtcccaaatcagcatagcacacagttcccataaatcttaaaaattcccatccaaggctcatttccgtgtgactaaaagtcatattctctgttctcgtgactccaagtaaaaatgtccctaaagagccaaagtatcttcactgtataaactaataatctattggtttggggaattttattttttgtgatcaatgttactttagcctttctatgatatacatataaataaaaaagttttcttccatgatgattttttaaagtttattttataaataaactttttctttttgtctctcccttcccccactttgcaaccagagcaattctgctttcacaggggtttgtatttgggctcttacgaagcttttgtttgaagaaagagttccatggcaacgcaaagattggacgaggttactgttgaagtcccttccagctctaagattgcaaaattctattaaataatccccgttctcagtacttatgtagacacctcagaccactttactgccctccctaaacagttgaatgagacttgcccccacatgatttcttacctcattctgaatcactgctcgtgagaggattgcatccgcagtctgtgcttaagacacatcttccagagccaagtggaagggttcctgctccctttcttgctcctaaggtgggaaatacagaggccgcctttgtctttcgcctattgttcccatggtcaagggaaagaggactcctcgagggtgctggagcttcataaatctctgaccttagtgacccaatgtttcttcaaagatcccctgtatgatggggttaacgtcccataagggatctggcaggagcctccacacccctgctgagcgctgccctgtcccctccagctcccaagcagcttccacatcattcatgccctttc

SEQ ID NO: 591 - DNA, 4001 bp, Homo sapiens
tataaaacactgaacacaagatacccaatcccagttatcctcggttgcttaacctgtaaaatggggataataccattcctgcccactgccctcctagttagaaatcatgtgcaggaagggtctccaggaaggttaacgttttgaacatgggcaaagcctgagtccactggcagggagtggtggctctgcctgcatccagagctggctgggcatccgtgcttgctgactagcacaggtctgaccagatgcctctggggcagtggggggtggtcttatccctgtacccgaacttattcaccaaactcacaactaagcaaacctacaacacccccttcctctccctggagcctgcttccaaaacccaggacctggagctgaatgtggctgagaagagctagccccacagccaccctgtgcacacacgcattgtgaaggagagaacactgaagcccagactgggtccaagacttgtccaaggacacacagagaattagtggcagagtcacaccagaaaccaggctcctcaaccaccaccacctccactcccccaggcttttcccactccaccccccaccctaaagttgttttgattcacacgggctccaggaattccactcccacaaaacacaccctgagcccaggtcagcaggcagcctggtgccactacactttgggccctctctggcaacgagcctgggagcttgaggagagagcagccaatctgaacagaacccaagggggctgcccacatttgtatctgctacatggctgtctgggagggaagactgggcctgggggaggacctagggcagatacttggggctatctcaggagctggctggacaatttggagtctgtccatggcagattggatgtgagagacccactagacctatccctctgtcttaccaaagtcccacagtgtccccaggccatactctttgcctggacaatagcaggcacccagtactggtttctggccaaacaatgaagtaatgaatgaatggcggcaacgctggctgcatggacttccccaaggtcacacagtgcactgggagtagtgagttgggtctccctccagactcgcaatccagtgctcattccactccactagaatggatgagattatttcatccaaagtctgaaaatgaaggggtcttctactcagatattgggggcactgggtcctggaaactgaaagctcatcttccctcttcccaaaactctacctgctccactcaaactggatctcaggcacccctccctcctttcccacacctggaaaagcatagggggaagcggtgggggcccccagcattaccggcagccggcctgccggcaggcatcgcacaacttggccctcgggtccgtggggagtggcgtcgaggcaggtgcctggcgccgctgcgggaggcgccgtctgcgggtacagcggtgtgtagtaggtagcagtagctgggcagagctgggggctgctgaggccggatggccacagctctgtggggctcatcgcgggcaccaccttcggggtctgcccagcggccgaagccaaggcccggggcccttgcagcatagcgagtaaggcgccccctacccaaaagggcttggcgcgcccgcggacacctgcgggttccggtgctgccgcctttcacacggcccgcggcatggcgcggaggccgggggaagccgccaatggacgcctgcggggcaaggccggaccctcccctcctggcccgcggccgagcagagagcagcgcttagagatcgccgcttggagatcgcccggcggctgcggtggtggcactgccaggggctgtctcgtcccgagggcaccgcgacccgggacgccccgcgctccccaaggcctcggcacctggggtccggccggctctggggaggggtccccggcgtgccctcaagctcggcggagacgcgatgcgctgggatggggaggggggtctcgactgcaccgacttccttgcggctcgctctctagtccttgagtctttctctgcctcttttttttcttcttttttttttttttttagcgccaaacgtcgtgccgcgaaattcggatctcccgcggaaaatgccgcgctccggttggctgctgcgacagtacaggctccacccccccccccccccccggaaagaacgcgtcctcgaggcggcgattgcaacactagcttcgctgcttaaaggggcagccacacctgctgttggtgccgccagccgccggccgcgctagttagcagccggcgagacggagacagagggtggttccgggattcacagtgcagaggcggccagagcagtgcacagcgccccgagaaatgggcccggattccctgggattgaagggaaacattttggcgcggggtcccagcctgagcccagacccagcagtgtattccccaggccacaggcccttttgttagtttgcattgttgcttagctagcacatgtgcattcatatcccctttcctgctaaaatgaaggccaggaacctgttccctttaatggcagaggggtgagggacggaggcaaactagtctacttctttgtagggaaaactaacatctattcagcgcctacaggatgccaggcaccatgctagatccttacaagcgttgttttagttaatttattccaacaatcctgggaagaggaatgatgatccccatgataaagactgacagtctgaaaggctgggtaacttgcccaaggtcatacagagagattccctgatttgagagctggcaacagaatctgggacaggtcccagctctggagcccttgtttttccagttaaggggttcttctactctcccaagctgcctgggggcacagcagggtcagagtcccactgcagagctttgtcttgttcacagttgtattattaggacccaatactcagtaaatgtttgaacatctctaggtttcttttaaacaatccttttgtcacaagagcctctctgcctcattcaaaaaccttcattgctgataatacattcctcatcactccggtttagagaggctcagagaagcaaacttgggtagtgagtggtaaaaagttgctagaagctgctgctagatttcaggtctgatttcttgcctggtgctgtgtgatttttatgcaagtctgagccttggcattcaaagccctccagagacagtccacagcttaattcctcattagatggttgaggccaaggtggcaataacccatgatgattaagagcccaggctttgtagccaacagccccgaattcaaacccaggcccagacactttattattcattgtgtgaccaaggcaaattttgtaaattctctgatccttgatccttgattttctcctcctaatagcacttacctcatatgatcatgaggaaatctcatgagataatgcatataaagctttcatcacagaacctggatcataaggagcctcaagaattggcagctgttgttatatctctgactttttttttttagacagagtctcactctgtcaccaggttggagtgcagcggtgcaattctcctgcctcaggttcaagtgagtctcctgcctcagcctcccgagtagctgggattacaggcgccagccaccatgcctggctaatttttgtattttcagtagaggcagggtttcaccatgttggccacgctggtctcggactcctgacctcaggcaatccgccctacttggcctcccaaagtgctgggattacaggtgtgagtcaccgctcccggtcacatctctgaccttatctccagtgcataagacccttttactctagtctacgtatctcattggtcctttttggtcctttgagggccagcttaaatctcacctcctccaagaagcctcccctgcctgcttcctctcagccagaatggctcttaccctcttgggacccttagtgtgttctacctcaacaaaacaaggcttcgttttcataccttgtttatcagttaggttctatgctccttcaaga

SEQ ID NO: 592 - DNA, 4001 bp, Homo sapiens
atttttatatgcatctaattggtggtaactggcatgactctgaagtagccaatctatggaagaggtaataattgtcctctgacaactggctccccgttattgggctcatagctatctttctaagccagctgaatatgcttaagtacaaagttttgactttccagaggaaaacttctatttcttaccttctgcatctgcagatcagatttggccatttccgcaaaataatcagtgggtcgcttcgtagggactttgagctgatggaggcggggtaagactgcaagcactgcggcctgggcttggcgatagctgagaatcgtaggacaaaatgtgtaatgaggtgaaggaggaggccttacgttccttttcaccgccaatcatgagttatccaagctcagaaggactctcaaaatctgacctccattagcaagaacaaacaaacaaaaactgtctcactgatttagtatctaaaagaaatgtagccgtatactagtttttaaaaaggggaggggtgttgctaaaaatagtttaagagaatgactactctaaaggtacccattaacacaaacgaatgtcgattatggattcttatgtaattactaaagcaattccacacaagaacatcccataagcaatgtttgtttgtttgttttcctaataactgaagcatgcacaaaaagttttaacatgaatatttcaaattagcccataaagtggattttggatcgtgaccgtggaccaaagagctcttctctcaaacaggaagaatctcctagctattcttagtcaaaagaagccgctctctctactcctaggcttattctgagtgcagacttactaatttcccctctttcccactctcctgcacaaggatcctcaacttctccaacatttgaaaacaaacatacaaactcatctctcgctggaagtcgtcttctggatcaacagctttctggtccttgttctgaggtgctggcgcctcagatccaccgatctccggtaccggacccagtgtcacatcgagcctttcaacccattccagatcccgcttgaattctgccaaacattgcttcaggccattctaggaaatccagacactgagctcacaagaagggaactctgagtttgtctttcccaagcacaggctgttaggcgaagggacaaagtgctaatccccaatacccagacaggtaattgaccctcttggcgaggcgcagggtgcatctttcctgggacaagaatcggtctcccaagcccaacagcgcctgaagcgcatcccatgtccgagtacccccgaccctgtgcccacgctcaccacgtcgttcacggccttcttcggcccctctagcacgacattgaggcctggcttcagaagccctcgggaaaacgcatcctgcaactgcaggacacaatcacggtcactcccaggggtgtaaggccccctctcccacgcccagccccacgagctcggctgacacctacctctctgtctgtgacaagggattcatcggattccgactccgaatccgagagcgggggagtgtccatctcgccgcacgcacgtcccacacctacaggaagaaacggggtatcccgagacccaagcggctagcagagggcggccctggccgctgctgcctgccttcagccccctactcccacgccgtggctccacgtgccaccgaatcgctccagcgccagcaactcacagctactgctcaacttttgattgggacttccgcttccggcggcaaaccatacttccggtttgtcgttgctataggaaccgctacggcgtttgaaagtgtccgggttgcttaggatccctacaggtagcgcctctggatacatgcgtggtctgctgacccagagagaaacgaaaggtgggagggggtacctgggggtcgccagaaggagctggtagcagtgagggtacaaaggaaaaggcagaaaaaggagccgcgggggtggggtggcgcggaggaggaccccgggggaggggaaaggggagggacaaggggaggggaaaggggagggacaaggggaggagaaaggggagagacaaggggaggagcaaagggcggggagggcgagtccgggccgggggcggggtcggagcggggcggtgctctccactctgaagcgctgccttggtcttcagcagaactgtttggcgggagatcatgtcagccgtggtagctcagacgctgcatgtttttggtcttcgatcccacgtggccaacaatatcttctacttcgatgaacagatcattatatttccttcaggaaatcactgtgtgaagtacaatgtggatcagaaatggcaaaaattcattccaggtaaaactttttccatcctgacatatacaggaatggtatgtgccacatataaccccataatcccagcatgatgattggaaagaaagattttggccaatttgaatatatatgcagtattataaatgtagaggaaataaatggcgacttgtattatgaaactagattaatcagtcacgcatatgtagttaaaatcacatataaaatgttaatttaaaagtacttttttcactgtaatttcatgaaaatatgttaagaacccctcttttggtgtcttcaatatcactgcctttgtcatcaccagagccactttttgagttgtctaacagttttcctgagcacaccaccttcattatatcaccgtttgaatccaagtatgatgaagacactgtaaactttatcccaagtcgcaaataaccatttgtatagcattacagcccttatttttgttcacagtggtcctgttaatgatattcattatttcaacaaccgaatccattttcccattctttgttgcattgacaccttttattgtgacatatacatacaaaagaatgtaccctacatatatgtcatatttaaagaattacaatagaatgtagatctgtgaacccagccacccagcataggaaacagaatattaccagttctagtgcttctccctgtattctgtgtcttgctgcatcagttcaatgtcatgcttttgagattcacacatctcgatacatatagccaagttcattttattgctatgtagtgttccatcatatgaatataatgtctcaaatatatgtattcactctaatattgagggacatttgggaaataacaatcatttgctattacaaactatactactataaacattcttgcatgcatatacattcatctatttgtgcagattctctagggcacacagccaggactaaaattactgagcaatatgatagtaccaatttacactcccactagaagtgcataagagttcttattcctcagcaaccctgccaacccttggtattgtccaacttcgtaattttttgctaacccaatggttgagaaaaggaattgtggttttcgtttgcattttgctatcattaatgatgatgagtatctgtttatgggctattcctatttagtcgtatgttaaatgccttgttcaagtcttttacttgttttttacagtttgttgtgcaggatatttttgggcaattttattgatttacatgcacaatttatatattctgtatatcaataatttgtcagatatatatatatgtcttgcaaataatttctttcagtttggggcatttttctcccatcttacaagtatcttttgatggacaaaaattattagttttaataaagtcaaatttatcaaccacataatattctgttggaataagctgtattaaatacagttgactttaatttattgatgtttatttccagcatatttgctaaattattattaattctaatgatttgtctatagattatgcagagacttctacatagactatcatgttatctacaaataacgatgactttcttcctttttcttgtgttacctgtgctggtaagcacctccagacagtgttgattaggggcaataaaaatggacatctggccaggtgtggtggctcatgcctgtaattccagca

SEQ ID NO: 593 - DNA, 4001 bp, Homo sapiens
ccaactctaaattgtactatatctgaaccatctaagaatccctcattttacagaggagaaaactgaggcccagagaaaagtaattgtctacaagttctagcactgacagtggcaagggcacaagaatgctgtcctctctgcacaccatgtcatgaccatgccagctaggaaatgcactgggccatcttcacctcggggaccacacttcacacagcactgttcctctccttaattgctgattttagaaaaaatgtcatttttatatgcatctaattggtggtaactggcatgactctgaagtagccaatctatggaagaggtaataattgtcctctgacaactggctccccgttattgggctcatagctatctttctaagccagctgaatatgcttaagtacaaagttttgactttccagaggaaaacttctatttcttaccttctgcatctgcagatcagatttggccatttccgcaaaataatcagtgggtcgcttcgtagggactttgagctgatggaggcggggtaagactgcaagcactgcggcctgggcttggcgatagctgagaatcgtaggacaaaatgtgtaatgaggtgaaggaggaggccttacgttccttttcaccgccaatcatgagttatccaagctcagaaggactctcaaaatctgacctccattagcaagaacaaacaaacaaaaactgtctcactgatttagtatctaaaagaaatgtagccgtatactagtttttaaaaaggggaggggtgttgctaaaaatagtttaagagaatgactactctaaaggtacccattaacacaaacgaatgtcgattatggattcttatgtaattactaaagcaattccacacaagaacatcccataagcaatgtttgtttgtttgttttcctaataactgaagcatgcacaaaaagttttaacatgaatatttcaaattagcccataaagtggattttggatcgtgaccgtggaccaaagagctcttctctcaaacaggaagaatctcctagctattcttagtcaaaagaagccgctctctctactcctaggcttattctgagtgcagacttactaatttcccctctttcccactctcctgcacaaggatcctcaacttctccaacatttgaaaacaaacatacaaactcatctctcgctggaagtcgtcttctggatcaacagctttctggtccttgttctgaggtgctggcgcctcagatccaccgatctccggtaccggacccagtgtcacatcgagcctttcaacccattccagatcccgcttgaattctgccaaacattgcttcaggccattctaggaaatccagacactgagctcacaagaagggaactctgagtttgtctttcccaagcacaggctgttaggcgaagggacaaagtgctaatccccaatacccagacaggtaattgaccctcttggcgaggcgcagggtgcatctttcctgggacaagaatcggtctcccaagcccaacagcgcctgaagcgcatcccatgtccgagtacccccgaccctgtgcccacgctcaccacgtcgttcacggccttcttcggcccctctagcacgacattgaggcctggcttcagaagccctcgggaaaacgcatcctgcaactgcaggacacaatcacggtcactcccaggggtgtaaggccccctctcccacgcccagccccacgagctcggctgacacctacctctctgtctgtgacaagggattcatcggattccgactccgaatccgagagcgggggagtgtccatctcgccgcacgcacgtcccacacctacaggaagaaacggggtatcccgagacccaagcggctagcagagggcggccctggccgctgctgcctgccttcagccccctactcccacgccgtggctccacgtgccaccgaatcgctccagcgccagcaactcacagctactgctcaacttttgattgggacttccgcttccggcggcaaaccatacttccggtttgtcgttgctataggaaccgctacggcgtttgaaagtgtccgggttgcttaggatccctacaggtagcgcctctggatacatgcgtggtctgctgacccagagagaaacgaaaggtgggagggggtacctgggggtcgccagaaggagctggtagcagtgagggtacaaaggaaaaggcagaaaaaggagccgcgggggtggggtggcgcggaggaggaccccgggggaggggaaaggggagggacaaggggaggggaaaggggagggacaaggggaggagaaaggggagagacaaggggaggagcaaagggcggggagggcgagtccgggccgggggcggggtcggagcggggcggtgctctccactctgaagcgctgccttggtcttcagcagaactgtttggcgggagatcatgtcagccgtggtagctcagacgctgcatgtttttggtcttcgatcccacgtggccaacaatatcttctacttcgatgaacagatcattatatttccttcaggaaatcactgtgtgaagtacaatgtggatcagaaatggcaaaaattcattccaggtaaaactttttccatcctgacatatacaggaatggtatgtgccacatataaccccataatcccagcatgatgattggaaagaaagattttggccaatttgaatatatatgcagtattataaatgtagaggaaataaatggcgacttgtattatgaaactagattaatcagtcacgcatatgtagttaaaatcacatataaaatgttaatttaaaagtacttttttcactgtaatttcatgaaaatatgttaagaacccctcttttggtgtcttcaatatcactgcctttgtcatcaccagagccactttttgagttgtctaacagttttcctgagcacaccaccttcattatatcaccgtttgaatccaagtatgatgaagacactgtaaactttatcccaagtcgcaaataaccatttgtatagcattacagcccttatttttgttcacagtggtcctgttaatgatattcattatttcaacaaccgaatccattttcccattctttgttgcattgacaccttttattgtgacatatacatacaaaagaatgtaccctacatatatgtcatatttaaagaattacaatagaatgtagatctgtgaacccagccacccagcataggaaacagaatattaccagttctagtgcttctccctgtattctgtgtcttgctgcatcagttcaatgtcatgcttttgagattcacacatctcgatacatatagccaagttcattttattgctatgtagtgttccatcatatgaatataatgtctcaaatatatgtattcactctaatattgagggacatttgggaaataacaatcatttgctattacaaactatactactataaacattcttgcatgcatatacattcatctatttgtgcagattctctagggcacacagccaggactaaaattactgagcaatatgatagtaccaatttacactcccactagaagtgcataagagttcttattcctcagcaaccctgccaacccttggtattgtccaacttcgtaattttttgctaacccaatggttgagaaaaggaattgtggttttcgtttgcattttgctatcattaatgatgatgagtatctgtttatgggctattcctatttagtcgtatgttaaatgccttgttcaagtcttttacttgttttttacagtttgttgtgcaggatatttttgggcaattttattgatttacatgcacaatttatatattctgtatatcaataatttgtcagatatatatatatgtcttgcaaataatttctttcagtttggggcatttttctcccatcttacaagtatcttttgatggacaaaaattattagttttaataaagtcaaatttatcaaccacataatattctgttggaataagctg

SEQ ID NO: 594 - DNA, 4001 bp, Homo sapiens
aaactaagcagtactgaagcaaagcactctcacttgggttatctcaccctttggaggtaagtgttatcatctcatcttgcagatgaggaaactgaaactcaagggtgatgcttcacctagaccaaagtccctgtggggaagtggaggggatggggttcaaacacaaattggtgtgacgtcaaagcctggactcttcacaataggctggtgggcttcttcagttgtaaggatctataaagtgtcaccaaggcaaagtgaggggacctctttctttttttggtggtttttaaggaagaaaaaattttctttatgagtaactcagggtgggcttagaggcagaggggatcatacaacctcaaagtctcacggccttttggtgcccatacactgagactttaaatccagtgctggtccacagatagtgcactccctgtgtcggaaacggtctgggtggggcattacaggggagattcctaatggaggaggtaggttgagtctcacgtggtctctaagcaccttcaggtatagaactaagccataattccaccacttctgactctagtgaggcaactggcggtgcctaagcaaagaagaccctagctgggtgagaagaggccttggaagggagagatgggggggcgggttgtaaggggactccagctctgggcacagcaggggctgggaaccactgtgggactcttcggctttacagggggtcccatcctgctcccatccaggcgccctcgggcttggcagcatcatcacagagaagtggaggggctggatcacaggtactggcagccaccatcccaggcacatgccctcctcagccctacatggtgactttgacccacttcacagggcacagaacagaactaggagagggaatccgagtggctcgtctatagggaaagaaaccaaagagaagtagatggctcccttcccgtgatggagaggccggcacccggccctggacaagtggacaaagggcctttgctcttggggtccagggacaatgcccctcccaacagcccccccccaggaagcccagcctggatcaaatggatttctcttctggggctttagagagccccatgaaacgcccctccccagttccctttctccctggtactcctgcctatcgcagtcagcactcggcctcagcaagcccctcctctgaggacccatcaccgggagatgctggggagaccggatcgctgggtgcagggcccctgagtgtcccctggtctctgacagcaccgacctagctgcgtcgccaccacatacaccccttaggccacagctggatcagcagtcccagagggccgcaacctagccctccgaatgcgccgggcgtggccacccacagtgccccaaggcgagccccagaccgacctcagtgtcccgggacgctcaggtccagctgcatccaggcacctcgaaatcgccgccacccgcgagcccgacccagcccggctgccctgggtctccaagccaagctgagtccagggacttcagaacaacccaaaacagaccgcagcaaccgtccccaaagcgaaccggggaccccgagccccccacatccggctgggaccagaaccaagctcggcgcggccgcccccgacgggaccaagcgcagcgccgccgggagagccgcgctctgcccgggcgctccccgactccacgccttccgagagccgggcgggggctgctgctgcagccggcgcccagccccccgcgagccagggcggccccgggtgccacccgcggcaccgctgcccgcgaccgtcgaggctgggctggaccggaccagacctccgcgcgcagcactcaccatagctcgcgtgctccgccccggcttcgcgcagctccccgcgcccggctcccgattcccagctccgggttccctgctcccagcccagctgctcggacggctcggctgcctggcccaggcggcgcgctcagctccagcgggcgagctcgcggcttcggcgccgagtgccggaggggcggggccgccgcggggccaatggcagggcgcgggggcctgggtggcgcagccaatcacggcctgaggctgcactccccgcgcccgcgcgggcccttaacccttggcgcgctgggagtcggctgcccgggctgcgcggggaacctggagggcaggagcaggcgggagttgttgcttcggggcgcagggtccagaccttgccgagaccggcgttgggagctagcagaaccgggaagaggctcgattgtgtccggtggggccgccgggagcctcggcgacctttgtctcctgcctggctcctgcactggagtgtgacccggggcgctgcagctgcttgtgtgtgtgtgtgtgtgtgtgtgtgtgtgtgtgtgcgcgcgcgcgcgcgcgcgcgcgtgtgtgtaagagggaggagaagaggagacagaaacggtgggaggggtggattccgcgtgcccgtgtgcttatgtgtgaaggaaagtcctgactatatttgggatttgttgctctgtgtgtatatgtgcgtgtgtgtgtttgctatatttggggttcgttgctgtgtgtgtgtccgctgtatttgaggtttgttgctgtgtgtgtgtgtccggtatatttggggtttgttgccgtgtgtgtgtgtgtgtgtgtgtgtgtgtgtgtgtgtgtgtaagagaggaagagagatgaggagacagaaagtgggggaggggtggattccgcgtgcccgtgtgtttatatgtgaaggaaagccctgactgatttatttgggattcgttgccgtccagggacttcaggacaacctgtgtccgctatatttgaggtttgttgccgtgtgtctgtgtgtcgctatatttggggttcgttgctgtgagtgtctactatatttggggtttgttctgtgtgtgtccactatatttggggttcattgctgtgtgtgtgtgtctgctatatttgaggtttgttgctgtgtgtgtgtctccgctatatttagggttcattgctgtgtgtttgtgtgtctgctatatttggggttcgttgctgtgtgtgtgtgtccgctgtatttggggtttgttgctgtgtgtgtgtgtgtccccgtgatagaggggtgagggagggaatggtagcaaagcagagagaaggagccgtggctctctaggcgtgtgaatttgcaggtccaggagagacactgtctccacgtgtaggttttgtgaggtcaagggaaggaggaaggaacagaagacagcctgcctgtgtgtgtgtgtgatgtgtgatctccacttttgggtcctgttgtacatgcatgttaatgtggtagaaagaaatgtggtgtccctgttgtaaacaagttgtgaaaaaatcctgggtttttgtggtgtagtttgcgtgtgttgtacgtgcccacacaaaagagggacatggctgtgatttggtacaactttgtgtgtaacccagtttgcaagagacatcgagataaaaacattgtgtgtgtggtgacactgtggtctttgtgtgtgactgttgtgtgacttttgtgatcatctatatttgggttgggctgagaaagagaaactactgtgtagggggcataatgagtgtatgttcaggagaaagacatcctggcggcattgggatttgggctttgaaggatgtctaagagttcattaggccagacagaatgctcgtgaggccagagggaaagatccggggaatcctgcctatcagccaacgggggtgaggaggctgtagtggtgggtgaccagggtgaatttggaaacagaacctactgccagcaaggaagaggaggagcaactgactgcaacccttgcccaggtgctgacccagagtggccctggatgcgtctgggcacacagagtcattctaaagcggaccatctgttcctgggcagtttgtttgggaacctggagggcggggaggggctctgtggaaataactctatgttgctccttccttccagcagcattccaaattcttcagt

SEQ ID NO: 595 - DNA, 4001 bp, Homo sapiens
gcttggccgggggccctccccagagaaatgtgctatttcatctgaaaaaggttataccccaaacaggctgctgtgaggataacagcaacatggcattattactttgctgtgaattctgaaatgcttttgtgttgatatatttagacccttctgtggaagatgagactgaaaaacattgctgattagattctgttttgatttgagaagggaaaagcacctgccccagaaatctaatttcctgctggcttcagcctcttaagaagagtccactgggaagaggtttgagacagacagggtttgacgtgtcgctctcggatttttagctcggtgaccgaaggccagtggttgcccctctcagagcctcagtttccacatctgtaagtggggacagtaatccctacaggtctcaggggtgttcctgaaggttaagcaggggtaccacacatcccagtgggtagagcccttgggactgtgagtttgggtcccctgggcctatgtgaccctggaggaggaactccatcaatggtgtctccctgcgctgggaggattattcccgcttctaagaggcgtatctgagtggagtgggcctggcaactaagcgtccattcatcctaagctcgcctttgggaagagttgtgtgccagttcaccaagtggccccaagattctcccaaatacttcccttggtctacctggcagaagtcctccgagaattggggtgccccagctcctctttctacactggcttctcaagagccagatcactgggtctcctagggtgtccgcagcgtttccagcaccttcccacgcacctggctggctccaaacccctccagcactgaggtcttggccacaactgtcccagtgcagccccccagggacgggagggcagaaagcagccttgctcaatgtcctgttacaaggcagggacgggggtggggccctccccaggagtgggcagatgggatgcccacgggcggagaccctggggaggggaggaattggacttccttagtaggctggaaaaggggcagggagagggggcagagaacaggtttctggccccaggaaactcaggtattgggagggcaagaggaagagggtggtactgcctcccggataaggtgaccaactttcccagtttgccccggactgggggagtgggttccagggatgcagggctttccacgctaaaacagaaacagccgtagactctgccggtaaagggcctgggcaagtcccgggacatgcacaaactgtgccttctgtggaaagggaactggaccagttcgggtctcgggggtgctttcaactctgccacctgggctgtggccccagaagcaggtggccgggaggctctagggatggcgggggcaggtgaggggagactggtgggctccggaaggcttctcagcgcggagctccagctgcggggaggcgcggcccctcccggatgccgggacgagggaggggaagggaggggaagaggcggggtaggtaggggcggggggcgcggcagcggcagcgcgcatgcccgggcccggggcgcctggacctcgggagggagcggagggcgcctacctgcaggccgttggggtatgcgtcgccctcggagagcgagtccaccaggtcctcctcgtccagcgtggcccgcttgtacgtcgacatctgcaaggccaaatgcagcacggactccctcagcgcctccatggctctcgcgcccgaatggggaagcggccccgaccctggcgccgccgccgccgcgccccgccccggcctggacacccgagaccgagaccggcccacggagcggcccgcgcggggaggggtcccgcccgcctcccgcccccgccctccaggccgcgcccgcctcacccccagcgccgacagcagggcggacaccgggggcggccacacgccccgcatgctgtgccccagacgcctggtcccgctgcccgggtggccgggatgggatgggccgggccaggcgttgcaccaccttcgcgggcggggcctgatcggttcgccggcgcccggttcccaacctccggcctcccggggagaccccaagacccgagaggcccgggggagatggggacccctcccttccccggaggtcgggagtgggggcccccaaactgaagcccctagcaggcaggaaaggccctcacagtgacccctccttcgagaaaatcttaagtcccccttcaacaaccgggtccccagtggcagataacaaaagtatcaggaaggtgccctcgatgtggcccagagcaatcaagacaggttccccccggcatcagcccttaggtgtgtctagggggttaatgctagaaagaccagacaaaaaaggtggggtaaaaaggtaggtgtcccctttcagttcccctttctagctcagaggcctttaagccagagttcgtgaatgagtttcagaaaatttcagagaactccctgacacgggatgaaaggagctgtgtgtgtgcatttggatggctgcagggtggtccggtggtcacccccgtgctcaaaggtgtcgccctccctgcaacacaagagaaccattgctccagggggagtcagaagccaggaaggggacccttctttcccatcttccccctcaagactcggagcctcagccaggtgcccccctccccagcccctgagccctctcctataaccctaggcagggaaagggggctctctcggatatgaggtgttcagttagggactcaggcccagcactgtcccaaccaagaaccccagagaggtctaacccagcagatttccaaaggactctccgcttctagcaaggcgggaatccctgcatttatgcgtacttttcagctttgcaaagtgcatttctgctcattccaaatttgattctcacagtcacacatatgtgtgaataaacaggtttagaggggtgaggggcctgacgtcacagggacagtgagggcaatggctccagatggtctcctggcttccactcctgccctctgacagccccctcagcagccaggatgagcctttaaaatgaaatctggctgaggccaggcaccatggctcgctcgcgcctgtaatcccaacactttgggaggccaagttgggtagatcacttgaggtcaggagttcaagaccagcctggccaacatgatgaaaccccatctctactaaaaatacaaaaaatcagctgggcctggtggcatgcatctgtaatcctagctactcaggaggctgaggcagaagaatcgcttgaacccaggaggtcgaggttgcagtgagctgagattgtgccactgtactctagcctgggtgacagagtgagactccatctcaaacaaacaaaccacagaaatctggctgggttcagtggttcacacctgtaatcccagcactttgggaggctgaggcaggagatcacttgagtctaattctaggccagcctgggcaacacggaccccatctctacaaaaagaaaatatatatatatatatttatatattatatatttttaattagcaggacgtggtggtatgcgcctgtagtcccagctacttgggaggcttaggtgggagaatcgcttgaagccaggaggtggcggctacagtgagctgtgattgcaccactgcactccagcgtggacgacacaacaagatcttgtctgagtaaataaataaaataaaaaaaaattctgatattaccactcccttgcttaaaaaccctccactgtcctggaatgaaatccaaacccttcaccaggccccatggcccctgcccactctgggccctcatcttgtgctgccagcgccccctcccccaccaacctcctcacacaactcctcagtttctacaagtttcttcttcccccaagacctttgtagctgctgttgtctctatctggaacattttttcctcctctctactcttcccatggtcagctccaacttcagatctcagcctaccagctcctcaaatgtcccaggaaccctaagcagtccc

SEQ ID NO: 596 - DNA, 4001 bp, Homo sapiens
tatcatcaataatgtggccacgccagcccttacttcatgggtcataaaacaataatcctagcaggctgcatataatatgtatgacatccactttctctaacatccatttcacagtgaggccatcaccactgaaagagattaagccactagcccaaggtcgtgagtggagtaagaactcaaacccgggtcgctggcttcagagacggggctcctcctgcttggccgggggccctccccagagaaatgtgctatttcatctgaaaaaggttataccccaaacaggctgctgtgaggataacagcaacatggcattattactttgctgtgaattctgaaatgcttttgtgttgatatatttagacccttctgtggaagatgagactgaaaaacattgctgattagattctgttttgatttgagaagggaaaagcacctgccccagaaatctaatttcctgctggcttcagcctcttaagaagagtccactgggaagaggtttgagacagacagggtttgacgtgtcgctctcggatttttagctcggtgaccgaaggccagtggttgcccctctcagagcctcagtttccacatctgtaagtggggacagtaatccctacaggtctcaggggtgttcctgaaggttaagcaggggtaccacacatcccagtgggtagagcccttgggactgtgagtttgggtcccctgggcctatgtgaccctggaggaggaactccatcaatggtgtctccctgcgctgggaggattattcccgcttctaagaggcgtatctgagtggagtgggcctggcaactaagcgtccattcatcctaagctcgcctttgggaagagttgtgtgccagttcaccaagtggccccaagattctcccaaatacttcccttggtctacctggcagaagtcctccgagaattggggtgccccagctcctctttctacactggcttctcaagagccagatcactgggtctcctagggtgtccgcagcgtttccagcaccttcccacgcacctggctggctccaaacccctccagcactgaggtcttggccacaactgtcccagtgcagccccccagggacgggagggcagaaagcagccttgctcaatgtcctgttacaaggcagggacgggggtggggccctccccaggagtgggcagatgggatgcccacgggcggagaccctggggaggggaggaattggacttccttagtaggctggaaaaggggcagggagagggggcagagaacaggtttctggccccaggaaactcaggtattgggagggcaagaggaagagggtggtactgcctcccggataaggtgaccaactttcccagtttgccccggactgggggagtgggttccagggatgcagggctttccacgctaaaacagaaacagccgtagactctgccggtaaagggcctgggcaagtcccgggacatgcacaaactgtgccttctgtggaaagggaactggaccagttcgggtctcgggggtgctttcaactctgccacctgggctgtggccccagaagcaggtggccgggaggctctagggatggcgggggcaggtgaggggagactggtgggctccggaaggcttctcagcgcggagctccagctgcggggaggcgcggcccctcccggatgccgggacgagggaggggaagggaggggaagaggcggggtaggtaggggcggggggcgcggcagcggcagcgcgcatgcccgggcccggggcgcctggacctcgggagggagcggagggcgcctacctgcaggccgttggggtatgcgtcgccctcggagagcgagtccaccaggtcctcctcgtccagcgtggcccgcttgtacgtcgacatctgcaaggccaaatgcagcacggactccctcagcgcctccatggctctcgcgcccgaatggggaagcggccccgaccctggcgccgccgccgccgcgccccgccccggcctggacacccgagaccgagaccggcccacggagcggcccgcgcggggaggggtcccgcccgcctcccgcccccgccctccaggccgcgcccgcctcacccccagcgccgacagcagggcggacaccgggggcggccacacgccccgcatgctgtgccccagacgcctggtcccgctgcccgggtggccgggatgggatgggccgggccaggcgttgcaccaccttcgcgggcggggcctgatcggttcgccggcgcccggttcccaacctccggcctcccggggagaccccaagacccgagaggcccgggggagatggggacccctcccttccccggaggtcgggagtgggggcccccaaactgaagcccctagcaggcaggaaaggccctcacagtgacccctccttcgagaaaatcttaagtcccccttcaacaaccgggtccccagtggcagataacaaaagtatcaggaaggtgccctcgatgtggcccagagcaatcaagacaggttccccccggcatcagcccttaggtgtgtctagggggttaatgctagaaagaccagacaaaaaaggtggggtaaaaaggtaggtgtcccctttcagttcccctttctagctcagaggcctttaagccagagttcgtgaatgagtttcagaaaatttcagagaactccctgacacgggatgaaaggagctgtgtgtgtgcatttggatggctgcagggtggtccggtggtcacccccgtgctcaaaggtgtcgccctccctgcaacacaagagaaccattgctccagggggagtcagaagccaggaaggggacccttctttcccatcttccccctcaagactcggagcctcagccaggtgcccccctccccagcccctgagccctctcctataaccctaggcagggaaagggggctctctcggatatgaggtgttcagttagggactcaggcccagcactgtcccaaccaagaaccccagagaggtctaacccagcagatttccaaaggactctccgcttctagcaaggcgggaatccctgcatttatgcgtacttttcagctttgcaaagtgcatttctgctcattccaaatttgattctcacagtcacacatatgtgtgaataaacaggtttagaggggtgaggggcctgacgtcacagggacagtgagggcaatggctccagatggtctcctggcttccactcctgccctctgacagccccctcagcagccaggatgagcctttaaaatgaaatctggctgaggccaggcaccatggctcgctcgcgcctgtaatcccaacactttgggaggccaagttgggtagatcacttgaggtcaggagttcaagaccagcctggccaacatgatgaaaccccatctctactaaaaatacaaaaaatcagctgggcctggtggcatgcatctgtaatcctagctactcaggaggctgaggcagaagaatcgcttgaacccaggaggtcgaggttgcagtgagctgagattgtgccactgtactctagcctgggtgacagagtgagactccatctcaaacaaacaaaccacagaaatctggctgggttcagtggttcacacctgtaatcccagcactttgggaggctgaggcaggagatcacttgagtctaattctaggccagcctgggcaacacggaccccatctctacaaaaagaaaatatatatatatatatttatatattatatatttttaattagcaggacgtggtggtatgcgcctgtagtcccagctacttgggaggcttaggtgggagaatcgcttgaagccaggaggtggcggctacagtgagctgtgattgcaccactgcactccagcgtggacgacacaacaagatcttgtctgagtaaataaataaaataaaaaaaaattctgatattaccactcccttgcttaaaaaccctccactgtcctggaatgaaatccaaacccttcaccaggccccatggcccctgcccactctg

SEQ ID NO: 597 - DNA, 4001 bp, Homo sapiens
ttttactatctgcacacctatggcacaggcactatgctaagcacatctggttaagggcctgaaaactagtcattaattagtcaaatatgcattaagcacctgctgagccaggcacatttggtaaaacacctacaaaccattatagttaactaatcaagcaattatttcttaagtacaacctatctttgtggaatgaatgaatacctgtgtgccttacccaggagggatggaagaatgctcagatgaaggccctgctcttttctaggcccctgagtcccctccccaccccagcgcagcgtggccaccctcacagaccagcaacttcacagagggaaggctccacacagcctgtagtggatgttccaagatcctgtgaaagctcctaatctctctcatggggtgagcgaccgagtcagtgggtgggatgctgagcagagcccccagaggctgctcaactaggtgaaccatctgccatcagaagaatagatgttggggcacaggggactgagaggccctggctttggctaattccccattcttatttctaacttggatccaccccttcgcacttcttaagtgtttactgagcatcaactctgtgtgaggcagctggctagatccacttagttggaaacagagaaccagtctcagacccctacagcaggatcagagtggcccaattgtatcaccattcaaagtgggacaaaggcaccgatcaaggaacacgatgggcagctggatctggaagggcagctctcctgggggtgtaatgcgctctggagcgtacttggattacaaagggaggtggagcctgggcttgagcccagtagcctgtgggtgaattccaacttccgcattggattagcaagtcactctatctcagtgcctcagtttcctaatatggaaaaggggccaaaagtaaccacacttcacagggctgcctccaggaggaaatgagattgcatctgaagcgaggggtgtggtatttgggtatttggtccgaggaaataattcagtaaacagagggcattattgttattttattggaactagagatagcagacaatgtcagcctatgtgtgtaattaccccacattctagcaacaacagtacccagagctaaagttgaagaagtcctacgaggcaccagctatgggacatatgttatctctagtccgcagacccatcccccagttgggtactgttttcccatttaaattagagaagacacaggctgagggaataagtgacttgtccgaggtcacacagccagtaagttgctgggacaggatgtggactcaagtgcgagacctttatatcacccacgctgcccacttcccgggtcttggtctatctcagcacccagacccccctgggcctggctccctccttagcctcagagccctgccccggcttaagcagggaagcccccctcgcccgagctgacggagccgggtgcaggagtgagtcaagcccaccatgcaacacgaaggcacctacttgtctggtactggatgcccagtgctgccaagcaggccaccagtcctgccgccagaagtaccaccaacaccaccagccgcttctccacctgggtccgtgcagcccagcacctctggccactccgggggctgtggaagttcacctgcagggaaggaggcaggaggggcggggaagacgtgagccccgggccccgcttcccttggaggaaggggttccgctgcaggcccaggccctggagaggcatcagggctgcctcctgtctcaggggtggtctggttcccacagattcagccctaatccaggaaaggaacagccaccctgctcagctgctcggatctgctcccaaacatcagagagtcaagcagctcggccccgacaggcttgtttttttgtgtcactcgatatgagtggaaggaaaaaactacagcttttccctgtttctccagtgaggagttcaaaaaagaacaggatgtttggacttgcaggcatccagtgagtacccagctgggctctctgcagagcccccacatcagcggggtcagggacaagggtgacacagccatggctcacacttcccagaagcacagacatccttagctcattaaaccctcataatcccacgcaaaaacacgcgagccaccttgttatttttctttttacaagtgaggaaactgaggtccagagaggtgagaccctggcttctcaccacccagctgaatggggacagctgggattggaacccaaagctgttgatgcccgagcccaccagtggatcagaggtggatcctgggagatgttggcagagatgcaaggagaaatagctccattcaggtcctgaaagggaggaaaaatccctccagcctaacagtctagctaaacaggaagggaggcacaatgagaggaagtgcagggtgtggcagggccctccctgcccgaggagggacacaccagccagcagcaatgggggccgacagcccaggcctctcacacccaaggcagcttggggttctcctctgttccaagagatgcttcctgcaaaacccacacccacaagacaggaagggtctcctgaaggtggggtaacgtgttcagtgacaccgtgtcatgtgctaacagctgagcaccaactcagggccatgctggaaatacacagcccagcagggaggcagataaagaaacagactggggtgggcaggggttcaatcagggagggcttcctggaacgggtgatgtctggcctgggtcagtcagaataagtaggagctggccagataagaaggaatggaagtggagaggagaggagggcctagatcctaaggggcacagaaagccaggttaagagcctggacttcctcttgaggactggagtgacatgattagatttaccctttgggaagggcagggtggagggagcaaggcttgccaggaagaggggaagctgtcagggaagatgaggagactcagactctgacctgcaacggccccaccaacagcctgaggggtgcccctggtgccgggtcagagccctgagggagtcccaccctggcactcggggatctgaagtgggtcagttgagggaagggtactgagaagccacgtggccatggttaggtatttactgggcaggaaatgactgggaattgctgcaccagagatggaggaacacaagcactttctgtggaaaaaaaaaaactgggttccaaaactgagaaaaggggccgggcacggcggctcatgcctgtagtcccaacagtttaaaaggctgaagtgggaggatcacctgaggtcaggagttcaagaccagcctggccaacatagagaaaccccatctctactaaaaaacacaaaaattagccaggagtggtgacaggcgcctgtaatcccagctactcgggaggctgaggcaggagaatcgcttgaacccgggaggcggaggttgcagtgagctgagattgcgccactgcactccagcctgggcgacagagcaagactccgtctcggaaaacaaaacaaaacaaaacaaaacaaaacaaaactgagcaaaggatcttggggcttagagacacttccgtggaggcccaggaggctcagacactgaagcagctgggtcaggcagtgggagggatgccgcccgctcaaatccctcaagaatctcttctgaaaaagtgagcaatgaaagtttcagaccatgaattaaaacttcaggctgtgagggcctggtgcagagagagacagcctggtatgatgctaacatgtacactgtactcaaatgtttataaagtgctttttcagagtaatcagttatctcacacactttaccttggtctctggtactcagaggggtcccaaggacttgaagcagggactgccttgcctagggacactgacgtatgtgtcctgctgcccctaatttgtttcatccttcctcctttaggcttctcatgtccccattatcatggctcagctcacagggcacaaggaggccgtgagacagtgttttg

SEQ ID NO: 598 - DNA, 4001 bp, Homo sapiens
atccccatgcctcctctgcactgtcatcttggtttctgtctctccttctctcactgccttttcctgccctttgagccctctggcaggggcagaggcttaatctgctgatccttgtcattcttttttggataaaatgattcccgatatttgcaagtgagcctaaaggtctttaacccatgataattttgtgtttacacatgtacaagtctgtattttgagtcactgaattactagaagagccagtgattacctaatggttgagaacacaggctttgaaatcagacctggttcaaataacttaaccttctgtgcctcagttttttaatctgtaaagtggggagaataatcttgactgtcttaagagctgttgccagttgggtagtgaactaagcatgagattgggggtataaggttcagcaatattaactgttcaaggaaattctcaccaagtggtgcagtgggactctaggtggcctgtccgtgtccactgaaggtggtagatgcacacttgggaacagtgggcaacagcagggagcaaggaactggattttatggcaaagccccgcttcaaacttgttgtcaagccggtaaaaaggaagcaatactgctggggaaggggcggcaggcgccatgtccggccacgaaggtggcaagaagccactgaaacagcccaagaatgcaggccaaggagatggacgaggaagataaggctttcaagcagaaacaaaaagaggagcagaagaaactcgaggagctaaaatggaaggccacggggaaggggcccttggccacaagtggaattaagaaatctggcaaaaagtaagctgttccctgtgcctaaggagatggtgaccctttatttcatcagtatttaaacctctctattccctgccataacatcttttgccacctatggctggaattaagtgttgtcttggagctgttgtacatttaagaataaacttttgttaaaaaaaaaaaagaagcaatacaacgaaatgtacagtacaatgccatctgtgtatcaaatgcaggagacaggggatgagatgcggggaggagacccaaggcaggagaagcgcctagccctgatggttaccagcagaggactgaggagcgttatcagcaccactgaatgctccagaagttcaaacaacaacaacaacaaaaacgcaacacgcgatcagaggcgttttctgccagtgacccgcgaactttgccccccacccctcgtccccgctccatactatccttgatcttggccaaaaggcggagaaacagcgaacttttccctggagccagaaggacgcaaaggttcgctagcggcccagggcgggcgcgcggctggagaggcaccctcctcactctgcccgctgccgcactgggcactgggactggctccgctgcctccgcccccgaaccgggccaggacccttggcgggggaggggaacgcgcacttaaacgctcctggcctgggggccgcggggcccagtcctacccgtgcggaccccgctcccccttccacacagtcggaagaccccaaagggcctttgaagagaccgaggttgccagaggccccccgcccccagctagagtctggagccactaaggcggccgcccacctctcaggcctggagcggtttggggcgcctagaactgggagggagggactggggatcgaatccttcaacgcactgagcggcccacctgccggtcccccgctgcctccggcctagtcccagtcgcgtcatgcgccgccccggaactgcacatttaccttggtccggacccgccagggcgcgcacttggatctctgagcccccggccgccccgtcggaagcgcagccgcgggcccgaaggggcctccaggggcgcaggaggcacagaacgcgcagcatcggggcgcaggctgggagtgaaggtgcttctccggccctgcaccgtctcggctcccgctgagagctcgcagttccggcgtcgggcgaagccttcgccaattgctccacctatgggccaagcgtctgttgcctccttccgcacctcccggggacagggagacttgagcggaggaggtcgggggaagcccagctcctctgtgtgatttggtgtaactctgtcaacctcccagcgtcagtgttttaatcctgtaaaatggggataatagtgactaccccgtggtggtgtgaagattaaatggggtgtgtgaaccttgcttgcacatatgctcaatttcattttttaaatgaaatgacatttaatgagtcccttgagcgtgtctacacttgcgaacctcactgcttcacctcccatttgcgcctcactttttttttttttttttttttttgagacggagtctcgctgtgtcgcccaggttggagtgctgtgccttgatcttggctcactgtaacctccgcctccgggttcaagcgattctcctgcctcaacctcccaagtagctgggattacagggacgcgccaccacgcccaactaattttttttgtatttttagtagaggcagggtttcaccatgacgaaaccctgtctctgttaaacattcaaaaaaattagctgggcgtggtggcgggcgcctgtaatcccagctacttgggaggctgaggcaggagaatcacttgaactcggaaggcacaggttcagtgagctgagatcgcgccactgcactccaggctgggcaatgagcgaaactgcgtcccaaaaaaaaaaattattctcttaaacacagtatatacaaagcactctcacattgctgatgtgaatgtctttaaatgaaaagcaactggtaatttatatcaaaattataaatgcacaagctcattgccccagaaattccaattttagaaatttaacctacagataaatccacacagctgtgaaatgacacgtgttcatggctgtacattgcagcattgtttataatagcaaaagactggaagcacatggtgctgtcatgtgcttctggtgaggcctcaggaagcttacaatcatggctgaaggtgacagggatccagcatgtcacatggcgagaataggaacaagaaaattaggtggggaggtcccagtttatcgccaaggggatggtgctaaaccattcacaagggatctgtccccatgatccagtcacctcccaacagggcccacctccaacattgggaatcatatttcaacgtgagatttggagggatccaacacccaaactatatcacagtctcaatatccatcaatagagggttggttaaataaattatggggctgtgtgtggtggctcaccctattattccaacactttggaaggccaaggcaggtaggtccctggaagccaggagtttgaaaccagcctgggaaatatagcaagcccctatctctacttaaaaaaaaaaaaaaggtacatcaataatctgaatactatgcagctataacaaaacacaggaaactgtttatgcattgatatgaaacaatcttcaaaatctattggtatatgaaacaagtcaaaatgcagaatagtgtgtaaagaaagctaaaatttggccgggtctggtggctcatgctcatgaacctagcactttgggaggccgagacaggaggattgcttgaggccaggagttcaagaccaacctagccaacatagcaaaaccccacctctattgaaagaaataataaagaaaacaaaaatttgtgttaacaagggggataagagtatgcatgtgtatatttgattgtatttacataaaacatctttggaaggatagggaagaagaaccgagaggctgggaataagggtaagagagacaagttttacggtttgacctgttatacgtttttggacacaggatgttgttgttgcccagattggagtgcagtggcagtatcttggctcactgcagcttctgcctcccgggctcaggtgatccttccacctcaccctcctgagtagctgggaccacaggtacatgccacaacattggctaatttttgtatttcttg

SEQ ID NO: 599 - DNA, 4001 bp, Homo sapiens
agcgctcaccttccttttcagcagggagttgggcaggtagcagcttttcctgttggagaggggtggcctcctgagagggagggggctgcactatagaagggggaatgtgtgagcagcccaccctttctcctagccagggctgggagtgggggcgagggcctcttccctcctttccacctgaaaagtgggatataggccagattagaaacctggagggtcactgaggagggcatgggatggtgaccttaccttgactctgtccctcaaagggagggccatgctgagaggagtcagggtgatccatggggaggcttcgggataggggtggggaggggggagctgcgtagccaactagaagcaagaggggagacatcagagcccacagtgcctcctggagtcccaatcccatgctgctcccccaaactcttaccttcttgaaagtgctctggcctcagctgcctctgtcctgtagccgtgaagcctggagggaagaagggcaagtcaggggccactgggagggccttccctggacttcagcaagggatggggaggctgtggagatcaagagtgtaggacagacaagcaagacacgagatgcccctctgtattcacctgccccgtgtcccctaatcctctcccagccccaacacacctagacatgaccagctgggttctgagaaagcctgtggcggtctgatagctccacctctactggctcagaggttgggcctaaagggagtatggcatacgggattggggagggaggccctcatttcctctgccagtctttccctcagggctgtgggttgtcctccccagtctctgctgggatgcgtctctagctttcagaggaaaaagtctggaccttgagctggttggagcctacccaatccacctcctccacccaccctcctactccaggcccttgaaacatctttaggcctttggttaaggaggcttcctgaaggttgagtgcttccccttcagccagtctcagctccgccttagtttaggtctcaatttagggcctgggggactgggacaggcacagggaagggtcacttgtaggtgatctgcagacacaaaagaccaggagctgggaagaatgatggcatggggcttcacagagaagtggacagatttgctgacatcctcagcagcttcctgcaggagtgccctgggtggtttttttccttttcttttcctttttttcttagtttccacccatagcattgaggggttcctgttttgttcaggcatcaaagcagataaagaatgtgtttgtgctggatggagggtgggtctgtggatggacacccctcaactcctctaatcagacagggagtcagtcgaggcttgctgggccagcaatccggttttgagcagcctgggggccccttttccctcccttgcctctcccaccagccacctccctacatcctcatcagcaggagaccctcactctgtgaacccaccccccactcagttgtctatttgactgggattctgtgtttcttggcagcagtttctaggaacccctctccttctgtgcccctgctctctgcctccttggttaaaggctccactggcctaggcccactttgggcctgctcagaaaaggaaagccaaacggagaatcactctgctagtgatgagccgtctgggatgcctggacccagacccctgccatgcaagcccagaccccctcctaagtgctgatcccccaactcacctccctcagaggcagcagaagcaacagccaaataggtcaagaccaaggctgctctggctgtggtccccatcctggggcaactgaccactggacactcagaggtgggtcctctcaggcaagtctggatgtgaagggccggccactgaagcttgtctggtggctgttacggttgtgagcttcaggaccagctcttcttttataattgtctggtgtgatctcccgccctcctcagcttcctgccatgactcagtcccagctgctcctcctctggaagccactcctcccaaagtcaccctgaagcctcctcagaggattgagaagaatgggactgattagaggagaacattcttatgaccttcaagagaaactgattcagagaatccaggagcaagaggtgtttgagcccctagtttgtgcctcagtttctccatctacaggctgccttctgtggagaggggatctgccaactcatgaactggggttggggaaacagggcacaaaggagtttacagcggggagcaggaaacctatccaagggatctcccctaccagtgtgaggtctggactgtcccttttcaatttccctaactctctgggacaaaaaagagggagacaaagtggaacatccttttatcccacctctccagagtcagagatgaagacatatgaccagcagcttccagtttgtatttatttatttatttatttatttagagacagagtctcgctctgtcgcctaggggggtgcagtggcgcaatctcagctcactgcaacctctacctcccgggttcaagcgattctcctgcctcagcctcctgagtagctgggattacaggcgtgtgccaccatgcccggctaattttttgtatttttagtagagacagggtttcaccgtgttagccagggtggtcttgatctcctgacctcatgatccgtccgcctcagcctcccagagtgctgggattacaggcatgagccactgcgcctggcccaatttatttttttttgtagtttcattctcctcacatccaaacagctacagcttccctccttttgtggggtccccaaaccaagtctcttttcaggagagcagacatgtgcctccacacagttctgaagttctgggggctccacattgtcagctgggttggggtctcccatgtgagggaggctgatggcactcgcaggtttttgcctcatctatgtacaaaggctcagaaaatttcttcggcatttgggaccctcgtgttctgtagctccaccagtcgctgcacagcctcaggcaagtcccactccccaaggcgacgattatctcgagtccgaatgttcactgttctcttactttgctctttctggccaaccactgcaggtagaggaagtttgggaacctcagggcaaattcacccacatggaacagtttcttttgctctgcagaaacttgagagacctaaatctttaggaagggtgggagcagagcccagatatggttcacagaaaggaagtattcagctgtgtctgctaatactaaatgaccagtcctgctcatcctgaggagacaaggaagtgcttcagtccccgcaggccttatcgcttctggtcaagagccccagggtcagagacataagagtcaagcagagaaagacaaacactgagaaccccacagagagaaactgtgtgtgtgtgtgtgtgtgtgtgtgtgtgtgtcagagacattagagtcaagcagagaaagacaaacaatgagaaccccacagagagaaactgtgtgtgtgtgtgtgtgtgtgtgtgtgtgcgcgcgcgtgtctgaagggggtattagagcaagtggaaggtggcaggagtggtgtggccttcacactgccccgcctccccccaaccactctgacccttagaacagtttcctctcatcagtcccactctggctcttggtgtctgttagggctggattcacagagtgaggggcctctgctgaggaggatgtatgcaggggctgactgggcggtaagggagggaaaggggccatgtacaagtccctgggattgcagcacagcttgctctgggtgcttgtagggagagtggggtgtgcaaaactcaagaatcaggtaatctggctgaggagtttctgctcctcacctttgagatagagccctgaaccctggaaaatgaaaaagggagcatggcagtgccagaattttctccctaaggcctttctcctcatcccttagggctgattccatctaggtctaaaataaacaagggtaattaacg

SEQ ID NO: 600 - DNA, 4001 bp, Homo sapiens
cccacggatgtcaccgtctaggttataggacagcggagagagagaactccaggaaagcgaggtctgggacggattttagattcacgtgagagaatagagaaaaatctccactccgacctcgggtaccaacacacaatattttaaaataaagacagaactagaggccattctaatcacagatgggatcccacaggtgggatccgcctctcgattctgcggatactatctgatgaaatagctccgagggccaatgtttagacagacaaaaccatttcatcaaagtgcaatgggagagaggaagaggagtaatgagaaggcatgtgagcggggagaaagaaaaagcccgggaggcgaaaacgaaatccacccccttgcgcccatttctgccagaggtttgcaggacgtgtctcaacctggcatcccgagtccagaacaaaagccacgggggctgcggcatgggcagggggaaggcgcgcggtggctgacgcggggcaggggccctggcgagcgcgggaggggcggtcagcagccgctcgcggggctggactgggagccccgtgcgactccgggtctggcgcctgggtcgggggtggttcccgggcctccctcgggggtcgccgaggcccggcctcgatagccctgcggctgctgcgagcgcctcccgagctcccgccccgcggtgctcgctccaggagcgggcgcggcgctgtgtccctttacctgcgcgcagagggtcgtccggtgaagccatggcggcgggttaggggcaaacgagcgtccgagcggggctggcaggcctccggggcgcgggaggaccgtgggaccacggggatgaaaagtcctgcggttccgacgcgcctggagcaaaccgtggctctgcgcgcccctgccctcctccgccttcccctcccttcttcttctcctccttcgcttcttccacgagctcacttcctgctttggcaattagcaaagccccttcgctgcgcgtccctcggtacctccctccagaggcgcggggcgggagccggggtgccgcgacccggggctgggacgcaaggcggggccccgagtgtcccgggcgtccccagcgcccagagcgcgcgtcctgcccggtacccacgtccccctgggcgggtcctagcggggggctgacacgactgccgcccgggacagactgcgagcgaaggactggccttaagaaacggctgcagtcgcgggtcgctttcctggctccctactcacgccctcagctgagacaccagaactccccttacacaggcctgggctgagatgcccgccggcgatctgatatttagacaaatttcctgatctttaagcaggctctgccgctgcatgatggcacacgctggtactttctattttgatttttctttggcattagttactacatgacctccagggtgagtgctgcagaaaaggagtgaacagaagtcgcccaatacacactcacagcttctctagaaaaaacagcttcgggttctctcagaaaagatggcttcaaatatttaaaatattacgcttaagtggggttttatacccattacttaagtgagaacacgttggaattggttatgaagaatatatttaagattgctacattttaactaaagctatcatccatcataagcctattataggaaggcgacaggcattttaaattaaataggaatctttgaagagctctaaataatctttctctgccttcacacataagaacagaaagataaaagtcgggtcgaaaaagataataatagtatttagtgtataatatatccaagaattatcgtaaataagcaacctctggctaaaaactcagctctgagaaatccaggaagacagcaaatgcctacataccctcttggtgaccaggagctttagtgcctctccccatctgtttagtcgtcctgaggcccatggcgatgttgagtttggcttcttaattctctggagtttgccatggaagaagcaacagattgcgagaagatgctcgctggttgtctggccagagtcaaaccttctagatgaaagctctctggggaatttgtaggtgggaggataaacttcctcttggtctgccttcggataggaagggaaattttttttaagggtattttatcttagaatcaatttggaggtttggtttgtggttctttctgtacttctcatggagatggaattattctgacgttggccgtcaggaaacactagttgagtgagcttgttagcagcccaacctcaagcattgctataaagctggtttgctttttgaaactctgaaatgtaattcatgtttttatcattcccattctgcattatatcaaatagaagatggtggtatattttaagggtttttttttttaaggaagattgactagttacgtagttattactccctttcattttcatttcctcgtgcctcctttcctatgaattgcaacgatccccatcattacctttatttttcccatgtgctttgcgaactataaagtatgacgcaaatgggtgctattgttgttttgcactttacaaaaaaagtaatttaaaaatgattcgcattcaccagagttcccatacaatcaatttgctgtcacaatgtccttcaacttttatttcttttgctgtccaagagtgttttaaaccactattgaaaatagacatttttgggctgggtgcagtggctcacacctgtaaccccagcactttgggagcccaaggcaggtggattatttgaggtcaggagttcgaggccagcctggccaatgtgatgaaaccccaccgctactaaaaatacaaaaaacttagctggattggtggcacatgcctgtactcccagccactcaggaagctgaggcaaaagaatcgcttgaacctgggaggtggaggttgcagtaagctgagattgcaccacggcactccagcctgggcgacagagtgagactctgtctcaaaaaaaaaaaaaaaaaaaaaagaaagaaagaaagaaaagaaaatggacatttttaacatttcccgatagtacccaaacactcaatctcagagtcatgtgaaaaatttcatatttccataacttcactgctctttgagtgacctccaattttccttttccaataaatggagatagtgcatttggtaatcatggagtcaaatatgctggatttcgctgatggacctgtcactctaaggttgtgttacattaagtaagaaaccaaaactgagtctgcaagtgtctgcaggattgtgagaattcactgaaataatgtttatgtgaaaatactggctgggcatggtggctcacacatgcaatttcagcactttcggaggccaaggtggcaggattgcttgaggcaaggagttcaagaccagcctatgcaacattttgagacccagtctctacaaaataatttaaatattagctggatcccagcactttgggaggccaaggtgggtggatcgcttgaagtcagaagttcgagatcagactgcccaacatggtgaaaccccgtctctgcttaaaatacaaaaattagctgggcgtggtgacaggcacctgtaatcccagctacttgggaggctgaggcaggagaatcacttgaatccaggaggtggaggatcagtgagctgagatcatgccactgcactccagcctgggtgacagagtgagactccatctcaaaataaataaataaataaataaatacaaatacaaatacaaaaattagccaggtgtggtggcaggcacccaactacttgggaggctgaggcaggagaatcgcttaaacctgggaggcagagctgcagtgagctgagattgtgccactgcactccagcctgggtgatagagcaagactctgacaaaaaaaaaaaaaaattagctgagcatggtggtacatgcctgtagtccctgctactctcggagggtgaagcacgagggtcacttgagccaaggagttacagacctcagggagctatgatcagaccac

SEQ ID NO: 601 - DNA, 4001 bp, Homo sapiens
tttatttatttattttgagatacaggtttttgctctgtcacccaggctggagtgcagtggcttactgcagcctcgacctcctggactcaagcaatcctcctgcctcagccccccgagtagctgggactataggtatgcactggcacatttggctaatttttctattttttgtagagtcagggtctcactatgttgccaaggctgatctcaaactcctggcctgaagcaatcctcttgcctcagcctcccaaagtgctggcattacaggcctgagccactgcacccagccactgagctttttacacactgtggtcactgctgagctgtttcccagcccccatcttgcctggtactgtcgatttaggggagcccaagtagattttacattttatctccatgcagtgtatctctctcaagatctttttgaattcccccaccccccacccctgcaatcatcatttaatgagatctgaggccactagtagtaaaatccagcctaaaacaccccttggcaccttgtcaattcagttctcagaaaaggaggtggatgctagggtaggagtggagtgggatggggcagtaggagggtttctccctttgtttccccttctgttttttcaaacaataggtatggggatggggaagaatatctagacaatgtatttattttccgcatccaattgataaaatgtttaacaatccccacttaaaaaaaaaaaaggtagatctttctttgaagtttccaagaaacgcccccaaacccagccatcacaatgccaacttagttgttgggtgtagtcttctgaccacctgcagacacactgtctccttttgactgctgaagccacaatttaaggatggaacattcaaactcggcccctgcccaagctcaagaaatgaaataggaaacgcgtttatctaaacggttatatcaggttctgtgtaactctcttcagtgtttccaacctcaacaaaaccaagtaaagccccagtgtactctgagggatagatcattcattcgtgtgttcaagaaacacccacggatgtcaccgtctaggttataggacagcggagagagagaactccaggaaagcgaggtctgggacggattttagattcacgtgagagaatagagaaaaatctccactccgacctcgggtaccaacacacaatattttaaaataaagacagaactagaggccattctaatcacagatgggatcccacaggtgggatccgcctctcgattctgcggatactatctgatgaaatagctccgagggccaatgtttagacagacaaaaccatttcatcaaagtgcaatgggagagaggaagaggagtaatgagaaggcatgtgagcggggagaaagaaaaagcccgggaggcgaaaacgaaatccacccccttgcgcccatttctgccagaggtttgcaggacgtgtctcaacctggcatcccgagtccagaacaaaagccacgggggctgcggcatgggcagggggaaggcgcgcggtggctgacgcggggcaggggccctggcgagcgcgggaggggcggtcagcagccgctcgcggggctggactgggagccccgtgcgactccgggtctggcgcctgggtcgggggtggttcccgggcctccctcgggggtcgccgaggcccggcctcgatagccctgcggctgctgcgagcgcctcccgagctcccgccccgcggtgctcgctccaggagcgggcgcggcgctgtgtccctttacctgcgcgcagagggtcgtccggtgaagccatggcggcgggttaggggcaaacgagcgtccgagcggggctggcaggcctccggggcgcgggaggaccgtgggaccacggggatgaaaagtcctgcggttccgacgcgcctggagcaaaccgtggctctgcgcgcccctgccctcctccgccttcccctcccttcttcttctcctccttcgcttcttccacgagctcacttcctgctttggcaattagcaaagccccttcgctgcgcgtccctcggtacctccctccagaggcgcggggcgggagccggggtgccgcgacccggggctgggacgcaaggcggggccccgagtgtcccgggcgtccccagcgcccagagcgcgcgtcctgcccggtacccacgtccccctgggcgggtcctagcggggggctgacacgactgccgcccgggacagactgcgagcgaaggactggccttaagaaacggctgcagtcgcgggtcgctttcctggctccctactcacgccctcagctgagacaccagaactccccttacacaggcctgggctgagatgcccgccggcgatctgatatttagacaaatttcctgatctttaagcaggctctgccgctgcatgatggcacacgctggtactttctattttgatttttctttggcattagttactacatgacctccagggtgagtgctgcagaaaaggagtgaacagaagtcgcccaatacacactcacagcttctctagaaaaaacagcttcgggttctctcagaaaagatggcttcaaatatttaaaatattacgcttaagtggggttttatacccattacttaagtgagaacacgttggaattggttatgaagaatatatttaagattgctacattttaactaaagctatcatccatcataagcctattataggaaggcgacaggcattttaaattaaataggaatctttgaagagctctaaataatctttctctgccttcacacataagaacagaaagataaaagtcgggtcgaaaaagataataatagtatttagtgtataatatatccaagaattatcgtaaataagcaacctctggctaaaaactcagctctgagaaatccaggaagacagcaaatgcctacataccctcttggtgaccaggagctttagtgcctctccccatctgtttagtcgtcctgaggcccatggcgatgttgagtttggcttcttaattctctggagtttgccatggaagaagcaacagattgcgagaagatgctcgctggttgtctggccagagtcaaaccttctagatgaaagctctctggggaatttgtaggtgggaggataaacttcctcttggtctgccttcggataggaagggaaattttttttaagggtattttatcttagaatcaatttggaggtttggtttgtggttctttctgtacttctcatggagatggaattattctgacgttggccgtcaggaaacactagttgagtgagcttgttagcagcccaacctcaagcattgctataaagctggtttgctttttgaaactctgaaatgtaattcatgtttttatcattcccattctgcattatatcaaatagaagatggtggtatattttaagggtttttttttttaaggaagattgactagttacgtagttattactccctttcattttcatttcctcgtgcctcctttcctatgaattgcaacgatccccatcattacctttatttttcccatgtgctttgcgaactataaagtatgacgcaaatgggtgctattgttgttttgcactttacaaaaaaagtaatttaaaaatgattcgcattcaccagagttcccatacaatcaatttgctgtcacaatgtccttcaacttttatttcttttgctgtccaagagtgttttaaaccactattgaaaatagacatttttgggctgggtgcagtggctcacacctgtaaccccagcactttgggagcccaaggcaggtggattatttgaggtcaggagttcgaggccagcctggccaatgtgatgaaaccccaccgctactaaaaatacaaaaaacttagctggattggtggcacatgcctgtactcccagccactcaggaagctgaggcaaaagaatcgcttgaacctgggaggtggaggttgcagtaagctgagattgcaccacggcactccagcctgggcgacagagtgagactctgtc

SEQ ID NO: 602 - DNA, 4001 bp, Homo sapiens
gagataacatatgtaaagtattcacagagtgagatatttggtaaaacttatcaatgatacattaaattcatatgagagaaaatgtaagatatttattagagtttaccggtaattttattttgatggttgatacttcagcttttttccatcaagtgacctttattgctatttagaaacgaatacaagactctttgcaatgatttaaagtacataaagtaagacctgatggttccaccacccctccagcctaaccccatgagataatcttcgttccactttttttctgagctcagattttttttttcttttttaaaaaaaacatgggatgatactatacatattattctacaacttgcatttttttttgttttggaaatatattctggataggcttccagtgacgtacttccttcttcttaatgtctcaatattattccataatatgaacgtaccctattgaaccatttcctccaaggaagagctgttctttcaaaatgcacttttttttttttttttcgagacagagtttcgctcttgttgcccaggctggatctatctctgcattaagagtgcttttattttcttagggtagattctcagaaatagaactgatgaatcaaagtgtgcacaatttaaattttagtagatactaccaataagttacagcaatttacactctcactaagccttttttttctattccttaactaaccagaaccgtatccttgtgttttgtattatatttactaatctgatgggcaaaaaccagctagctcctcgttttaatctgcatctcctacgtttatggaggttgagtaacttttcatgtttatttaccacttccatttcctcttctggcttaaccgttcatgcctttctcccatttcctactggttcttcgcttttttcttattcatgtgtaggacctcgtgtatgtattactctgaattaaatggtgtaaatagaattgataattttaacacacttccaagacggataaaaactactgaataggtatacttgagacttttgaataatttccccccaaacattctattatgaaaatacagtgcaagaaaacactgcaaggaaatagtaaaatgtgtaaagttcaagttccaatgaacgcccccttttccgtaacaggtgtaaacatcatttccttaactactgtgagatcagcaacattttcccagttggaagctcacttgcgcgagaaagctaaccatgcttcggtcgacaggcagccaaccgcagaactccagcgcgcagcgatgcgggctgtagcccccttcttgggccactgacatggcagccgcgttgacacaccgcgcctggcttcaaggagcctgcacatgtcaccggcggccagggcgacaccccgtcagctcccccgaggtcaggtcgcgggcggcggttcccacctccccggaccctgtccacccctctagggttctcgcgcgggaagagccgttccaatcgcgacaggagaggccactacgcgaccgggtcgcaatgacaggcacccctcctgttgtcagcctcaccgagaaacccaccccaggctgccagcacccttacccaagcttctgtttctcctccctactcatgggctcggcccccgccgtccacacggaggtggccgacaccaggcagaacgcggccgtcgccgccactagtctccatcgcgctcgctggggaaccggggacccacagccccggccgccggcttcgctcatggccccgcggttccgcgcacgcgcagctgctacgcccggccggtgagacacattgctggacgctggtggccagggggctgctagccgtgccgagacggggcgggatgcggagtaacacggacggccgccggcgccaaactgtttcccgaagccaccaagccggtccccagcgccagcgctgccaccgccctccgccctcagtatcccggagcgcctcccccagctttccggtgtcgtagtctaggaaaccgcctccccaacgttacttccgggtagggccgaagccgtagagcctcaggaccaatggagacctcatgggagaggggctgtctccggcgactggagagggcattggccaggagaagtgagacgtggacaaaaggcgggactgggaagggatctctcgcttcgacccgcctccgacccgcggagttgccccctgaggactaccagtcccagtgtgcactgcttcttccccggctctcccgcgagccgactcggagccgtgtctctcgcttctacccggggtaggcgcgctgcaccctgggacttgcggtcctccgaggtcgccagtggttgctgggatcccacctccccctttcctcggcgccctacagtcaaccctgtctcggtgggctgcggagtcccgggaaacccgtcagctgtttatctctcttcctcagaaagttgtttcccagagagctggctgaatgaggcgcactgtccccatgtcagtgctgctgcgttagggaatagtgttggagtagtcgtctaccctcagggaaattccaaaacacagtaacagcaaaatgaattgagcctttgaaggcattgcgctaaggtttttactcgcaatcatctcatgcactcttctcaactctgatagagtaagtaccaccatcccccttttgcagacgagaaaacagaggcttagaaaagttggttaacaagagctcgtcacactgctgtattagaatccatccagcctctgattcggaagcccttgcatttaaccaccgcgcagtactacaaggatgaaggagcacgtgggtcctcgtacatgattaataatagttacctcaaaagctcaatgtaaggagagctgtgtgggctgcaaagaaggtttaatgaaggagattggaacttgcaatgaattttgatgaccgagtcccaggttaactattggtaaaatgacacatcggttcctcttgaaaaaccacattgtttttctagtgtggtcattcaataggtgcggagtttaggagcttcgatgtgatctctgtgaccacagtaaattacttacgtgtcctttaagcagtattcggcggtctttctggaaacgtttcttccttgacttttatcaccttacctcttacctcttaacctcttacctcttctctggctgacccgttttccttcattctctcgctactttatattaaaatacaggtgttcccttaaggttttctttttgtcctttttctctctgtactctaattattccttggtgatttcttctcataaggattcagccaacatatctctgtggttgatttctaaatcaatatctgtcctgatcattagacccacatttccacctccctaatagaaatgtcctaatgtctagcccaagggtagctcaaacgtaagatgttttctgattcaaattaatgcatcggaatcattgtcaactcatctttagccttcggggtccacgtgcaattaattaccaaattatatagattttacctcttctatctttcagattattacctttctttctattcccacttttgctccattcaagcttccattacctctctcctaaactattgcagtgtctcaataaatgttaaatatacttgcttccttattcctgcagttttcttatctataaagtgggaataatatggtccttttatccagtagtccccaacttttttggcaccagggaccacttttgtggaaggcaatttttccacagggtgggggagacaccgttccatctcagatcttcaggtattagattctcataaggagcgtgcaacctagatccctcgcatgtgcagtgcacaatagggttcatgctcctatgagactctgacgcagttgatctgacaggaggtggagctcaggtggtaatgcttgctcgcctgctgctcctgagaggcaactgactggtaccagtccactgccccaggcttggggatccttgcttttatctactaacgtggatgctgtgaaaacacatgaagtcatttc

SEQ ID NO: 603 - DNA, 4001 bp, Homo sapiens
cattggcaagcagggactgtccacactgcccactgggacagccacccatgccagcagggtgccaatgaaaggtgaccagcccttgacctcaagaagtcacaccactgaagtcacaggctactccacaagggtcctggtagcccttggcaagaccctccccttctctgggcctggcttggctcactgagagctcccagcatgggggcaaggaaatctgtgatcctacctgaagttgggaattgggaacctcctagtctctctcccctctcagacaggctggtccccctgttctcaaagaaggctctcagctagctctggaggaagggcggccactccatctcacagaagtaaacacaggctcatagctaagctgcccccatctggtccccacttgcctggaggggtaacacatgtgccttagaggcttgacttgaaagtggggtgtgtgtgtgtgtgtgtgttcagatgggattaatttcagattcagagtctgatcaagcgggccaggggaatggcaggggccctgtggctggctagaccagcactttcgagtgacagagctaattttagatggtgtggttggagtcgcagtgactccaggtagactcagcacgcagggactggcagggttcccgccctaagcaagtgtttggatgcggattagcttcacacacgcttacgtgcagggcttctcttgccttttgcaatttggggaggggaaaaaatcacaaacacacacagaaacttcaactgaaggtatgcagtggcctggaggcagtgcgggtgcaggcggaacagacagcacggggctcccacccgggtgtagccagtagcacagggcaggttctcatctgtcgtttgagggactatcctgccttatggggaggatgggggggctcctgagatgatcatgcacgtgcagtgcttggcaaagagcctggcatagtcaaagcacgggtgctgtcactaatcgtattattattggaagagcatgcagaggcagcatgacagagactgtgagctccggcattccccaaccgaggatggtgcctacccttacaattacctgtgtgatcttgggggaggcgcttaagctctctgagcctcagcacttgaatctggaaaacggggccaacacttgcttaccaggctgtcttaagaattctcagaagacagccctctctatggctcaggtggtccccactcaggaattgaaacaattaactattgatattagccagtgcctccatctggaggcccagggagagatggaatgtgtcaacgttccctagcatgccagtagcttccaccctgacaccctgccccagagctccccctgcccccaatccccatggatgctcactcaggagtgttcacccagatgatgtccaagtggcagaagtagacgcactccttgtcgagccaggagctgcaggagcaacggcgaagccgaaggtgggtgccttgggcatgagatgaggacgctggctgctccagggtggcagcagcctggcccttccctgcatgcacaggagggagagagaggtggagaggtgggttggggtgcctggcacatcccagagtgggggacccaccatgcccctcctcttgcataatcgagggagttggcactcttgctgctcaagagctccaggccagcccagggaagtcccagcagcccgtggggagcctgggcacctctgtatttgcagaacctttcccctgccaccactgccgccaggctcccgcccctgtctgcccccagctggcttgggaggcactgcagccctagagggagacagagataggcagacccaggagctgtaggcagcaggtgaggccagggcagctcaccttcatgcagggccacgagcagggctagcgcaacggagcaccaggtggtaggcacggagaccatagcggcggtggagcgcgcaggctggactggagcagggagtgcctgttgccagcgtcctgctattaagctgagcagatagctcattgcctcggtgccctggctgcctcttataccaggcacggtgccccaccccttctggtccagccctgccccgctgcaccggcgggctgggagccagggacaccgcctcctccccgggcgcctggcccgacccagcctctgcagtgaaggggggagggagatggaaggcccattcctccctctgtgcctggagcacctctgggagtcctgaggctccctggcagtccccaggggcccctcgcagtccagctggacttcctcaagtcacccccagctgccccgagccccctccctcactctgttggcggctgctccacaggtctcgcccagggctgtgagtgtggaggaggaggttccatgagcaaaacccctctcctcggagaagactctgccatctatcctgcctgccctctgccaaccaggctgaggatgcccctctgttgtgtgggatgtgaaaggcccacgcaaggctgtgtggccttgggcgagtcagagccctctctgggcctgcctccctctgtgaaggacacagctcatgcctgacttctgaccagcctggaactgcttcatccccacctcacccaggaaatgcccccctcaacccctgccctgtcaccccagggcctggggcaggagttctagtcccttccagaagctgttcagctatgcagccatggccaagggcatccttcctgggcctgtttccttgtttgcaaacaaggccaaaacaagaaggtacttcacctgcttggcttacaggctcctttgagactaagaaggtggcttcagacccctttccagaaagatgtccctgaggacacacacacaaagcgccccttgaacagtctcctgtcctggccatgacaggatgtcttggcttccaccgggggctactgtctgcaaaagaagtaagccaggggacttctctggggactggcattctgctcctgcccctctgctggcccagaagccttgccggggaggggaaagcagggatgaaccacagctgtgctgagcagctcagggaaccggcaggcaccctctgttcctgccctggctgagagtccacttcctgctggagtcttctcagggaccctgtctccaggcacaacaggaaaggccctctcgtttcttggaattcccagggcctgtgcctctcgtgcctgcctgactcatcccattgcacttatctcccctgcaatctcaaggtccagagccccagaggaggcagggcctgacacctaccctgcacacagtaggggccttgcgagtgcttcctgagggcaggggggtcaagagatgcacacctggctttccacttacagaacccaggatgcccaatgctcagttcctgtattcagcagctcctttgtccttggacatttatgaaggggacagtaggtgaccaccaggaacaggcaagtttgcatcttcctagggtgtgcccagagcaagcgtgcatgtgtgaaatcctggagaaactggcagaactgatggagggtgagagcaggatcttccttcctggagactgagctggctcctgtgaaaaaaacaaacaaatgtttcctgagcacctactacgtgcttggagcactatcgactcttcctcaccacaaccccaggaggcagctattatcacaggggagtcagctcaggactgcccacgaggctcagagaggagcagggcctggtcaaggccacccagcgggcaggtggcttggtctatcaagcaaagcacaagggactccccgtgaggtgctctctgccctcccacgtcgtgcctctcgaagaatttagaagagtatttctggaatgaggtgagcaatactcacagtcatttctatcagcctctgcaagaatatgaatacggaattaagcagggctgggggctgcttgggggtggatagagaattcaaatcgctggaccgtgaagagaagaaagaaggaaaagcaggtcagcggggagacggagggggtcacggtggggaggaaaacaaacagg

(The sequence listing continues in the following parts.)
